United States Patent Application Publication US 2007/0214517 A1 - sequence listing, part 53

SEQ ID NO: 71100 - DNA, 2571 bp, Arabidopsis thaliana
  misc_feature (1)..(2571): Ceres Seq. ID no. 3049718
  misc_feature: MA Experiment ID: 20000184 Result: Down-regulated in Transcription
  misc_feature: MA Experiment 20000184 PARAMETER Experiment Name: At_Shoots__P Parameter: Age (day) Value: 7
  misc_feature: MA Experiment 20000184 PARAMETER Experiment Name: At_Shoots__P Parameter: Tissue Value: Shoots vs. Whole Plant
  misc_feature: MA Experiment ID: 20000227 Result: Down-regulated in Transcription
  misc_feature: MA Experiment 20000227 PARAMETER Experiment Name: At_Root-Tips-vs-Tops_P Parameter: Tissue Value: Root Tips vs. Root Tops
  misc_feature: MA Experiment ID: 20000234 Result: Down-regulated in Transcription
  misc_feature: MA Experiment 20000234 PARAMETER Experiment Name: At_Siliques_P Parameter: Age (day) Value: 21
  misc_feature: MA Experiment 20000234 PARAMETER Experiment Name: At_Siliques_P Parameter: Organism Value: A. thaliana
  misc_feature: MA Experiment 20000234 PARAMETER Experiment Name: At_Siliques_P Parameter: Plant Line Value: WS
  misc_feature: MA Experiment 20000234 PARAMETER Experiment Name: At_Siliques_P Parameter: Tissue Value: Less Than 5mm Siliques vs. Whole Plant
  misc_feature: MA Experiment ID: 20000235 Result: Down-regulated in Transcription
  misc_feature: MA Experiment 20000235 PARAMETER Experiment Name: At_Siliques_P Parameter: Age (day) Value: 21
  misc_feature: MA Experiment 20000235 PARAMETER Experiment Name: At_Siliques_P Parameter: Organism Value: A. thaliana
  misc_feature: MA Experiment 20000235 PARAMETER Experiment Name: At_Siliques_P Parameter: Plant Line Value: WS
  misc_feature: MA Experiment 20000235 PARAMETER Experiment Name: At_Siliques_P Parameter: Tissue Value: 5-10mm Siliques vs. Whole Plant
  misc_feature: MA Experiment ID: 20000264 Result: Down-regulated in Transcription
  misc_feature: MA Experiment 20000264 PARAMETER Experiment Name: At_Open_Flower_P Parameter: Age (day) Value: 21
  misc_feature: MA Experiment 20000264 PARAMETER Experiment Name: At_Open_Flower_P Parameter: Plant Line Value: WS
  misc_feature: MA Experiment 20000264 PARAMETER Experiment Name: At_Open_Flower_P Parameter: Tissue Value: Open Flower vs. Whole Plant
  misc_feature: MA Experiment ID: 20000265 Result: Down-regulated in Transcription
  misc_feature: MA Experiment 20000265 PARAMETER Experiment Name: At_Open_Flower_P Parameter: Age (day) Value: 21
  misc_feature: MA Experiment 20000265 PARAMETER Experiment Name: At_Open_Flower_P Parameter: Plant Line Value: WS
  misc_feature: MA Experiment 20000265 PARAMETER Experiment Name: At_Open_Flower_P Parameter: Tissue Value: Closed Flower vs. Whole Plant
  misc_feature: MA Experiment ID: 20000268 Result: Down-regulated in Transcription
  misc_feature: MA Experiment 20000268 PARAMETER Experiment Name: At_100mM_NaCl__P Parameter: Age (day) Value: 14
  misc_feature: MA Experiment 20000268 PARAMETER Experiment Name: At_100mM_NaCl__P Parameter: Organism Value: A. thaliana
  misc_feature: MA Experiment 20000268 PARAMETER Experiment Name: At_100mM_NaCl__P Parameter: Plant Line Value: WS
  misc_feature: MA Experiment 20000268 PARAMETER Experiment Name: At_100mM_NaCl__P Parameter: Timepoint (hr) Value: 6
  misc_feature: MA Experiment 20000268 PARAMETER Experiment Name: At_100mM_NaCl__P Parameter: Tissue Value: Whole Plant
  misc_feature: MA Experiment 20000268 PARAMETER Experiment Name: At_100mM_NaCl__P Parameter: Treatment Value: 100mM NaCl vs. No Treatment
  misc_feature: MA Experiment ID: 20000269 Result: Down-regulated in Transcription
  misc_feature: MA Experiment 20000269 PARAMETER Experiment Name: At_1mM_KNO3_L-vs-H_Roots_P Parameter: Age (day) Value: 7,10,12
  misc_feature: MA Experiment 20000269 PARAMETER Experiment Name: At_1mM_KNO3_L-vs-H_Roots_P Parameter: Organism Value: A. thaliana
  misc_feature: MA Experiment 20000269 PARAMETER Experiment Name: At_1mM_KNO3_L-vs-H_Roots_P Parameter: Plant Line Value: WS
  misc_feature: MA Experiment 20000269 PARAMETER Experiment Name: At_1mM_KNO3_L-vs-H_Roots_P Parameter: Timepoint (day) Value: 7,10,12
  misc_feature: MA Experiment 20000269 PARAMETER Experiment Name: At_1mM_KNO3_L-vs-H_Roots_P Parameter: Tissue Value: Roots
  misc_feature: MA Experiment 20000269 PARAMETER Experiment Name: At_1mM_KNO3_L-vs-H_Roots_P Parameter: Treatment Value: 1mM KNO3 vs. 50mM KNO3
  misc_feature: MA Experiment ID: 20000286 Result: Down-regulated in Transcription
  misc_feature: MA Experiment 20000286 PARAMETER Experiment Name: At_Open_Flower_P Parameter: Age (day) Value: 21
  misc_feature: MA Experiment 20000286 PARAMETER Experiment Name: At_Open_Flower_P Parameter: Plant Line Value: WS
  misc_feature: MA Experiment 20000286 PARAMETER Experiment Name: At_Open_Flower_P Parameter: Tissue Value: Half Open vs. Whole Plant
  misc_feature: MA Experiment ID: 20000308 Result: Down-regulated in Transcription
  misc_feature: MA Experiment 20000308 PARAMETER Experiment Name: At_100mM_NaCl__P Parameter: Age (day) Value: 17
  misc_feature: MA Experiment 20000308 PARAMETER Experiment Name: At_100mM_NaCl__P Parameter: Organism Value: A. thaliana
  misc_feature: MA Experiment 20000308 PARAMETER Experiment Name: At_100mM_NaCl__P Parameter: Plant Line Value: WS
  misc_feature: MA Experiment 20000308 PARAMETER Experiment Name: At_100mM_NaCl__P Parameter: Timepoint (hr) Value: 72
  misc_feature: MA Experiment 20000308 PARAMETER Experiment Name: At_100mM_NaCl__P Parameter: Tissue Value: Whole Plant
  misc_feature: MA Experiment 20000308 PARAMETER Experiment Name: At_100mM_NaCl__P Parameter: Treatment Value: 100mM NaCl vs. No Treatment
  misc_feature: MA Experiment ID: 20000439 Result: Down-regulated in Transcription
  misc_feature: MA Experiment 20000439 PARAMETER Experiment Name: At_Roots__P Parameter: Age (day) Value: 14 vs. 21
  misc_feature: MA Experiment 20000439 PARAMETER Experiment Name: At_Roots__P Parameter: Organism Value: A. thaliana
  misc_feature: MA Experiment 20000439 PARAMETER Experiment Name: At_Roots__P Parameter: Tissue Value: Roots vs. Whole Plant
  misc_feature: MA Experiment ID: 20000441 Result: Up-regulated in Transcription
  misc_feature: MA Experiment 20000441 PARAMETER Experiment Name: At_1uM_BR-BRZ__P Parameter: Tissue Value: Shoot Apices
  misc_feature: MA Experiment 20000441 PARAMETER Experiment Name: At_1uM_BR-BRZ__P Parameter: Treatment Value: 1uM BR vs. No Treatment
  misc_feature: MA Experiment ID: 20000443 Result: Up-regulated in Transcription
  misc_feature: MA Experiment 20000443 PARAMETER Experiment Name: At_1uM_BR-BRZ__P Parameter: Tissue Value: Shoot Apices
  misc_feature: MA Experiment 20000443 PARAMETER Experiment Name: At_1uM_BR-BRZ__P Parameter: Treatment Value: 1uM BRZ vs. No Treatment
  misc_feature: MA Experiment ID: 20000451 Result: Down-regulated in Transcription
  misc_feature: MA Experiment 20000451 PARAMETER Experiment Name: At_CS6879_Shoots-Roots_P Parameter: Age (day) Value: 14
  misc_feature: MA Experiment 20000451 PARAMETER Experiment Name: At_CS6879_Shoots-Roots_P Parameter: Organism Value: A. thaliana
  misc_feature: MA Experiment 20000451 PARAMETER Experiment Name: At_CS6879_Shoots-Roots_P Parameter: Plant Line Value: CS6879 vs. WS
  misc_feature: MA Experiment 20000451 PARAMETER Experiment Name: At_CS6879_Shoots-Roots_P Parameter: Tissue Value: Roots
  misc_feature: MA Experiment ID: 20001247 Result: Up-regulated in Transcription
  misc_feature: MA Experiment 20001247 PARAMETER Experiment Name: At_Far-red-induction_P Parameter: Age (day) Value: 7
  misc_feature: MA Experiment 20001247 PARAMETER Experiment Name: At_Far-red-induction_P Parameter: Light Value: Far-red vs. White
  misc_feature: MA Experiment 20001247 PARAMETER Experiment Name: At_Far-red-induction_P Parameter: Organism Value: A. thaliana
  misc_feature: MA Experiment 20001247 PARAMETER Experiment Name: At_Far-red-induction_P Parameter: Plant Line Value: Columbia
  misc_feature: MA Experiment 20001247 PARAMETER Experiment Name: At_Far-red-induction_P Parameter: Timepoint (hr) Value: 1
  misc_feature: MA Experiment 20001247 PARAMETER Experiment Name: At_Far-red-induction_P Parameter: Tissue Value: Whole Plant
  misc_feature: MA Experiment ID: 20001248 Result: Up-regulated in Transcription
  misc_feature: MA Experiment 20001248 PARAMETER Experiment Name: At_Far-red-induction_P Parameter: Age (day) Value: 7
  misc_feature: MA Experiment 20001248 PARAMETER Experiment Name: At_Far-red-induction_P Parameter: Light Value: Far-red vs. White
  misc_feature: MA Experiment 20001248 PARAMETER Experiment Name: At_Far-red-induction_P Parameter: Organism Value: A. thaliana
  misc_feature: MA Experiment 20001248 PARAMETER Experiment Name: At_Far-red-induction_P Parameter: Plant Line Value: Columbia
  misc_feature: MA Experiment 20001248 PARAMETER Experiment Name: At_Far-red-induction_P Parameter: Timepoint (hr) Value: 4
  misc_feature: MA Experiment 20001248 PARAMETER Experiment Name: At_Far-red-induction_P Parameter: Tissue Value: Whole Plant
  misc_feature: MA Experiment ID: 20001450 Result: Up-regulated in Transcription
  misc_feature: MA Experiment 20001450 PARAMETER Experiment Name: At_Far-red-induction_P Parameter: Age (day) Value: 7
  misc_feature: MA Experiment 20001450 PARAMETER Experiment Name: At_Far-red-induction_P Parameter: Light Value: Far-red vs. White
  misc_feature: MA Experiment 20001450 PARAMETER Experiment Name: At_Far-red-induction_P Parameter: Organism Value: A. thaliana
  misc_feature: MA Experiment 20001450 PARAMETER Experiment Name: At_Far-red-induction_P Parameter: Plant Line Value: Columbia
  misc_feature: MA Experiment 20001450 PARAMETER Experiment Name: At_Far-red-induction_P Parameter: Timepoint (hr) Value: 8
  misc_feature: MA Experiment 20001450 PARAMETER Experiment Name: At_Far-red-induction_P Parameter: Tissue Value: Whole Plant
  misc_feature: MA Experiment ID: 20001451 Result: Up-regulated in Transcription
  misc_feature: MA Experiment 20001451 PARAMETER Experiment Name: At_Far-red-induction_P Parameter: Age (day) Value: 7
  misc_feature: MA Experiment 20001451 PARAMETER Experiment Name: At_Far-red-induction_P Parameter: Light Value: Far-red vs. White
  misc_feature: MA Experiment 20001451 PARAMETER Experiment Name: At_Far-red-induction_P Parameter: Organism Value: A. thaliana
  misc_feature: MA Experiment 20001451 PARAMETER Experiment Name: At_Far-red-induction_P Parameter: Plant Line Value: Columbia
  misc_feature: MA Experiment 20001451 PARAMETER Experiment Name: At_Far-red-induction_P Parameter: Timepoint (hr) Value: 24
  misc_feature: MA Experiment 20001451 PARAMETER Experiment Name: At_Far-red-induction_P Parameter: Tissue Value: Whole Plant
  misc_feature: MA Experiment ID: 20001555 Result: Down-regulated in Transcription
  misc_feature: MA Experiment 20001555 PARAMETER Experiment Name: At_Drought_Soil_Dry_P Parameter: Age (day) Value: 24
  misc_feature: MA Experiment 20001555 PARAMETER Experiment Name: At_Drought_Soil_Dry_P Parameter: Organism Value: A. thaliana
  misc_feature: MA Experiment 20001555 PARAMETER Experiment Name: At_Drought_Soil_Dry_P Parameter: Plant Line Value: WS
  misc_feature: MA Experiment 20001555 PARAMETER Experiment Name: At_Drought_Soil_Dry_P Parameter: Post Timepoint (hr) Value: None
  misc_feature: MA Experiment 20001555 PARAMETER Experiment Name: At_Drought_Soil_Dry_P Parameter: Post-Treatment Value: None
  misc_feature: MA Experiment 20001555 PARAMETER Experiment Name: At_Drought_Soil_Dry_P Parameter: Timepoint (day) Value: 10
  misc_feature: MA Experiment 20001555 PARAMETER Experiment Name: At_Drought_Soil_Dry_P Parameter: Treatment Value: Drought vs. No Drought
  misc_feature: MA Experiment ID: 20001560 Result: Down-regulated in Transcription
  misc_feature: MA Experiment 20001560 PARAMETER Experiment Name: At_Drought_Soil_Dry_P Parameter: Age (day) Value: 28
  misc_feature: MA Experiment 20001560 PARAMETER Experiment Name: At_Drought_Soil_Dry_P Parameter: Organism Value: A. thaliana
  misc_feature: MA Experiment 20001560 PARAMETER Experiment Name: At_Drought_Soil_Dry_P Parameter: Plant Line Value: WS
  misc_feature: MA Experiment 20001560 PARAMETER Experiment Name: At_Drought_Soil_Dry_P Parameter: Post Timepoint (hr) Value: None
  misc_feature: MA Experiment 20001560 PARAMETER Experiment Name: At_Drought_Soil_Dry_P Parameter: Post-Treatment Value: None
  misc_feature: MA Experiment 20001560 PARAMETER Experiment Name: At_Drought_Soil_Dry_P Parameter: Timepoint (day) Value: 14
  misc_feature: MA Experiment 20001560 PARAMETER Experiment Name: At_Drought_Soil_Dry_P Parameter: Treatment Value: Drought vs. No Drought
atggtgtcaagatcttgtgctaattttctagacttatcatcttgggaccttttagattttcctcaaactccacgaactcttccacgcgtcatgactgttccgggaatcatcaccgacgtagacggtgatacaacctccgaagtaacttctacctccggtggttcacgtgagaggaagatcattgtagctaacatgttaccactccaatctaaaagagatgcagaaactggtaaatggtgttttaactgggacgaagactctctccagttacaacttagagatgggttctcttcagaaacagagtttctctacgttggatcacttaacgtagacatcgaaactaacgaacaagaagaagtttcacagaagcttttagaggaatttaactgcgttgcaacgtttttgtctcaagagttgcaagaaatgttctatcttggtttctgtaaacatcagttatggccactctttcattacatgcttccaatgtttcctgatcatggtgatcgttttgatcgacgtctatggcaagcttatgtatcagccaacaagatattttcagatagagttatggaagttatcaaccctgaggatgattacgtttggattcaagattatcatcttatggttcttcctactttcttgaggaaacgttttaataggatcaaactcggtttcttccttcatagtccgtttccttcttcagagatttaccgcacattgcctgttcgtgacgagattttgagaggtttgttgaattgtgatctcattggtttccatacgtttgattacgcgaggcatttcttgtcttgttgtagtagaatgcttggtcttgattacgagtctaagcgcggtcacataggtcttgattactttggtaggactgtgtatatcaaaatacttcctgttggtgttcatatgggtagattggagtctgttttgagtcttgattctactgcggcgaagacgaaagagattcaagaacagtttaaagggaagaagcttgttcttggtatcgatgatatggatatatttaaagggataagcttaaagcttatagcaatggaacatctctttgagacttattggcatttgaaagggaaagttgttcttgttcagatagtgaaccctgcaagatcttctggtaaagatgttgaagaagcgaagagggagacgtatgagactgcgaggaggatcaatgagcgttacggtacttctgactataagccgatagttttgatcgatcgtcttgttccacgttctgagaaaaccgcgtattatgctgcagcagattgttgcttagtgaatgcagtgagagatggtatgaacttagttccttataagtatatcgtctgcaggcaggggactcgaagtaataaggccgttgtggattcatcgcctcgcacaagcactcttgtcgtgtctgagtttattggatgctcaccttctttgagtggtgccattagggtgaatccatgggatgtggatgctgttgctgaagcggtaaactcggctcttaaaatgagtgagactgagaagcaactacggcatgagaaacattatcattatattagcactcatgatgttggttattgggcaaagagctttatgcaggatcttgagagagcgtgccgagatcattatagtaaacgttgttgggggattggttttggtttggggttcagagttttgtcactctctccaagttttaggaagctatctgtggaacacattgttccagtttatagaaaaacacagagaagagctatatttcttgattatgatggtactcttgttcctgaaagctccattgttcaagatccaagcaacgaggttgtctctgttctgaaagctctctgtgaagatccgaataacacggtgtttattgttagtggaagaggtagagagtctctgagcaattggctatctccttgtgaaaatcttggaatagcagctgaacatggatacttcattagatggaagagcaaagatgagtgggagacttgttattcgcctacggatacagagtggaggtcaatggtggaaccggttatgagatcgtatatggaggcaacagatgggacgagtatagagtttaaagaaagtgctttggtgtggcaccatcaagacgcagatcctgactttggatcatgtcaagctaaggagatgcttgatcatctagagagtgttctcgccaatgagcctgtggttgtcaagagaggtcaacacatcgttgaagtcaaaccacaaggtgtaagcaaaggtctagctgcggagaaagtaatccgagaaatggtagaacgcggggagccaccggaaatggtgatgtgcataggagacgatagatcagacgaagacatgtttgagagcatattaagcacagtgacaaatccggaacttcttgtgcagccagaggtttttgcatgcacggttggaagaaaaccaagcaaagctaaatacttcttggacgatgaagccgacgtgcttaagctcctaagaggtcttggagactcatcatcgagcttaaaacctagttcttctcacacacaagttgcatttgaaagcatcgtttaa

SEQ ID NO: 71101 - protein, 856 aa, Arabidopsis thaliana
  peptide (1)..(856): Ceres Seq. ID no. 3049719
  misc_feature (57)..(541): Pfam Name: Glycosyltransferase family 20 Pfam Description: Glycosyltransferase family 20
  misc_feature (1)..(843): Homolog of NCBI NO: 25347119 NR Description: hypothetical protein T23K23.13 [imported] -
  misc_feature (1)..(840): Homolog of NCBI NO: 15221478 NR Description: trehalose-6-phosphate synthase, putative; protein At1g06410.1 [Arabidopsis thaliana] >gi|25347117|pir||A86200
  misc_feature (1)..(840): Homolog of NCBI NO: 19568935 NR Description: putative trehalose synthase [Solanum tuberosum]
  misc_feature (1)..(848): Homolog of NCBI NO: 18414960 NR Description: trehalose-6-phosphate synthase like protein;
  misc_feature (170)..(848): Homolog of NCBI NO: 34909526 NR Description: putative trehalose-6-phosphate synthase homolog
  misc_feature (25)..(161): Homolog of NCBI NO: 34909526 NR Description: putative trehalose-6-phosphate synthase homolog
  misc_feature (1)..(848): Homolog of NCBI NO: 7488400 NR Description: trehalose-6-phosphate synthase homolog DL4920W -
  misc_feature (33)..(852): Homolog of NCBI NO: 15224213 NR Description: putative trehalose-6-phosphate synthase; protein
  misc_feature (104)..(542): Homolog of NCBI NO: 25347125 NR Description: trehalose-6-phosphate synthase homolog [imported] Arabidopsis thaliana >gi|5734770|gb|AAD50035.1|AC007651_30 Very
  misc_feature (634)..(799): Homolog of NCBI NO: 25347125 NR Description: trehalose-6-phosphate synthase homolog [imported] Arabidopsis thaliana >gi|5734770|gb|AAD50035.1|AC007651_30 Very
MVSRSCANFLDLSSWDLLDFPQTPRTLPRVMTVPGIITDVDGDTTSEVTSTSGGSRERKIIVANMLPLQSKRDAETGKWCFNWDEDSLQLQLRDGFSSETEFLYVGSLNVDIETNEQEEVSQKLLEEFNCVATFLSQELQEMFYLGFCKHQLWPLFHYMLPMFPDHGDRFDRRLWQAYVSANKIFSDRVMEVINPEDDYVWIQDYHLMVLPTFLRKRFNRIKLGFFLHSPFPSSEIYRTLPVRDEILRGLLNCDLIGFHTFDYARHFLSCCSRMLGLDYESKRGHIGLDYFGRTVYIKILPVGVHMGRLESVLSLDSTAAKTKEIQEQFKGKKLVLGIDDMDIFKGISLKLIAMEHLFETYWHLKGKVVLVQIVNPARSSGKDVEEAKRETYETARRINERYGTSDYKPIVLIDRLVPRSEKTAYYAAADCCLVNAVRDGMNLVPYKYIVCRQGTRSNKAVVDSSPRTSTLVVSEFIGCSPSLSGAIRVNPWDVDAVAEAVNSALKMSETEKQLRHEKHYHYISTHDVGYWAKSFMQDLERACRDHYSKRCWGIGFGLGFRVLSLSPSFRKLSVEHIVPVYRKTQRRAIFLDYDGTLVPESSIVQDPSNEVVSVLKALCEDPNNTVFIVSGRGRESLSNWLSPCENLGIAAEHGYFIRWKSKDEWETCYSPTDTEWRSMVEPVMRSYMEATDGTSIEFKESALVWHHQDADPDFGSCQAKEMLDHLESVLANEPVVVKRGQHIVEVKPQGVSKGLAAEKVIREMVERGEPPEMVMCIGDDRSDEDMFESILSTVTNPELLVQPEVFACTVGRKPSKAKYFLDDEADVLKLLRGLGDSSSSLKPSSSHTQVAFESIV

SEQ ID NO: 71102 - protein, 826 aa, Arabidopsis thaliana
  peptide (1)..(826): Ceres Seq. ID no. 3049720
  misc_feature (27)..(511): Pfam Name: Glycosyltransferase family 20 Pfam Description: Glycosyltransferase family 20
  misc_feature (1)..(813): Homolog of NCBI NO: 25347119 NR Description: hypothetical protein T23K23.13 [imported] -
  misc_feature (1)..(810): Homolog of NCBI NO: 15221478 NR Description: trehalose-6-phosphate synthase, putative; protein At1g06410.1 [Arabidopsis thaliana] >gi|25347117|pir||A86200
  misc_feature (1)..(810): Homolog of NCBI NO: 19568935 NR Description: putative trehalose synthase [Solanum tuberosum]
  misc_feature (1)..(818): Homolog of NCBI NO: 18414960 NR Description: trehalose-6-phosphate synthase like protein;
  misc_feature (140)..(818): Homolog of NCBI NO: 34909526 NR Description: putative trehalose-6-phosphate synthase homolog
  misc_feature (1)..(131): Homolog of NCBI NO: 34909526 NR Description: putative trehalose-6-phosphate synthase homolog
  misc_feature (1)..(818): Homolog of NCBI NO: 7488400 NR Description: trehalose-6-phosphate synthase homolog DL4920W -
  misc_feature (3)..(822): Homolog of NCBI NO: 15224213 NR Description: putative trehalose-6-phosphate synthase; protein
  misc_feature (74)..(512): Homolog of NCBI NO: 25347125 NR Description: trehalose-6-phosphate synthase homolog [imported] Arabidopsis thaliana >gi|5734770|gb|AAD50035.1|AC007651_30 Very
  misc_feature (604)..(769): Homolog of NCBI NO: 25347125 NR Description: trehalose-6-phosphate synthase homolog [imported] Arabidopsis thaliana >gi|5734770|gb|AAD50035.1|AC007651_30 Very
MTVPGIITDVDGDTTSEVTSTSGGSRERKIIVANMLPLQSKRDAETGKWCFNWDEDSLQLQLRDGFSSETEFLYVGSLNVDIETNEQEEVSQKLLEEFNCVATFLSQELQEMFYLGFCKHQLWPLFHYMLPMFPDHGDRFDRRLWQAYVSANKIFSDRVMEVINPEDDYVWIQDYHLMVLPTFLRKRFNRIKLGFFLHSPFPSSEIYRTLPVRDEILRGLLNCDLIGFHTFDYARHFLSCCSRMLGLDYESKRGHIGLDYFGRTVYIKILPVGVHMGRLESVLSLDSTAAKTKEIQEQFKGKKLVLGIDDMDIFKGISLKLIAMEHLFETYWHLKGKVVLVQIVNPARSSGKDVEEAKRETYETARRINERYGTSDYKPIVLIDRLVPRSEKTAYYAAADCCLVNAVRDGMNLVPYKYIVCRQGTRSNKAVVDSSPRTSTLVVSEFIGCSPSLSGAIRVNPWDVDAVAEAVNSALKMSETEKQLRHEKHYHYISTHDVGYWAKSFMQDLERACRDHYSKRCWGIGFGLGFRVLSLSPSFRKLSVEHIVPVYRKTQRRAIFLDYDGTLVPESSIVQDPSNEVVSVLKALCEDPNNTVFIVSGRGRESLSNWLSPCENLGIAAEHGYFIRWKSKDEWETCYSPTDTEWRSMVEPVMRSYMEATDGTSIEFKESALVWHHQDADPDFGSCQAKEMLDHLESVLANEPVVVKRGQHIVEVKPQGVSKGLAAEKVIREMVERGEPPEMVMCIGDDRSDEDMFESILSTVTNPELLVQPEVFACTVGRKPSKAKYFLDDEADVLKLLRGLGDSSSSLKPSSSHTQVAFESIV

SEQ ID NO: 71103 - protein, 792 aa, Arabidopsis thaliana
  peptide (1)..(792): Ceres Seq. ID no. 3049721
  misc_feature (1)..(477): Pfam Name: Glycosyltransferase family 20 Pfam Description: Glycosyltransferase family 20
  misc_feature (1)..(779): Homolog of NCBI NO: 25347119 NR Description: hypothetical protein T23K23.13 [imported] -
  misc_feature (1)..(776): Homolog of NCBI NO: 15221478 NR Description: trehalose-6-phosphate synthase, putative; protein At1g06410.1 [Arabidopsis thaliana] >gi|25347117|pir||A86200
  misc_feature (1)..(776): Homolog of NCBI NO: 19568935 NR Description: putative trehalose synthase [Solanum tuberosum]
  misc_feature (1)..(784): Homolog of NCBI NO: 18414960 NR Description: trehalose-6-phosphate synthase like protein;
  misc_feature (106)..(784): Homolog of NCBI NO: 34909526 NR Description: putative trehalose-6-phosphate synthase homolog
  misc_feature (1)..(97): Homolog of NCBI NO: 34909526 NR Description: putative trehalose-6-phosphate synthase homolog
  misc_feature (1)..(784): Homolog of NCBI NO: 7488400 NR Description: trehalose-6-phosphate synthase homolog DL4920W -
  misc_feature (1)..(788): Homolog of NCBI NO: 15224213 NR Description: putative trehalose-6-phosphate synthase; protein
  misc_feature (40)..(478): Homolog of NCBI NO: 25347125 NR Description: trehalose-6-phosphate synthase homolog [imported] Arabidopsis thaliana >gi|5734770|gb|AAD50035.1|AC007651_30 Very
  misc_feature (570)..(735): Homolog of NCBI NO: 25347125 NR Description: trehalose-6-phosphate synthase homolog [imported] Arabidopsis thaliana >gi|5734770|gb|AAD50035.1|AC007651_30 Very
MLPLQSKRDAETGKWCFNWDEDSLQLQLRDGFSSETEFLYVGSLNVDIETNEQEEVSQKLLEEFNCVATFLSQELQEMFYLGFCKHQLWPLFHYMLPMFPDHGDRFDRRLWQAYVSANKIFSDRVMEVINPEDDYVWIQDYHLMVLPTFLRKRFNRIKLGFFLHSPFPSSEIYRTLPVRDEILRGLLNCDLIGFHTFDYARHFLSCCSRMLGLDYESKRGHIGLDYFGRTVYIKILPVGVHMGRLESVLSLDSTAAKTKEIQEQFKGKKLVLGIDDMDIFKGISLKLIAMEHLFETYWHLKGKVVLVQIVNPARSSGKDVEEAKRETYETARRINERYGTSDYKPIVLIDRLVPRSEKTAYYAAADCCLVNAVRDGMNLVPYKYIVCRQGTRSNKAVVDSSPRTSTLVVSEFIGCSPSLSGAIRVNPWDVDAVAEAVNSALKMSETEKQLRHEKHYHYISTHDVGYWAKSFMQDLERACRDHYSKRCWGIGFGLGFRVLSLSPSFRKLSVEHIVPVYRKTQRRAIFLDYDGTLVPESSIVQDPSNEVVSVLKALCEDPNNTVFIVSGRGRESLSNWLSPCENLGIAAEHGYFIRWKSKDEWETCYSPTDTEWRSMVEPVMRSYMEATDGTSIEFKESALVWHHQDADPDFGSCQAKEMLDHLESVLANEPVVVKRGQHIVEVKPQGVSKGLAAEKVIREMVERGEPPEMVMCIGDDRSDEDMFESILSTVTNPELLVQPEVFACTVGRKPSKAKYFLDDEADVLKLLRGLGDSSSSLKPSSSHTQVAFESIV

SEQ ID NO: 71104 - DNA, 2334 bp, Arabidopsis thaliana
  misc_feature (1)..(2334): Ceres Seq. ID no. 3050398
  misc_feature: MA Experiment ID: 20000180 Result: Down-regulated in Transcription
  misc_feature: MA Experiment 20000180 PARAMETER Experiment Name: At_Germinating_Seeds_P Parameter: Age (hr) Value: 24 vs. 0
  misc_feature: MA Experiment 20000180 PARAMETER Experiment Name: At_Germinating_Seeds_P Parameter: Tissue Value: Germinating Seeds
  misc_feature: MA Experiment ID: 20000451 Result: Up-regulated in Transcription
  misc_feature: MA Experiment 20000451 PARAMETER Experiment Name: At_CS6879_Shoots-Roots_P Parameter: Age (day) Value: 14
  misc_feature: MA Experiment 20000451 PARAMETER Experiment Name: At_CS6879_Shoots-Roots_P Parameter: Organism Value: A. thaliana
  misc_feature: MA Experiment 20000451 PARAMETER Experiment Name: At_CS6879_Shoots-Roots_P Parameter: Plant Line Value: CS6879 vs. WS
  misc_feature: MA Experiment 20000451 PARAMETER Experiment Name: At_CS6879_Shoots-Roots_P Parameter: Tissue Value: Roots
atggctcaagaactcgatttggaattgggtttagctccatatgatccatgggttctaaagaagaatttaaccgagagtgatcttaataatggttttattattctacctaaacaagattttgaaaaaataattcggcagatggaacgtggtttggtcaagaatttgggaaacggtgttgaagtgaaagtccatattatagaggaaggtcctgaatctgatgattacacattaacactggtcaagtgcagaggcaactgtatgttcagaggaggatggtacaatatggcccatttaaacgaaaagattcatctcctttacctctcgagtttcaattcaactgaagagagaactcgtatccttctccgccgcaaaatgaagcttctccgccgccgtttcttcaactccgtcaatacaatcaccagacctaaccgacgtcactatgccacaaagtatgtcgccaaagtcacttcatcatctccctccggccgatctctctccgccgaagtttctcttcctaatcctcttcccgccgacgtacgtggctaccctctacctcgccgtcatctaatctgccgagccacaaatctcatcaccggagcctctaatctctccgatgctttctctgatctctctgattacctctcttctctctcactctcactcacacccgacgaagcttcagagattctcaaatccctaaattcacctctcctcgccgtggaatttttcaaattagtcccttctctttgcccttactcacaaaatgaccctttcctttacaatcgtatcatcttaatcctctcaaggtcaaatcttccagacagattcgatcgtgttcgttcgattctcgattccatggtgaaatcaaacgtccatggaaacatatcaactgtgaatatcttaataggtttctttggtaacacggaagatttacaaatgtgtttaagattggtgaagaaatgggatttaaagatgaactctttcacttacaagtgtctccttcaagcttacttaagatctcgtgattattctaaagcttttgatgtgtattgtgagattagaagaggaggacataaacttgacatctttgcttacaatatgttgcttgatgctttagctaaagatgaaaagattgatcaggcttgtcaagtttttgaagatatgaagaagaggcattgtagaagagatgagtatacttacacgattatgatcaggactatggggaggattgggaagtgtgatgaagctgttggtttatttaatgagatgattactgaagggcttacgcttaatgttgttggttataatactttgatgcaagttcttgcgaaaggcaaaatggttgataaggcgattcaggttttctctagaatggtggaaacgggttgtcggccgaatgagtatacgtatagtcttcttttgaatcttttagttgctgaaggtcagcttgtgaggttagatggagttgtggagatttcgaaaaggtatatgactcaggggatatattcttatttggttagaacgttgagcaagttagggcatgtaagtgaggctcacaggctgttttgtgatatgtggagcttccctgtgaaaggagagagagatagttacatgtcgatgcttgagagtttgtgtggtgcgggtaaaaccattgaagcgatagagatgttgagcaagattcatgagaaaggtgtggtaactgatactatgatgtataacactgtgttctcggcgctcgggaagctaaagcaaatatctcatattcatgatctctttgagaaaatgaaaaaggacggtccttctccggatatattcacctataatatacttatcgctagttttggccgggtaggagaagttgatgaggctattaacatatttgaggagcttgagaggagtgattgtaaacccgacattatttcttacaactctttgattaattgtttggggaagaacggtgatgttgatgaagcccatgtgagattcaaggagatgcaagaaaaaggattaaaccctgatgtggtcacatacagcactctgatggaatgttttgggaaaacagagagagtcgaaatggcgtatagtttgttcgaagagatgcttgttaaagggtgtcaaccaaacattgtaacgtacaacattttgcttgattgtctagagaagaacgggagaaccgcagaagcagttgatctatactcaaagatgaaacagcaaggactcacaccggattccattacctacactgtgcttgaacggttgcagtctgtctctcatggaaaatctcgtatccgtaggaagaatccgataacggggtgggttgtcagccctttgtag

SEQ ID NO: 71105 - protein, 777 aa, Arabidopsis thaliana
  peptide (1)..(777): Ceres Seq. ID no. 3050399
  misc_feature (500)..(534): Pfam Name: PPR repeat Pfam Description: PPR repeat
  misc_feature (210)..(750): Homolog of NCBI NO: 15242446 NR Description: putative protein; protein id: At5g39710.1
  misc_feature (202)..(750): Homolog of NCBI NO: 15231863 NR Description: putative protein; protein id: At3g53700.1, by cDNA: gi_15982930 [Arabidopsis thaliana]
  misc_feature (260)..(750): Homolog of NCBI NO: 15238505 NR Description: putative protein; protein id: At5g65560.1
  misc_feature (233)..(750): Homolog of NCBI NO: 15221635 NR Description: unknown protein; protein id: At1g62930.1
  misc_feature (233)..(750): Homolog of NCBI NO: 25404380 NR Description: hypothetical protein F16P17.7 [imported] - thaliana >gi|8493580|gb|AAF75803.1|AC011000_6 Contains weak to leaf protein from Ipomea nil gb|D85101 and contains a RepB
  misc_feature (260)..(752): Homolog of NCBI NO: 15221549 NR Description: PPR-repeat protein; protein id: At1g62670.1
  misc_feature (283)..(744): Homolog of NCBI NO: 15218325 NR Description: hypothetical protein; protein id: At1g09900.1
  misc_feature (290)..(750): Homolog of NCBI NO: 15236546 NR Description: putative protein; protein id: At4g31850.1
  misc_feature (194)..(750): Homolog of NCBI NO: 15239874 NR Description: putative protein; protein id: At5g12100.1 thaliana] >gi|9759377|dbj|BAB10028.1| to unknown protein [Arabidopsis thaliana]
  misc_feature (252)..(731): Homolog of NCBI NO: 18397002 NR Description: expressed protein; protein id: At3g04760.1, by cDNA: gi_15810358 [Arabidopsis thaliana] hypothetical protein [Arabidopsis thaliana]
MAQELDLELGLAPYDPWVLKKNLTESDLNNGFIILPKQDFEKIIRQMERGLVKNLGNGVEVKVHIIEEGPESDDYTLTLVKCRGNCMFRGGWYNMAHLNEKIHLLYLSSFNSTEERTRILLRRKMKLLRRRFFNSVNTITRPNRRHYATKYVAKVTSSSPSGRSLSAEVSLPNPLPADVRGYPLPRRHLICRATNLITGASNLSDAFSDLSDYLSSLSLSLTPDEASEILKSLNSPLLAVEFFKLVPSLCPYSQNDPFLYNRIILILSRSNLPDRFDRVRSILDSMVKSNVHGNISTVNILIGFFGNTEDLQMCLRLVKKWDLKMNSFTYKCLLQAYLRSRDYSKAFDVYCEIRRGGHKLDIFAYNMLLDALAKDEKIDQACQVFEDMKKRHCRRDEYTYTIMIRTMGRIGKCDEAVGLFNEMITEGLTLNVVGYNTLMQVLAKGKMVDKAIQVFSRMVETGCRPNEYTYSLLLNLLVAEGQLVRLDGVVEISKRYMTQGIYSYLVRTLSKLGHVSEAHRLFCDMWSFPVKGERDSYMSMLESLCGAGKTIEAIEMLSKIHEKGVVTDTMMYNTVFSALGKLKQISHIHDLFEKMKKDGPSPDIFTYNILIASFGRVGEVDEAINIFEELERSDCKPDIISYNSLINCLGKNGDVDEAHVRFKEMQEKGLNPDVVTYSTLMECFGKTERVEMAYSLFEEMLVKGCQPNIVTYNILLDCLEKNGRTAEAVDLYSKMKQQGLTPDSITYTVLERLQSVSHGKSRIRRKNPITGWVVSPL

SEQ ID NO: 71106 - protein, 731 aa, Arabidopsis thaliana
  peptide (1)..(731): Ceres Seq. ID no. 3050400
  misc_feature (454)..(488): Pfam Name: PPR repeat Pfam Description: PPR repeat
  misc_feature (164)..(704): Homolog of NCBI NO: 15242446 NR Description: putative protein; protein id: At5g39710.1
  misc_feature (156)..(704): Homolog of NCBI NO: 15231863 NR Description: putative protein; protein id: At3g53700.1, by cDNA: gi_15982930 [Arabidopsis thaliana]
  misc_feature (214)..(704): Homolog of NCBI NO: 15238505 NR Description: putative protein; protein id: At5g65560.1
  misc_feature (187)..(704): Homolog of NCBI NO: 15221635 NR Description: unknown protein; protein id: At1g62930.1
  misc_feature (187)..(704): Homolog of NCBI NO: 25404380 NR Description: hypothetical protein F16P17.7 [imported] - thaliana >gi|8493580|gb|AAF75803.1|AC011000_6 Contains weak to leaf protein from Ipomea nil gb|D85101 and contains a RepB
  misc_feature (214)..(706): Homolog of NCBI NO: 15221549 NR Description: PPR-repeat protein; protein id: At1g62670.1
  misc_feature (237)..(698): Homolog of NCBI NO: 15218325 NR Description: hypothetical protein; protein id: At1g09900.1
  misc_feature (244)..(704): Homolog of NCBI NO: 15236546 NR Description: putative protein; protein id: At4g31850.1
  misc_feature (148)..(704): Homolog of NCBI NO: 15239874 NR Description: putative protein; protein id: At5g12100.1 thaliana] >gi|9759377|dbj|BAB10028.1| to unknown protein [Arabidopsis thaliana]
  misc_feature (206)..(685): Homolog of NCBI NO: 18397002 NR Description: expressed protein; protein id: At3g04760.1, by cDNA: gi_15810358 [Arabidopsis thaliana] hypothetical protein [Arabidopsis thaliana]
MERGLVKNLGNGVEVKVHIIEEGPESDDYTLTLVKCRGNCMFRGGWYNMAHLNEKIHLLYLSSFNSTEERTRILLRRKMKLLRRRFFNSVNTITRPNRRHYATKYVAKVTSSSPSGRSLSAEVSLPNPLPADVRGYPLPRRHLICRATNLITGASNLSDAFSDLSDYLSSLSLSLTPDEASEILKSLNSPLLAVEFFKLVPSLCPYSQNDPFLYNRIILILSRSNLPDRFDRVRSILDSMVKSNVHGNISTVNILIGFFGNTEDLQMCLRLVKKWDLKMNSFTYKCLLQAYLRSRDYSKAFDVYCEIRRGGHKLDIFAYNMLLDALAKDEKIDQACQVFEDMKKRHCRRDEYTYTIMIRTMGRIGKCDEAVGLFNEMITEGLTLNVVGYNTLMQVLAKGKMVDKAIQVFSRMVETGCRPNEYTYSLLLNLLVAEGQLVRLDGVVEISKRYMTQGIYSYLVRTLSKLGHVSEAHRLFCDMWSFPVKGERDSYMSMLESLCGAGKTIEAIEMLSKIHEKGVVTDTMMYNTVFSALGKLKQISHIHDLFEKMKKDGPSPDIFTYNILIASFGRVGEVDEAINIFEELERSDCKPDIISYNSLINCLGKNGDVDEAHVRFKEMQEKGLNPDVVTYSTLMECFGKTERVEMAYSLFEEMLVKGCQPNIVTYNILLDCLEKNGRTAEAVDLYSKMKQQGLTPDSITYTVLERLQSVSHGKSRIRRKNPITGWVVSPL

SEQ ID NO: 71107 - protein, 691 aa, Arabidopsis thaliana
  peptide (1)..(691): Ceres Seq. ID no. 3050401
  misc_feature (414)..(448): Pfam Name: PPR repeat Pfam Description: PPR repeat
  misc_feature (124)..(664): Homolog of NCBI NO: 15242446 NR Description: putative protein; protein id: At5g39710.1
  misc_feature (116)..(664): Homolog of NCBI NO: 15231863 NR Description: putative protein; protein id: At3g53700.1, by cDNA: gi_15982930 [Arabidopsis thaliana]
  misc_feature (174)..(664): Homolog of NCBI NO: 15238505 NR Description: putative protein; protein id: At5g65560.1
  misc_feature (147)..(664): Homolog of NCBI NO: 15221635 NR Description: unknown protein; protein id: At1g62930.1
  misc_feature (147)..(664): Homolog of NCBI NO: 25404380 NR Description: hypothetical protein F16P17.7 [imported] - thaliana >gi|8493580|gb|AAF75803.1|AC011000_6 Contains weak to leaf protein from Ipomea nil gb|D85101 and contains a RepB
  misc_feature (174)..(666): Homolog of NCBI NO: 15221549 NR Description: PPR-repeat protein; protein id: At1g62670.1
  misc_feature (197)..(658): Homolog of NCBI NO: 15218325 NR Description: hypothetical protein; protein id: At1g09900.1
  misc_feature (204)..(664): Homolog of NCBI NO: 15236546 NR Description: putative protein; protein id: At4g31850.1
  misc_feature (108)..(664): Homolog of NCBI NO: 15239874 NR Description: putative protein; protein id: At5g12100.1 thaliana] >gi|9759377|dbj|BAB10028.1| to unknown protein [Arabidopsis thaliana]
  misc_feature (166)..(645): Homolog of NCBI NO: 18397002 NR Description: expressed protein; protein id: At3g04760.1, by cDNA: gi_15810358 [Arabidopsis thaliana] hypothetical protein [Arabidopsis thaliana]
MFRGGWYNMAHLNEKIHLLYLSSFNSTEERTRILLRRKMKLLRRRFFNSVNTITRPNRRHYATKYVAKVTSSSPSGRSLSAEVSLPNPLPADVRGYPLPRRHLICRATNLITGASNLSDAFSDLSDYLSSLSLSLTPDEASEILKSLNSPLLAVEFFKLVPSLCPYSQNDPFLYNRIILILSRSNLPDRFDRVRSILDSMVKSNVHGNISTVNILIGFFGNTEDLQMCLRLVKKWDLKMNSFTYKCLLQAYLRSRDYSKAFDVYCEIRRGGHKLDIFAYNMLLDALAKDEKIDQACQVFEDMKKRHCRRDEYTYTIMIRTMGRIGKCDEAVGLFNEMITEGLTLNVVGYNTLMQVLAKGKMVDKAIQVFSRMVETGCRPNEYTYSLLLNLLVAEGQLVRLDGVVEISKRYMTQGIYSYLVRTLSKLGHVSEAHRLFCDMWSFPVKGERDSYMSMLESLCGAGKTIEAIEMLSKIHEKGVVTDTMMYNTVFSALGKLKQISHIHDLFEKMKKDGPSPDIFTYNILIASFGRVGEVDEAINIFEELERSDCKPDIISYNSLINCLGKNGDVDEAHVRFKEMQEKGLNPDVVTYSTLMECFGKTERVEMAYSLFEEMLVKGCQPNIVTYNILLDCLEKNGRTAEAVDLYSKMKQQGLTPDSITYTVLERLQSVSHGKSRIRRKNPITGWVVSPL

SEQ ID NO: 71108 - DNA, 1682 bp, Arabidopsis thaliana
  misc_feature (1)..(1682): Ceres Seq. ID no. 3051014
  misc_feature: MA Experiment ID: 108434 Result: Down-regulated in Transcription
  misc_feature: MA Experiment 108434 PARAMETER Experiment Name: At_Root_Tips_cDNA_P Parameter: Tissue Value: Root Tips
  misc_feature: MA Experiment ID: 108461 Result: Up-regulated in Transcription
  misc_feature: MA Experiment 108461 PARAMETER Experiment Name: At_Germinating_Seeds_cDNA_P Parameter: Age (day) Value: 1 vs. 0
  misc_feature: MA Experiment 108461 PARAMETER Experiment Name: At_Germinating_Seeds_cDNA_P Parameter: Tissue Value: Germinating Seeds
  misc_feature: MA Experiment ID: 108462 Result: Up-regulated in Transcription
  misc_feature: MA Experiment 108462 PARAMETER Experiment Name: At_Germinating_Seeds_cDNA_P Parameter: Age (day) Value: 2 vs. 0
  misc_feature: MA Experiment 108462 PARAMETER Experiment Name: At_Germinating_Seeds_cDNA_P Parameter: Tissue Value: Germinating Seeds
  misc_feature: MA Experiment ID: 108463 Result: Up-regulated in Transcription
  misc_feature: MA Experiment 108463 PARAMETER Experiment Name: At_Germinating_Seeds_cDNA_P Parameter: Age (day) Value: 3 vs. 0
  misc_feature: MA Experiment 108463 PARAMETER Experiment Name: At_Germinating_Seeds_cDNA_P Parameter: Tissue Value: Germinating Seeds
  misc_feature: MA Experiment ID: 108464 Result: Up-regulated in Transcription
  misc_feature: MA Experiment 108464 PARAMETER Experiment Name: At_Germinating_Seeds_cDNA_P Parameter: Age (day) Value: 4 vs. 0
  misc_feature: MA Experiment 108464 PARAMETER Experiment Name: At_Germinating_Seeds_cDNA_P Parameter: Tissue Value: Germinating Seeds
  misc_feature: MA Experiment ID: 108469 Result: Up-regulated in Transcription
  misc_feature: MA Experiment ID: 108489 Result: Down-regulated in Transcription
  misc_feature: MA Experiment ID: 108572 Result: Up-regulated in Transcription
  misc_feature: MA Experiment 108572 PARAMETER Experiment Name: At_Drought_cDNA_P Parameter: Timepoint (hr) Value: 1
  misc_feature: MA Experiment 108572 PARAMETER Experiment Name: At_Drought_cDNA_P Parameter: Tissue Value: Aerial
  misc_feature: MA Experiment 108572 PARAMETER Experiment Name: At_Drought_cDNA_P Parameter: Treatment Value: Drought vs. No Drought
  misc_feature: MA Experiment ID: 108574 Result: Up-regulated in Transcription
  misc_feature: MA Experiment 108574 PARAMETER Experiment Name: At_Wounding__cDNA_P Parameter: Timepoint (hr) Value: 1
  misc_feature: MA Experiment 108574 PARAMETER Experiment Name: At_Wounding__cDNA_P Parameter: Tissue Value: Aerial
  misc_feature: MA Experiment 108574 PARAMETER Experiment Name: At_Wounding__cDNA_P Parameter: Treatment Value: Wounding vs. No Wounding
  misc_feature: MA Experiment ID: 108577 Result: Down-regulated in Transcription
  misc_feature: MA Experiment 108577 PARAMETER Experiment Name: At_42deg_Heat_cDNA_P Parameter: Temperature (deg C) Value: 42 vs. 22
  misc_feature: MA Experiment 108577 PARAMETER Experiment Name: At_42deg_Heat_cDNA_P Parameter: Timepoint (hr) Value: 6
  misc_feature: MA Experiment 108577 PARAMETER Experiment Name: At_42deg_Heat_cDNA_P Parameter: Tissue Value: Aerial
  misc_feature: MA Experiment ID: 108585 Result: Up-regulated in Transcription
  misc_feature: MA Experiment 108585 PARAMETER Experiment Name: At_5mM_NaNP_cDNA_P Parameter: Timepoint (hr) Value: 6
  misc_feature: MA Experiment 108585 PARAMETER Experiment Name: At_5mM_NaNP_cDNA_P Parameter: Tissue Value: Aerial
  misc_feature: MA Experiment 108585 PARAMETER Experiment Name: At_5mM_NaNP_cDNA_P Parameter: Treatment Value: null
  misc_feature: MA Experiment ID: 108594 Result: Down-regulated in Transcription
  misc_feature: MA Experiment 108594 PARAMETER Experiment Name: At_Ler-rhl_Root_cDNA_P Parameter: Plant Line Value: null
  misc_feature: MA Experiment ID: 108605 Result: Up-regulated in Transcription
  misc_feature: MA Experiment 108605 PARAMETER Experiment Name: At_100uM_ABA_cDNA_P Parameter: Timepoint (hr) Value: 6
  misc_feature: MA Experiment 108605 PARAMETER Experiment Name: At_100uM_ABA_cDNA_P Parameter: Tissue Value: Aerial
  misc_feature: MA Experiment 108605 PARAMETER Experiment Name: At_100uM_ABA_cDNA_P Parameter: Treatment Value: 100uM ABA vs. No Treatment
  misc_feature: MA Experiment ID: 108608 Result: Up-regulated in Transcription
  misc_feature: MA Experiment 108608 PARAMETER Experiment Name: At_100uM_ABA_cDNA_P Parameter: Timepoint (hr) Value: 1
  misc_feature: MA Experiment 108608 PARAMETER Experiment Name: At_100uM_ABA_cDNA_P Parameter: Tissue Value: Aerial
  misc_feature: MA Experiment 108608 PARAMETER Experiment Name: At_100uM_ABA_cDNA_P Parameter: Treatment Value: 100uM ABA vs. No Treatment
  misc_feature: MA Experiment ID: 108667 Result: Up-regulated in Transcription
  misc_feature: MA Experiment 108667 PARAMETER Experiment Name: At_2mM_SA_cDNA_P Parameter: Plant Line Value: WS
  misc_feature: MA Experiment 108667 PARAMETER Experiment Name: At_2mM_SA_cDNA_P Parameter: Timepoint (hr) Value: 1
  misc_feature: MA Experiment 108667 PARAMETER Experiment Name: At_2mM_SA_cDNA_P Parameter: Treatment Value: 2mM SA vs. No Treatment
  misc_feature: MA Experiment ID: 108668 Result: Up-regulated in Transcription
  misc_feature: MA Experiment 108668 PARAMETER Experiment Name: At_2mM_SA_cDNA_P Parameter: Plant Line Value: WS
  misc_feature: MA Experiment 108668 PARAMETER Experiment Name: At_2mM_SA_cDNA_P Parameter: Timepoint (hr) Value: 6
  misc_feature: MA Experiment 108668 PARAMETER Experiment Name: At_2mM_SA_cDNA_P Parameter: Treatment Value: 2mM SA vs. No Treatment
  misc_feature: MA Experiment ID: 20000030 Result: Down-regulated in Transcription
  misc_feature: MA Experiment 20000030 PARAMETER Experiment Name: At_CS6630_Roots_cDNA_P Parameter: Plant Line Value: CS6630 vs. WS
  misc_feature: MA Experiment 20000030 PARAMETER Experiment Name: At_CS6630_Roots_cDNA_P Parameter: Tissue Value: Roots
  misc_feature: MA Experiment ID: 20000111 Result: Down-regulated in Transcription
  misc_feature: MA Experiment 20000111 PARAMETER Experiment Name: At_42deg_Heat_cDNA_P Parameter: Temperature (deg C) Value: 42 vs. 22
  misc_feature: MA Experiment 20000111 PARAMETER Experiment Name: At_42deg_Heat_cDNA_P Parameter: Timepoint (hr) Value: 6
  misc_feature: MA Experiment 20000111 PARAMETER Experiment Name: At_42deg_Heat_cDNA_P Parameter: Tissue Value: Aerial
  misc_feature: MA Experiment ID: 20000113 Result: Down-regulated in Transcription
  misc_feature: MA Experiment 20000113 PARAMETER Experiment Name: At_42deg_Heat_cDNA_P Parameter: Temperature (deg C) Value: 42 vs. 22
  misc_feature: MA Experiment 20000113 PARAMETER Experiment Name: At_42deg_Heat_cDNA_P Parameter: Timepoint (hr) Value: 8
  misc_feature: MA Experiment 20000113 PARAMETER Experiment Name: At_42deg_Heat_cDNA_P Parameter: Tissue Value: Aerial
  misc_feature: MA Experiment ID: 20000166 Result: Up-regulated in Transcription
  misc_feature: MA Experiment 20000166 PARAMETER Experiment Name: At_100uM_ABA_P Parameter: Age (day) Value: 14
  misc_feature: MA Experiment 20000166 PARAMETER Experiment Name: At_100uM_ABA_P Parameter: Organism Value: A. thaliana
  misc_feature: MA Experiment 20000166 PARAMETER Experiment Name: At_100uM_ABA_P Parameter: Plant Line Value: WS
  misc_feature: MA Experiment 20000166 PARAMETER Experiment Name: At_100uM_ABA_P Parameter: Timepoint (hr) Value: 1
  misc_feature: MA Experiment 20000166 PARAMETER Experiment Name: At_100uM_ABA_P Parameter: Tissue Value: Aerial
  misc_feature: MA Experiment 20000166 PARAMETER Experiment Name: At_100uM_ABA_P Parameter: Treatment Value: 100uM ABA vs. No Treatment
  misc_feature: MA Experiment ID: 20000173 Result: Down-regulated in Transcription
  misc_feature: MA Experiment 20000173 PARAMETER Experiment Name: At_42deg_Heat_P Parameter: Age (day) Value: 14
  misc_feature: MA Experiment 20000173 PARAMETER Experiment Name: At_42deg_Heat_P Parameter: Organism Value: A. thaliana
  misc_feature: MA Experiment 20000173 PARAMETER Experiment Name: At_42deg_Heat_P Parameter: Plant Line Value: WS
  misc_feature: MA Experiment 20000173 PARAMETER Experiment Name: At_42deg_Heat_P Parameter: Temperature (deg C) Value: 42 vs. 22
  misc_feature: MA Experiment 20000173 PARAMETER Experiment Name: At_42deg_Heat_P Parameter: Timepoint (hr) Value: 6
  misc_feature: MA Experiment 20000173 PARAMETER Experiment Name: At_42deg_Heat_P Parameter: Tissue Value: Aerial
  misc_feature: MA Experiment ID: 20000180 Result: Up-regulated in Transcription
  misc_feature: MA Experiment 20000180 PARAMETER Experiment Name: At_Germinating_Seeds_P Parameter: Age (hr) Value: 24 vs. 0
  misc_feature: MA Experiment 20000180 PARAMETER Experiment Name: At_Germinating_Seeds_P Parameter: Tissue Value: Germinating Seeds
  misc_feature: MA Experiment ID: 20000182 Result: Up-regulated in Transcription
  misc_feature: MA Experiment 20000182 PARAMETER Experiment Name: At_2mM_SA_P Parameter: Age (day) Value: 14
  misc_feature: MA Experiment 20000182 PARAMETER Experiment Name: At_2mM_SA_P Parameter: Organism Value: A. thaliana
  misc_feature: MA Experiment 20000182 PARAMETER Experiment Name: At_2mM_SA_P Parameter: Plant Line Value: WS
  misc_feature: MA Experiment 20000182 PARAMETER Experiment Name: At_2mM_SA_P Parameter: Timepoint (hr) Value: 6
  misc_feature: MA Experiment 20000182 PARAMETER Experiment Name: At_2mM_SA_P Parameter: Tissue Value: Aerial
  misc_feature: MA Experiment 20000182 PARAMETER Experiment Name: At_2mM_SA_P Parameter: Treatment Value: 2mM SA vs. No Treatment
  misc_feature: MA Experiment ID: 20000224 Result: Up-regulated in Transcription
  misc_feature: MA Experiment ID: 20000234 Result: Down-regulated in Transcription
  misc_feature: MA Experiment 20000234 PARAMETER Experiment Name: At_Siliques_P Parameter: Age (day) Value: 21
  misc_feature: MA Experiment 20000234 PARAMETER Experiment Name: At_Siliques_P Parameter: Organism Value: A. thaliana
  misc_feature: MA Experiment 20000234 PARAMETER Experiment Name: At_Siliques_P Parameter: Plant Line Value: WS
  misc_feature: MA Experiment 20000234 PARAMETER Experiment Name: At_Siliques_P Parameter: Tissue Value: Less Than 5mm Siliques vs. Whole Plant
  misc_feature: MA Experiment ID: 20000439 Result: Up-regulated in Transcription
  misc_feature: MA Experiment 20000439 PARAMETER Experiment Name: At_Roots__P Parameter: Age (day) Value: 14 vs. 21
  misc_feature: MA Experiment 20000439 PARAMETER Experiment Name: At_Roots__P Parameter: Organism Value: A. thaliana
  misc_feature: MA Experiment 20000439 PARAMETER Experiment Name: At_Roots__P Parameter: Tissue Value: Roots vs. Whole Plant
  misc_feature: MA Experiment ID: 20000460 Result: Down-regulated in Transcription
  misc_feature: MA Experiment 20000460 PARAMETER Experiment Name: At_10percent_PEG_P Parameter: Age (day) Value: 12
  misc_feature: MA Experiment 20000460 PARAMETER Experiment Name: At_10percent_PEG_P Parameter: Organism Value: A. thaliana
  misc_feature: MA Experiment 20000460 PARAMETER Experiment Name: At_10percent_PEG_P Parameter: Plant Line Value: WS
  misc_feature: MA Experiment 20000460 PARAMETER Experiment Name: At_10percent_PEG_P Parameter: Timepoint (day) Value: 12
  misc_feature: MA Experiment 20000460 PARAMETER Experiment Name: At_10percent_PEG_P Parameter: Tissue Value: Whole Plant
  misc_feature: MA Experiment 20000460 PARAMETER Experiment Name: At_10percent_PEG_P Parameter: Treatment Value: 10percent PEG vs. No Treatment
  misc_feature: MA Experiment ID: 20000495 Result: Down-regulated in Transcription
  misc_feature: MA Experiment 20000495 PARAMETER Experiment Name: At_Guard_Cells_P Parameter: Harvest Date Value: 8/2/2002
  misc_feature: MA Experiment 20000495 PARAMETER Experiment Name: At_Guard_Cells_P Parameter: Organism Value: A. thaliana
  misc_feature: MA Experiment 20000495 PARAMETER Experiment Name: At_Guard_Cells_P Parameter: Tissue Value: Guard Cells vs. Leaves
  misc_feature: MA Experiment ID: 20000527 Result: Down-regulated in Transcription
  misc_feature: MA Experiment 20000527 PARAMETER Experiment Name: At_10percent_PEG_P Parameter: Age (day) Value: 20
  misc_feature: MA Experiment 20000527 PARAMETER Experiment Name: At_10percent_PEG_P Parameter: Organism Value: A. thaliana
  misc_feature: MA Experiment 20000527 PARAMETER Experiment Name: At_10percent_PEG_P Parameter: Plant Line Value: WS
  misc_feature: MA Experiment 20000527 PARAMETER Experiment Name: At_10percent_PEG_P Parameter: Timepoint (day) Value: 20
  misc_feature: MA Experiment 20000527 PARAMETER Experiment Name: At_10percent_PEG_P Parameter: Tissue Value: Whole Plant
  misc_feature: MA Experiment 20000527 PARAMETER Experiment Name: At_10percent_PEG_P Parameter: Treatment Value: 10percent PEG vs. No Treatment
  misc_feature: MA Experiment ID: 20000573 Result: Down-regulated in Transcription
  misc_feature: MA Experiment 20000573 PARAMETER Experiment Name: At_100uM_ABA_Mutants__P Parameter: Organism Value: A. thaliana
  misc_feature: MA Experiment 20000573 PARAMETER Experiment Name: At_100uM_ABA_Mutants__P Parameter: Plant Line Value: CS22 vs. Ler wt
  misc_feature: MA Experiment 20000573 PARAMETER Experiment Name: At_100uM_ABA_Mutants__P Parameter: Timepoint (hr) Value: N/A
  misc_feature: MA Experiment 20000573 PARAMETER Experiment Name: At_100uM_ABA_Mutants__P Parameter: Tissue Value: Whole Plant
  misc_feature: MA Experiment 20000573 PARAMETER Experiment Name: At_100uM_ABA_Mutants__P Parameter: Treatment Value: None
  misc_feature: MA Experiment ID: 20001248 Result: Down-regulated in Transcription
  misc_feature: MA Experiment 20001248 PARAMETER Experiment Name: At_Far-red-induction_P Parameter: Age (day) Value: 7
  misc_feature: MA Experiment 20001248 PARAMETER Experiment Name: At_Far-red-induction_P Parameter: Light Value: Far-red vs. White
  misc_feature: MA Experiment 20001248 PARAMETER Experiment Name: At_Far-red-induction_P Parameter: Organism Value: A. thaliana
  misc_feature: MA Experiment 20001248 PARAMETER Experiment Name: At_Far-red-induction_P Parameter: Plant Line Value: Columbia
  misc_feature: MA Experiment 20001248 PARAMETER Experiment Name: At_Far-red-induction_P Parameter: Timepoint (hr) Value: 4
  misc_feature: MA Experiment 20001248 PARAMETER Experiment Name: At_Far-red-induction_P Parameter: Tissue Value: Whole Plant
  misc_feature: MA Experiment ID: 20001450 Result: Down-regulated in Transcription
  misc_feature: MA Experiment 20001450 PARAMETER Experiment Name: At_Far-red-induction_P Parameter: Age (day) Value: 7
  misc_feature: MA Experiment 20001450 PARAMETER Experiment Name: At_Far-red-induction_P Parameter: Light Value: Far-red vs. White
  misc_feature: MA Experiment 20001450 PARAMETER Experiment Name: At_Far-red-induction_P Parameter: Organism Value: A. thaliana
  misc_feature: MA Experiment 20001450 PARAMETER Experiment Name: At_Far-red-induction_P Parameter: Plant Line Value: Columbia
  misc_feature: MA Experiment 20001450 PARAMETER Experiment Name: At_Far-red-induction_P Parameter: Timepoint (hr) Value: 8
  misc_feature: MA Experiment 20001450 PARAMETER Experiment Name: At_Far-red-induction_P Parameter: Tissue Value: Whole Plant
  misc_feature: MA Experiment ID: 20001911 Result: Up-regulated in Transcription
  misc_feature: MA Experiment 20001911 PARAMETER Experiment Name: At_Drought_Reproduction_P Parameter: Age (day) Value: 40
  misc_feature: MA Experiment 20001911 PARAMETER Experiment Name: At_Drought_Reproduction_P Parameter: Organism Value: A. thaliana
  misc_feature: MA Experiment 20001911 PARAMETER Experiment Name: At_Drought_Reproduction_P Parameter: Plant Line Value: WS
  misc_feature: MA Experiment 20001911 PARAMETER Experiment Name: At_Drought_Reproduction_P Parameter: Timepoint (day) Value: 10
  misc_feature: MA Experiment 20001911 PARAMETER Experiment Name: At_Drought_Reproduction_P Parameter: Tissue Value: Flowers
  misc_feature: MA Experiment 20001911 PARAMETER Experiment Name: At_Drought_Reproduction_P Parameter: Treatment Value: Drought vs. No Drought
aatgattcacacaaactctctatataaagccattacttaataccacacaaattacaaaaaaaaaaagaaaaaaggagataataatcacaaactacaaaagtagaaagaagaaaaaagaacaaagtatcagttcttgaatatttgcatcaatggaggaatccaaaacacctcacgttgcgatcataccaagtccgggaatgggtcatctcataccactcgtcgagtttgctaaacgactcgtccatcttcacggcctcaccgttaccttcgtcatcgccggcgaaggtccaccatcaaaagctcagagaaccgtcctcgactctctcccttcttcaatctcctccgtctttctccctcctgttgatctcaccgatctctcttcgtccactcgcatcgaatctcggatctccctcaccgtgactcgttcaaacccggagctccggaaagtcttcgactcgttcgtggagggaggtcgtttgccaacggcgctcgtcgtcgatctcttcggtacggacgctttcgacgtggccgtagaatttcacgtgccaccgtatattttctacccaacaacggccaacgtcttgtcgttttttctccatttgcctaaactagacgaaacggtgtcgtgtgagttcagggaattaaccgaaccgcttatgcttcctggatgtgtaccggttgccgggaaagatttccttgacccggcccaagaccggaaagacgatgcatacaaatggcttctccataacaccaagaggtacaaagaagccgaaggtattcttgtgaataccttctttgagctagagccaaatgctataaaggccttgcaagaaccgggtcttgataaaccaccggtttatccggttggaccgttggttaacattggtaagcaagaggctaagcaaaccgaagagtctgaatgtttaaagtggttggataaccagccgctcggttcggttttatatgtgtcctttggtagtggcggtaccctcacatgtgagcagctcaatgagcttgctcttggtcttgcagatagtgagcaacggtttctttgggtcatacgaagtcctagtgggatcgctaattcgtcgtattttgattcacatagccaaacagatccattgacatttttaccaccgggatttttagagcggactaaaaaaagaggttttgtgatccctttttgggctccacaagcccaagtcttggcgcatccatccacgggaggatttttaactcattgtggatggaattcgactctagagagtgtagtaagcggtattccacttatagcatggccattatacgcagaacagaagatgaatgcggttttgttgagtgaagatattcgtgcggcacttaggccgcgtgccggggacgatgggttagttagaagagaagaggtggctagagtggtaaaaggattgatggaaggtgaagaaggcaaaggagtgaggaacaagatgaaggagttgaaggaagcagcttgtagggtgttgaaggatgatgggacttcgacaaaagcacttagtcttgtggccttaaagtggaaagcccacaaaaaagagttagagcaaaatggcaaccactaaatatttgatgttctaatatgatttgtataatcaacggtgggatttgtgcaaatgtgtttctgtatgtatatgtatgttctacttttcttt

SEQ ID NO: 71109 - protein, 480 aa, Arabidopsis thaliana; identical to SEQ ID NO: 25935
  peptide (1)..(480): Ceres Seq. ID no. 3051015
  misc_feature (7)..(471): Pfam Name: UDP-glucoronosyl and UDP-glucosyl transferase Pfam Description: UDP-glucoronosyl and UDP-glucosyl transferase
  misc_feature (138)..(480): Homolog of NCBI NO: 7433902 NR Description: UTP-glucose glucosyltransferase homolog
  misc_feature (1)..(145): Homolog of NCBI NO: 7433902 NR Description: UTP-glucose glucosyltransferase homolog
  misc_feature (1)..(476): Homolog of NCBI NO: 15223396 NR Description: flavonol 3-o-glucosyltransferase, putative; id: At1g01420.1 [Arabidopsis thaliana] >gi|25286824|pir||G86144
  misc_feature (1)..(480): Homolog of NCBI NO: 15223392 NR Description: flavonol 3-o-glucosyltransferase, putative; id: At1g01390.1, supported by cDNA: gi_17065183 [Arabidopsis
  misc_feature (12)..(480): Homolog of NCBI NO: 25286808 NR Description: protein probable UTP-glucose glucosyltransferase
  misc_feature (1)..(480): Homolog of NCBI NO: 15234056 NR Description: putative flavonol glucosyltransferase; protein At4g01070.1, supported by cDNA: 1204., supported by cDNA: [Arabidopsis thaliana] >gi|28380085|sp|Q9M156|HQGT_ARATH Probable
  misc_feature (6)..(468): Homolog of NCBI NO: 28380078 NR Description: Hydroquinone glucosyltransferase (Arbutin >gi|13508844|emb|CAC35167.1| arbutin synthase [Rauvolfia
  misc_feature (5)..(469): Homolog of NCBI NO: 19911209 NR Description: glucosyltransferase-13 [Vigna angularis]
  misc_feature (3)..(468): Homolog of NCBI NO: 34912764 NR Description: putative UTP-glucose glucosyltransferase [Oryza
  misc_feature (6)..(468): Homolog of NCBI NO: 34912752 NR Description: putative UTP-glucose glucosyltransferase [Oryza

SEQ ID NO: 71110 - protein, 464 aa, Arabidopsis thaliana; identical to SEQ ID NO: 25936
  peptide (1)..(464): Ceres Seq. ID no. 3051016
  misc_feature (1)..(455): Pfam Name: UDP-glucoronosyl and UDP-glucosyl transferase Pfam Description: UDP-glucoronosyl and UDP-glucosyl transferase
  misc_feature (1)..(464): Homolog of NCBI NO: 15234056 NR Description: putative flavonol glucosyltransferase; protein At4g01070.1, supported by cDNA: 1204., supported by cDNA: [Arabidopsis thaliana] >gi|28380085|sp|Q9M156|HQGT_ARATH Probable
  misc_feature (122)..(464): Homolog of NCBI NO: 7433902 NR Description: UTP-glucose glucosyltransferase homolog
  misc_feature (1)..(129): Homolog of NCBI NO: 7433902 NR Description: UTP-glucose glucosyltransferase homolog
  misc_feature (1)..(460): Homolog of NCBI NO: 15223396 NR Description: flavonol 3-o-glucosyltransferase, putative; id: At1g01420.1 [Arabidopsis thaliana] >gi|25286824|pir||G86144
  misc_feature (1)..(464): Homolog of NCBI NO: 15223392 NR Description: flavonol 3-o-glucosyltransferase, putative; id: At1g01390.1, supported by cDNA: gi_17065183 [Arabidopsis
  misc_feature (1)..(464): Homolog of NCBI NO: 25286808 NR Description: protein probable UTP-glucose glucosyltransferase
  misc_feature (1)..(452): Homolog of NCBI NO: 28380078 NR Description: Hydroquinone glucosyltransferase (Arbutin >gi|13508844|emb|CAC35167.1| arbutin synthase [Rauvolfia
  misc_feature (1)..(453): Homolog of NCBI NO: 19911209 NR Description: glucosyltransferase-13 [Vigna angularis]
  misc_feature (1)..(452): Homolog of NCBI NO: 34912764 NR Description: putative UTP-glucose glucosyltransferase [Oryza
  misc_feature (1)..(452): Homolog of NCBI NO: 34912752 NR Description: putative UTP-glucose glucosyltransferase [Oryza

SEQ ID NO: 71111 - protein, 311 aa, Arabidopsis thaliana; identical to SEQ ID NO: 25937
  peptide (1)..(311): Ceres Seq. ID no. 3051017
  misc_feature (1)..(302): Pfam Name: UDP-glucoronosyl and UDP-glucosyl transferase Pfam Description: UDP-glucoronosyl and UDP-glucosyl transferase
  misc_feature (1)..(311): Homolog of NCBI NO: 15234056 NR Description: putative flavonol glucosyltransferase; protein At4g01070.1, supported by cDNA: 1204., supported by cDNA: [Arabidopsis thaliana] >gi|28380085|sp|Q9M156|HQGT_ARATH Probable
  misc_feature (1)..(311): Homolog of NCBI NO: 7433902 NR Description: UTP-glucose glucosyltransferase homolog
  misc_feature (1)..(307): Homolog of NCBI NO: 15223396 NR Description: flavonol 3-o-glucosyltransferase, putative; id: At1g01420.1 [Arabidopsis thaliana] >gi|25286824|pir||G86144
  misc_feature (1)..(311): Homolog of NCBI NO: 15223392 NR Description: flavonol 3-o-glucosyltransferase, putative; id: At1g01390.1, supported by cDNA: gi_17065183 [Arabidopsis
  misc_feature (1)..(311): Homolog of NCBI NO: 25286808 NR Description: protein probable UTP-glucose glucosyltransferase
  misc_feature (1)..(299): Homolog of NCBI NO: 28380078 NR Description: Hydroquinone glucosyltransferase (Arbutin >gi|13508844|emb|CAC35167.1| arbutin synthase [Rauvolfia
  misc_feature (1)..(300): Homolog of NCBI NO: 19911209 NR Description: glucosyltransferase-13 [Vigna angularis]
  misc_feature (1)..(299): Homolog of NCBI NO: 34912764 NR Description: putative UTP-glucose glucosyltransferase [Oryza
  misc_feature (1)..(299): Homolog of NCBI NO: 34912752 NR Description: putative UTP-glucose glucosyltransferase [Oryza
  misc_feature (1)..(285): Homolog of NCBI NO: 19911195 NR Description: glucosyltransferase-6 [Vigna angularis]

SEQ ID NO: 71112 - DNA, 1269 bp, Arabidopsis thaliana
  misc_feature (1)..(1269): Ceres Seq. ID no. 3057607
  misc_feature: MA Experiment ID: 20000169 Result: Up-regulated in Transcription
  misc_feature: MA Experiment 20000169 PARAMETER Experiment Name: At_100uM_ABA_P Parameter: Age (day) Value: 14
  misc_feature: MA Experiment 20000169 PARAMETER Experiment Name: At_100uM_ABA_P Parameter: Organism Value: A. thaliana
  misc_feature: MA Experiment 20000169 PARAMETER Experiment Name: At_100uM_ABA_P Parameter: Plant Line Value: WS
  misc_feature: MA Experiment 20000169 PARAMETER Experiment Name: At_100uM_ABA_P Parameter: Timepoint (hr) Value: 6
  misc_feature: MA Experiment 20000169 PARAMETER Experiment Name: At_100uM_ABA_P Parameter: Tissue Value: Aerial
  misc_feature: MA Experiment 20000169 PARAMETER Experiment Name: At_100uM_ABA_P Parameter: Treatment Value: 100uM ABA vs. No Treatment
  misc_feature: MA Experiment ID: 20000264 Result: Up-regulated in Transcription
  misc_feature: MA Experiment 20000264 PARAMETER Experiment Name: At_Open_Flower_P Parameter: Age (day) Value: 21
  misc_feature: MA Experiment 20000264 PARAMETER Experiment Name: At_Open_Flower_P Parameter: Plant Line Value: WS
  misc_feature: MA Experiment 20000264 PARAMETER Experiment Name: At_Open_Flower_P Parameter: Tissue Value: Open Flower vs. Whole Plant
  misc_feature: MA Experiment ID: 20000267 Result: Up-regulated in Transcription
  misc_feature: MA Experiment 20000267 PARAMETER Experiment Name: At_Drought_P Parameter: Age (day) Value: 7
  misc_feature: MA Experiment 20000267 PARAMETER Experiment Name: At_Drought_P Parameter: Organism Value: A. thaliana
  misc_feature: MA Experiment 20000267 PARAMETER Experiment Name: At_Drought_P Parameter: Plant Line Value: WS
  misc_feature: MA Experiment 20000267 PARAMETER Experiment Name: At_Drought_P Parameter: Timepoint (hr) Value: 6
  misc_feature: MA Experiment 20000267 PARAMETER Experiment Name: At_Drought_P Parameter: Tissue Value: Whole Plant
  misc_feature: MA Experiment 20000267 PARAMETER Experiment Name: At_Drought_P Parameter: Treatment Value: Drought vs. No Drought
  misc_feature: MA Experiment ID: 20000286 Result: Up-regulated in Transcription
  misc_feature: MA Experiment 20000286 PARAMETER Experiment Name: At_Open_Flower_P Parameter: Age (day) Value: 21
  misc_feature: MA Experiment 20000286 PARAMETER Experiment Name: At_Open_Flower_P Parameter: Plant Line Value: WS
  misc_feature: MA Experiment 20000286 PARAMETER Experiment Name: At_Open_Flower_P Parameter: Tissue Value: Half Open vs. Whole Plant
  misc_feature: MA Experiment ID: 20000436 Result: Up-regulated in Transcription
  misc_feature: MA Experiment 20000436 PARAMETER Experiment Name: At_Drought_P Parameter: Age (day) Value: 7
  misc_feature: MA Experiment 20000436 PARAMETER Experiment Name: At_Drought_P Parameter: Organism Value: A. thaliana
  misc_feature: MA Experiment 20000436 PARAMETER Experiment Name: At_Drought_P Parameter: Plant Line Value: WS
  misc_feature: MA Experiment 20000436 PARAMETER Experiment Name: At_Drought_P Parameter: Timepoint (hr) Value: 12
  misc_feature: MA Experiment 20000436 PARAMETER Experiment Name: At_Drought_P Parameter: Tissue Value: Whole Plant
  misc_feature: MA Experiment 20000436 PARAMETER Experiment Name: At_Drought_P Parameter: Treatment Value: Drought vs. No Drought
  misc_feature: MA Experiment ID: 20000437 Result: Up-regulated in Transcription
  misc_feature: MA Experiment 20000437 PARAMETER Experiment Name: At_Drought_P Parameter: Age (day) Value: 8
  misc_feature: MA Experiment 20000437 PARAMETER Experiment Name: At_Drought_P Parameter: Organism Value: A. thaliana
  misc_feature: MA Experiment 20000437 PARAMETER Experiment Name: At_Drought_P Parameter: Plant Line Value: WS
  misc_feature: MA Experiment 20000437 PARAMETER Experiment Name: At_Drought_P Parameter: Timepoint (hr) Value: 24
  misc_feature: MA Experiment 20000437 PARAMETER Experiment Name: At_Drought_P Parameter: Tissue Value: Whole Plant
  misc_feature: MA Experiment 20000437 PARAMETER Experiment Name: At_Drought_P Parameter: Treatment Value: Drought vs. No Drought
  misc_feature: MA Experiment ID: 20000453 Result: Up-regulated in Transcription
  misc_feature: MA Experiment 20000453 PARAMETER Experiment Name: At_100uM_ABA_P Parameter: Age (day) Value: 15
  misc_feature: MA Experiment 20000453 PARAMETER Experiment Name: At_100uM_ABA_P Parameter: Organism Value: A. thaliana
  misc_feature: MA Experiment 20000453 PARAMETER Experiment Name: At_100uM_ABA_P Parameter: Plant Line Value: WS
  misc_feature: MA Experiment 20000453 PARAMETER Experiment Name: At_100uM_ABA_P Parameter: Timepoint (hr) Value: 24
  misc_feature: MA Experiment 20000453 PARAMETER Experiment Name: At_100uM_ABA_P Parameter: Tissue Value: Aerial
  misc_feature: MA Experiment 20000453 PARAMETER Experiment Name: At_100uM_ABA_P Parameter: Treatment Value: 100uM ABA vs. No Treatment
  misc_feature: MA Experiment ID: 20000794 Result: Up-regulated in Transcription
  misc_feature: MA Experiment 20000794 PARAMETER Experiment Name: At_Petals_P Parameter: Age (day) Value: 23-25 days
  misc_feature: MA Experiment 20000794 PARAMETER Experiment Name: At_Petals_P Parameter: Plant Line Value: WS
  misc_feature: MA Experiment 20000794 PARAMETER Experiment Name: At_Petals_P Parameter: Tissue Value: Petals vs. Whole plant
  misc_feature: MA Experiment ID: 20001247 Result: Up-regulated in Transcription
  misc_feature: MA Experiment 20001247 PARAMETER Experiment Name: At_Far-red-induction_P Parameter: Age (day) Value: 7
  misc_feature: MA Experiment 20001247 PARAMETER Experiment Name: At_Far-red-induction_P Parameter: Light Value: Far-red vs. White
  misc_feature: MA Experiment 20001247 PARAMETER Experiment Name: At_Far-red-induction_P Parameter: Organism Value: A. thaliana
  misc_feature: MA Experiment 20001247 PARAMETER Experiment Name: At_Far-red-induction_P Parameter: Plant Line Value: Columbia
  misc_feature: MA Experiment 20001247 PARAMETER Experiment Name: At_Far-red-induction_P Parameter: Timepoint (hr) Value: 1
  misc_feature: MA Experiment 20001247 PARAMETER Experiment Name: At_Far-red-induction_P Parameter: Tissue Value: Whole Plant
  misc_feature: MA Experiment ID: 20001558 Result: Up-regulated in Transcription
  misc_feature: MA Experiment 20001558 PARAMETER Experiment Name: At_Drought_Soil_Dry_P Parameter: Age (day) Value: 27
  misc_feature: MA Experiment 20001558 PARAMETER Experiment Name: At_Drought_Soil_Dry_P Parameter: Organism Value: A. thaliana
  misc_feature: MA Experiment 20001558 PARAMETER Experiment Name: At_Drought_Soil_Dry_P Parameter: Plant Line Value: WS
  misc_feature: MA Experiment 20001558 PARAMETER Experiment Name: At_Drought_Soil_Dry_P Parameter: Post Timepoint (hr) Value: 6
  misc_feature: MA Experiment 20001558 PARAMETER Experiment Name: At_Drought_Soil_Dry_P Parameter: Post-Treatment Value: Re-Water vs. No Drought
  misc_feature: MA Experiment 20001558 PARAMETER Experiment Name: At_Drought_Soil_Dry_P Parameter: Timepoint (day) Value: 13
  misc_feature: MA Experiment 20001558 PARAMETER Experiment Name: At_Drought_Soil_Dry_P Parameter: Treatment Value: Drought vs. No Drought
  misc_feature: MA Experiment ID: 20001560 Result: Up-regulated in Transcription
  misc_feature: MA Experiment 20001560 PARAMETER Experiment Name: At_Drought_Soil_Dry_P Parameter: Age (day) Value: 28
  misc_feature: MA Experiment 20001560 PARAMETER Experiment Name: At_Drought_Soil_Dry_P Parameter: Organism Value: A. thaliana
  misc_feature: MA Experiment 20001560 PARAMETER Experiment Name: At_Drought_Soil_Dry_P Parameter: Plant Line Value: WS
  misc_feature: MA Experiment 20001560 PARAMETER Experiment Name: At_Drought_Soil_Dry_P Parameter: Post Timepoint (hr) Value: None
  misc_feature: MA Experiment 20001560 PARAMETER Experiment Name: At_Drought_Soil_Dry_P Parameter: Post-Treatment Value: None
  misc_feature: MA Experiment 20001560 PARAMETER Experiment Name: At_Drought_Soil_Dry_P Parameter: Timepoint (day) Value: 14
  misc_feature: MA Experiment 20001560 PARAMETER Experiment Name: At_Drought_Soil_Dry_P Parameter: Treatment Value: Drought vs. No Drought
  misc_feature: MA Experiment ID: 20001904 Result: Up-regulated in Transcription
  misc_feature: MA Experiment 20001904 PARAMETER Experiment Name: At_Drought_Reproduction_P Parameter: Age (day) Value: 37
  misc_feature: MA Experiment 20001904 PARAMETER Experiment Name: At_Drought_Reproduction_P Parameter: Organism Value: A. thaliana
  misc_feature: MA Experiment 20001904 PARAMETER Experiment Name: At_Drought_Reproduction_P Parameter: Plant Line Value: WS
  misc_feature: MA Experiment 20001904 PARAMETER Experiment Name: At_Drought_Reproduction_P Parameter: Timepoint (day) Value: 7
  misc_feature: MA Experiment 20001904 PARAMETER Experiment Name: At_Drought_Reproduction_P Parameter: Tissue Value: Rosettes
  misc_feature: MA Experiment 20001904 PARAMETER Experiment Name: At_Drought_Reproduction_P Parameter: Treatment Value: Drought vs. No Drought
  misc_feature: MA Experiment ID: 20001910 Result: Up-regulated in Transcription
  misc_feature: MA Experiment 20001910 PARAMETER Experiment Name: At_Drought_Reproduction_P Parameter: Age (day) Value: 37
  misc_feature: MA Experiment 20001910 PARAMETER Experiment Name: At_Drought_Reproduction_P Parameter: Organism Value: A. thaliana
  misc_feature: MA Experiment 20001910 PARAMETER Experiment Name: At_Drought_Reproduction_P Parameter: Plant Line Value: WS
  misc_feature: MA Experiment 20001910 PARAMETER Experiment Name: At_Drought_Reproduction_P Parameter: Timepoint (day) Value: 7
  misc_feature: MA Experiment 20001910 PARAMETER Experiment Name: At_Drought_Reproduction_P Parameter: Tissue Value: Flowers
  misc_feature: MA Experiment 20001910 PARAMETER Experiment Name: At_Drought_Reproduction_P Parameter: Treatment Value: Drought vs. No Drought
atgcagttgtctccggaacgatgccgtccgatgtctgaaaacagagaggcttggtcagcgaattccgaggaaatggagctgcttcacggctccaacagattatcttcaccggaacatgttcgtagaagagtctccgggaattcttctgaggacggttcgcctcgaatttgccggcagcagtcgttcggtcgcgacataggccatgcagctgccgagacgtatctcattactcgacttagcttcaaccttcttggatatctcggggtaggttaccggtggatcacaagattacttgctcttgcttgttatgcaatgctccttatgcctggtttccttcaagttgcatatctttattttttctcatctcaagtcaggaggagtatagtttatggaggtcatccaaggaataggctggatttgtacataccgccaacgagtgatggcctgaagccggttgtagttttcgttactggtggagcttggattatcggttacaaagcttggggttctctcttgggactacagctagcagaaagggacataattgtggcatgtctagattacagaaactttcctcaggggacaattagtgatatggtaagtgatgcagctcaaggaatctcatttgtctgcaataacatctctgcatttggaggtgatcctaacagaatctatctgatggggcaatcggctggtgcacatatctcttcttgtgctctctttgaacaagctattaaagaatcaagaggggagagcatctcatggagtgtatctcagattaaagcttactttggtttatctggagggtacaatctctttaatctggttgaacacttccacaaccgaggcttgtatcgttcaattttcctaagcataatggaaggagaagagtcctttaaacaattctcccctgaagtaagattgaaagacctgaatgtaagaaaagctgcagccctcttacctcatattatactctttcatggatccgcagattattcaattccacctgaagcaagcaaaacttttacagatgctcttcaagctgctgaagtgaaagctgagctagttatgtacaagggtaaaactcataccgacctatttcttcaggatcctctgagaggcggtaaagatgagctatttgatcatatagtctctatgatacacgccgatgacagtgacgcattgagaaacgatgctgttgcgccaccgaggaaacggcttgttccagagttcttgctgaaactggctggcagggtcagccctttttga

SEQ ID NO: 71113 - protein, 422 aa, Arabidopsis thaliana
  peptide (1)..(422): Ceres Seq. ID no. 3057608
  misc_feature (138)..(422): Homolog of NCBI NO: 15232904 NR Description: hypothetical protein; protein id: At3g02410.1 thaliana] >gi|6957704|gb|AAF32448.1| hypothetical protein
  misc_feature (1)..(89): Homolog of NCBI NO: 15232904 NR Description: hypothetical protein; protein id: At3g02410.1 thaliana] >gi|6957704|gb|AAF32448.1| hypothetical protein
  misc_feature (5)..(422): Homolog of NCBI NO: 22326830 NR Description: Carboxylesterase-like protein; protein id: supported by cDNA: gi_15027944, supported by cDNA: gi_20259180 thaliana] >gi|15027945|gb|AAK76503.1| putative putative
  misc_feature (47)..(422): Homolog of NCBI NO: 22329792 NR Description: hypothetical protein; protein id: At1g26120.1, by cDNA: gi_17979291, supported by cDNA: gi_20259110 [Arabidopsis >gi|17979292|gb|AAL49871.1| unknown protein [Arabidopsis
  misc_feature (47)..(422): Homolog of NCBI NO: 25518434 NR Description: hypothetical protein F28B23.20 [imported] - thaliana >gi|12320750|gb|AAG50528.1|AC084221_10 hypothetical [Arabidopsis thaliana] >gi|12321166|gb|AAG50668.1|AC079829_1
  misc_feature (5)..(422): Homolog of NCBI NO: 11357218 NR Description: Carboxylesterase-like protein - Arabidopsis
  misc_feature (128)..(277): Homolog of NCBI NO: 28871958 NR Description: esterase/lipase/thioesterase family protein syringae pv. tomato str. DC3000] >gi|28855211|gb|AAO58272.1|
  misc_feature (127)..(271): Homolog of NCBI NO: 23470769 NR Description: hypothetical protein [Pseudomonas syringae pv.
  misc_feature (130)..(275): Homolog of NCBI NO: 16126537 NR Description: carboxylesterase family protein [Caulobacter
  misc_feature (125)..(348): Homolog of NCBI NO: 15607361 NR Description: lipC [Mycobacterium tuberculosis H37Rv]
MQLSPERCRPMSENREAWSANSEEMELLHGSNRLSSPEHVRRRVSGNSSEDGSPRICRQQSFGRDIGHAAAETYLITRLSFNLLGYLGVGYRWITRLLALACYAMLLMPGFLQVAYLYFFSSQVRRSIVYGGHPRNRLDLYIPPTSDGLKPVVVFVTGGAWIIGYKAWGSLLGLQLAERDIIVACLDYRNFPQGTISDMVSDAAQGISFVCNNISAFGGDPNRIYLMGQSAGAHISSCALFEQAIKESRGESISWSVSQIKAYFGLSGGYNLFNLVEHFHNRGLYRSIFLSIMEGEESFKQFSPEVRLKDLNVRKAAALLPHIILFHGSADYSIPPEASKTFTDALQAAEVKAELVMYKGKTHTDLFLQDPLRGGKDELFDHIVSMIHADDSDALRNDAVAPPRKRLVPEFLLKLAGRVSPF

SEQ ID NO: 71114 - protein, 412 aa, Arabidopsis thaliana
  peptide (1)..(412): Ceres Seq. ID no. 3057609
  misc_feature (128)..(412): Homolog of NCBI NO: 15232904 NR Description: hypothetical protein; protein id: At3g02410.1 thaliana] >gi|6957704|gb|AAF32448.1| hypothetical protein
  misc_feature (1)..(79): Homolog of NCBI NO: 15232904 NR Description: hypothetical protein; protein id: At3g02410.1 thaliana] >gi|6957704|gb|AAF32448.1| hypothetical protein
  misc_feature (1)..(412): Homolog of NCBI NO: 22326830 NR Description: Carboxylesterase-like protein; protein id: supported by cDNA: gi_15027944, supported by cDNA: gi_20259180 thaliana] >gi|15027945|gb|AAK76503.1| putative putative
  misc_feature (37)..(412): Homolog of NCBI NO: 22329792 NR Description: hypothetical protein; protein id: At1g26120.1, by cDNA: gi_17979291, supported by cDNA: gi_20259110 [Arabidopsis >gi|17979292|gb|AAL49871.1| unknown protein [Arabidopsis
  misc_feature (37)..(412): Homolog of NCBI NO: 25518434 NR Description: hypothetical protein F28B23.20 [imported] - thaliana >gi|12320750|gb|AAG50528.1|AC084221_10 hypothetical [Arabidopsis thaliana] >gi|12321166|gb|AAG50668.1|AC079829_1
  misc_feature (1)..(412): Homolog of NCBI NO: 11357218 NR Description: Carboxylesterase-like protein - Arabidopsis
  misc_feature (118)..(267): Homolog of NCBI NO: 28871958 NR Description: esterase/lipase/thioesterase family protein syringae pv. tomato str. DC3000] >gi|28855211|gb|AAO58272.1|
  misc_feature (117)..(261): Homolog of NCBI NO: 23470769 NR Description: hypothetical protein [Pseudomonas syringae pv.
  misc_feature (120)..(265): Homolog of NCBI NO: 16126537 NR Description: carboxylesterase family protein [Caulobacter
  misc_feature (115)..(338): Homolog of NCBI NO: 15607361 NR Description: lipC [Mycobacterium tuberculosis H37Rv]
MSENREAWSANSEEMELLHGSNRLSSPEHVRRRVSGNSSEDGSPRICRQQSFGRDIGHAAAETYLITRLSFNLLGYLGVGYRWITRLLALACYAMLLMPGFLQVAYLYFFSSQVRRSIVYGGHPRNRLDLYIPPTSDGLKPVVVFVTGGAWIIGYKAWGSLLGLQLAERDIIVACLDYRNFPQGTISDMVSDAAQGISFVCNNISAFGGDPNRIYLMGQSAGAHISSCALFEQAIKESRGESISWSVSQIKAYFGLSGGYNLFNLVEHFHNRGLYRSIFLSIMEGEESFKQFSPEVRLKDLNVRKAAALLPHIILFHGSADYSIPPEASKTFTDALQAAEVKAELVMYKGKTHTDLFLQDPLRGGKDELFDHIVSMIHADDSDALRNDAVAPPRKRLVPEFLLKLAGRVSPF

SEQ ID NO: 71115 - protein, 398 aa, Arabidopsis thaliana
  peptide (1)..(398): Ceres Seq. ID no. 3057610
  misc_feature (114)..(398): Homolog of NCBI NO: 15232904 NR Description: hypothetical protein; protein id: At3g02410.1 thaliana] >gi|6957704|gb|AAF32448.1| hypothetical protein
  misc_feature (1)..(65): Homolog of NCBI NO: 15232904 NR Description: hypothetical protein; protein id: At3g02410.1 thaliana] >gi|6957704|gb|AAF32448.1| hypothetical protein
  misc_feature (1)..(398): Homolog of NCBI NO: 22326830 NR Description: Carboxylesterase-like protein; protein id: supported by cDNA: gi_15027944, supported by cDNA: gi_20259180 thaliana] >gi|15027945|gb|AAK76503.1| putative putative
  misc_feature (23)..(398): Homolog of NCBI NO: 22329792 NR Description: hypothetical protein; protein id: At1g26120.1, by cDNA: gi_17979291, supported by cDNA: gi_20259110 [Arabidopsis >gi|17979292|gb|AAL49871.1| unknown protein [Arabidopsis
  misc_feature (23)..(398): Homolog of NCBI NO: 25518434 NR Description: hypothetical protein F28B23.20 [imported] - thaliana >gi|12320750|gb|AAG50528.1|AC084221_10 hypothetical [Arabidopsis thaliana] >gi|12321166|gb|AAG50668.1|AC079829_1
  misc_feature (1)..(398): Homolog of NCBI NO: 11357218 NR Description: Carboxylesterase-like protein - Arabidopsis
  misc_feature (104)..(253): Homolog of NCBI NO: 28871958 NR Description: esterase/lipase/thioesterase family protein syringae pv. tomato str. DC3000] >gi|28855211|gb|AAO58272.1|
  misc_feature (103)..(247): Homolog of NCBI NO: 23470769 NR Description: hypothetical protein [Pseudomonas syringae pv.
  misc_feature (106)..(251): Homolog of NCBI NO: 16126537 NR Description: carboxylesterase family protein [Caulobacter
  misc_feature (101)..(324): Homolog of NCBI NO: 15607361 NR Description: lipC [Mycobacterium tuberculosis H37Rv]
MELLHGSNRLSSPEHVRRRVSGNSSEDGSPRICRQQSFGRDIGHAAAETYLITRLSFNLLGYLGVGYRWITRLLALACYAMLLMPGFLQVAYLYFFSSQVRRSIVYGGHPRNRLDLYIPPTSDGLKPVVVFVTGGAWIIGYKAWGSLLGLQLAERDIIVACLDYRNFPQGTISDMVSDAAQGISFVCNNISAFGGDPNRIYLMGQSAGAHISSCALFEQAIKESRGESISWSVSQIKAYFGLSGGYNLFNLVEHFHNRGLYRSIFLSIMEGEESFKQFSPEVRLKDLNVRKAAALLPHIILFHGSADYSIPPEASKTFTDALQAAEVKAELVMYKGKTHTDLFLQDPLRGGKDELFDHIVSMIHADDSDALRNDAVAPPRKRLVPEFLLKLAGRVSPF

SEQ ID NO: 71116 - DNA, 1218 bp, Arabidopsis thaliana
  misc_feature (1)..(1218): Ceres Seq. ID no. 3061811
  misc_feature: MA Experiment ID: 20000314 Result: Up-regulated in Transcription
  misc_feature: MA Experiment 20000314 PARAMETER Experiment Name: At_14day_Shoots-Roots_Sub_P Parameter: Age (day) Value: 14
  misc_feature: MA Experiment 20000314 PARAMETER Experiment Name: At_14day_Shoots-Roots_Sub_P Parameter: Organism Value: A. thaliana
  misc_feature: MA Experiment 20000314 PARAMETER Experiment Name: At_14day_Shoots-Roots_Sub_P Parameter: Plant Line Value: WS
  misc_feature: MA Experiment 20000314 PARAMETER Experiment Name: At_14day_Shoots-Roots_Sub_P Parameter: Tissue Value: Roots vs. Whole Plant
  misc_feature: MA Experiment ID: 20000315 Result: Up-regulated in Transcription
  misc_feature: MA Experiment 20000315 PARAMETER Experiment Name: At_14day_Shoots-Roots_Sub_P Parameter: Age (day) Value: 14
  misc_feature: MA Experiment 20000315 PARAMETER Experiment Name: At_14day_Shoots-Roots_Sub_P Parameter: Organism Value: A. thaliana
  misc_feature: MA Experiment 20000315 PARAMETER Experiment Name: At_14day_Shoots-Roots_Sub_P Parameter: Plant Line Value: WS
  misc_feature: MA Experiment 20000315 PARAMETER Experiment Name: At_14day_Shoots-Roots_Sub_P Parameter: Tissue Value: Shoots vs. Whole Plant
  misc_feature: MA Experiment ID: 20000634 Result: Down-regulated in Transcription
  misc_feature: MA Experiment 20000634 PARAMETER Experiment Name: At_10percent_PEG_Sub_P Parameter: Age (day) Value: 12
  misc_feature: MA Experiment 20000634 PARAMETER Experiment Name: At_10percent_PEG_Sub_P Parameter: Organism Value: A. thaliana
  misc_feature: MA Experiment 20000634 PARAMETER Experiment Name: At_10percent_PEG_Sub_P Parameter: Plant Line Value: WS
  misc_feature: MA Experiment 20000634 PARAMETER Experiment Name: At_10percent_PEG_Sub_P Parameter: Timepoint (day) Value: 12
  misc_feature: MA Experiment 20000634 PARAMETER Experiment Name: At_10percent_PEG_Sub_P Parameter: Tissue Value: Whole Plant
  misc_feature: MA Experiment 20000634 PARAMETER Experiment Name: At_10percent_PEG_Sub_P Parameter: Treatment Value: 10% PEG vs. No Treatment
atgttgagtgcctttttgggtcatgcgtcagctattgctatagcttcaccagtagtcagcattgtgggcatcaggcgacaaacatatggagagatgaaacacgtgggggtcgttgaaaaacaaagagaaatgccaacatttcctcaatcgtttcctatgaacggtggtgatggtccgcacagttacatccacaattcctcttatcaaaaagtagcgatagatggcgctaaagaaaagacaagtgaagccatcctaaaaaacctcgatctcgaactcttgaaccgtaattctgatgaaaatatcttaagaattgcggattttggttgttctattggacccaacacgttcgaagtagtccaaaatattatcgatacggtgaagcaaaaaaacctaaaagaaaacaatgcctatattggtgctcctctcgagttccaagtttgcttcaatgatcaaccaaacaatgattttaacacactttttagaacccaacctatctcttccaaacaagcatatttatcggttggagttccaggatctttccatggtagagtattaccaaaaaatagcctccatatcggtcacattacctatgcgctccactggctttctacagttccccaacatgtttgcgacaagaaatctccggcattgaataaaagctacattcaatgtaataatttagtagaggaagtgactgaagcttaccgggtccagtttaaaaaggacatgggagattttcttggggcaagagctgaagagcttgtttcgggcggattgatgatcctatcaggacaatgcttgcccgatggtgtccctaaggctttgacatggcaaggggttgtgatcgatatgattggagattgtcttatggatatggctaaacagggaattacgaccaaggaaaagatcgaactgttcagtttgcccatatatattccgcatattagtgaattcaaggcagaaatagagcgaaatgaaaactttagtatcgagacaatggagaagataagtcatcctatggattataagccactaaccaacgacttcatcacttccatgtttcgagccattctcaatacgattattgaagaacactttggagatggtgtggtcaatgagctattcgatcgatttgctaagaagctcaacaagtacccaattgatttcaaaaggtgtaaaaagtatgtgaattattttatcgtgcttaaaagaaaataa

SEQ ID NO: 71117 - protein, 405 aa, Arabidopsis thaliana
  peptide (1)..(405): Ceres Seq. ID no. 3061812
  misc_feature (80)..(405): Pfam Name: SAM dependent carboxyl methyltransferase Pfam Description: SAM dependent carboxyl methyltransferase
  misc_feature (32)..(405): Homolog of NCBI NO: 9758498 NR Description: S-adenosyl-L-methionine:salicylic acid carboxyl
  misc_feature (44)..(405): Homolog of NCBI NO: 15240811 NR Description: methyltransferase-related; protein id:
  misc_feature (1)..(405): Homolog of NCBI NO: 15240809 NR Description: methyltransferase-related; protein id:
  misc_feature (44)..(405): Homolog of NCBI NO: 9758496 NR Description: S-adenosyl-L-methionine:salicylic acid carboxyl
  misc_feature (44)..(405): Homolog of NCBI NO: 8885614 NR Description: S-adenosyl-L-methionine:salicylic acid carboxyl
  misc_feature (44)..(405): Homolog of NCBI NO: 15241002 NR Description: methyltransferase-related; protein id: supported by cDNA: gi_17380699, supported by cDNA: gi_20259006
  misc_feature (44)..(296): Homolog of NCBI NO: 15240841 NR Description: methyltransferase-related; protein id:
  misc_feature (50)..(404): Homolog of NCBI NO: 14009292 NR Description: defense-related protein [Brassica carinata]
  misc_feature (50)..(404): Homolog of NCBI NO: 15230523 NR Description: methyltransferase-related; protein id: At3g44840.1
  misc_feature (50)..(404): Homolog of NCBI NO: 15230529 NR Description: methyltransferase-related; protein id: supported by cDNA: gi_15293070 [Arabidopsis thaliana]
MLSAFLGHASAIAIASPVVSIVGIRRQTYGEMKHVGVVEKQREMPTFPQSFPMNGGDGPHSYIHNSSYQKVAIDGAKEKTSEAILKNLDLELLNRNSDENILRIADFGCSIGPNTFEVVQNIIDTVKQKNLKENNAYIGAPLEFQVCFNDQPNNDFNTLFRTQPISSKQAYLSVGVPGSFHGRVLPKNSLHIGHITYALHWLSTVPQHVCDKKSPALNKSYIQCNNLVEEVTEAYRVQFKKDMGDFLGARAEELVSGGLMILSGQCLPDGVPKALTWQGVVIDMIGDCLMDMAKQGITTKEKIELFSLPIYIPHISEFKAEIERNENFSIETMEKISHPMDYKPLTNDFITSMFRAILNTIIEEHFGDGVVNELFDRFAKKLNKYPIDFKRCKKYVNYFIVLKRK

SEQ ID NO: 71118 - protein, 374 aa, Arabidopsis thaliana
  peptide (1)..(374): Ceres Seq. ID no. 3061813
  misc_feature (49)..(374): Pfam Name: SAM dependent carboxyl methyltransferase Pfam Description: SAM dependent carboxyl methyltransferase
  misc_feature (1)..(374): Homolog of NCBI NO: 9758498 NR Description: S-adenosyl-L-methionine:salicylic acid carboxyl
  misc_feature (13)..(374): Homolog of NCBI NO: 15240811 NR Description: methyltransferase-related; protein id:
  misc_feature (1)..(374): Homolog of NCBI NO: 15240809 NR Description: methyltransferase-related; protein id:
  misc_feature (13)..(374): Homolog of NCBI NO: 9758496 NR Description: S-adenosyl-L-methionine:salicylic acid carboxyl
  misc_feature (13)..(374): Homolog of NCBI NO: 8885614 NR Description: S-adenosyl-L-methionine:salicylic acid carboxyl
  misc_feature (13)..(374): Homolog of NCBI NO: 15241002 NR Description: methyltransferase-related; protein id: supported by cDNA: gi_17380699, supported by cDNA: gi_20259006
  misc_feature (13)..(265): Homolog of NCBI NO: 15240841 NR Description: methyltransferase-related; protein id:
  misc_feature (19)..(373): Homolog of NCBI NO: 14009292 NR Description: defense-related protein [Brassica carinata]
  misc_feature (19)..(373): Homolog of NCBI NO: 15230523 NR Description: methyltransferase-related; protein id: At3g44840.1
  misc_feature (19)..(373): Homolog of NCBI NO: 15230529 NR Description: methyltransferase-related; protein id: supported by cDNA: gi_15293070 [Arabidopsis thaliana]
MKHVGVVEKQREMPTFPQSFPMNGGDGPHSYIHNSSYQKVAIDGAKEKTSEAILKNLDLELLNRNSDENILRIADFGCSIGPNTFEVVQNIIDTVKQKNLKENNAYIGAPLEFQVCFNDQPNNDFNTLFRTQPISSKQAYLSVGVPGSFHGRVLPKNSLHIGHITYALHWLSTVPQHVCDKKSPALNKSYIQCNNLVEEVTEAYRVQFKKDMGDFLGARAEELVSGGLMILSGQCLPDGVPKALTWQGVVIDMIGDCLMDMAKQGITTKEKIELFSLPIYIPHISEFKAEIERNENFSIETMEKISHPMDYKPLTNDFITSMFRAILNTIIEEHFGDGVVNELFDRFAKKLNKYPIDFKRCKKYVNYFIVLKRK

SEQ ID NO: 71119 - protein, 362 aa, Arabidopsis thaliana
  peptide (1)..(362): Ceres Seq. ID no. 3061814
  misc_feature (37)..(362): Pfam Name: SAM dependent carboxyl methyltransferase Pfam Description: SAM dependent carboxyl methyltransferase
  misc_feature (1)..(362): Homolog of NCBI NO: 9758498 NR Description: S-adenosyl-L-methionine:salicylic acid carboxyl
  misc_feature (1)..(362): Homolog of NCBI NO: 15240811 NR Description: methyltransferase-related; protein id:
  misc_feature (1)..(362): Homolog of NCBI NO: 15240809 NR Description: methyltransferase-related; protein id:
  misc_feature (1)..(362): Homolog of NCBI NO: 9758496 NR Description: S-adenosyl-L-methionine:salicylic acid carboxyl
  misc_feature (1)..(362): Homolog of NCBI NO: 8885614 NR Description: S-adenosyl-L-methionine:salicylic acid carboxyl
  misc_feature (1)..(362): Homolog of NCBI NO: 15241002 NR Description: methyltransferase-related; protein id: supported by cDNA: gi_17380699, supported by cDNA: gi_20259006
  misc_feature (1)..(253): Homolog of NCBI NO: 15240841 NR Description: methyltransferase-related; protein id:
  misc_feature (7)..(361): Homolog of NCBI NO: 14009292 NR Description: defense-related protein [Brassica carinata]
  misc_feature (7)..(361): Homolog of NCBI NO: 15230523 NR Description: methyltransferase-related; protein id: At3g44840.1
  misc_feature (7)..(361): Homolog of NCBI NO: 15230529 NR Description: methyltransferase-related; protein id: supported by cDNA: gi_15293070 [Arabidopsis thaliana]
MPTFPQSFPMNGGDGPHSYIHNSSYQKVAIDGAKEKTSEAILKNLDLELLNRNSDENILRIADFGCSIGPNTFEVVQNIIDTVKQKNLKENNAYIGAPLEFQVCFNDQPNNDFNTLFRTQPISSKQAYLSVGVPGSFHGRVLPKNSLHIGHITYALHWLSTVPQHVCDKKSPALNKSYIQCNNLVEEVTEAYRVQFKKDMGDFLGARAEELVSGGLMILSGQCLPDGVPKALTWQGVVIDMIGDCLMDMAKQGITTKEKIELFSLPIYIPHISEFKAEIERNENFSIETMEKISHPMDYKPLTNDFITSMFRAILNTIIEEHFGDGVVNELFDRFAKKLNKYPIDFKRCKKYVNYFIVLKRK

SEQ ID NO: 71120 - DNA, 921 bp, Arabidopsis thaliana
  misc_feature (1)..(921): Ceres Seq. ID no. 3061894
  misc_feature: MA Experiment ID: 20000179 Result: Up-regulated in Transcription
  misc_feature: MA Experiment 20000179 PARAMETER Experiment Name: At_Germinating_Seeds_P Parameter: Age (hr) Value: 6 vs. 0
  misc_feature: MA Experiment 20000179 PARAMETER Experiment Name: At_Germinating_Seeds_P Parameter: Tissue Value: Germinating Seeds
  misc_feature: MA Experiment ID: 20000182 Result: Down-regulated in Transcription
  misc_feature: MA Experiment 20000182 PARAMETER Experiment Name: At_2mM_SA_P Parameter: Age (day) Value: 14
  misc_feature: MA Experiment 20000182 PARAMETER Experiment Name: At_2mM_SA_P Parameter: Organism Value: A. thaliana
  misc_feature: MA Experiment 20000182 PARAMETER Experiment Name: At_2mM_SA_P Parameter: Plant Line Value: WS
  misc_feature: MA Experiment 20000182 PARAMETER Experiment Name: At_2mM_SA_P Parameter: Timepoint (hr) Value: 6
  misc_feature: MA Experiment 20000182 PARAMETER Experiment Name: At_2mM_SA_P Parameter: Tissue Value: Aerial
  misc_feature: MA Experiment 20000182 PARAMETER Experiment Name: At_2mM_SA_P Parameter: Treatment Value: 2mM SA vs. No Treatment
  misc_feature: MA Experiment ID: 20000185 Result: Up-regulated in Transcription
  misc_feature: MA Experiment 20000185 PARAMETER Experiment Name: At_Roots__P Parameter: Age (day) Value: 7 vs. 21
  misc_feature: MA Experiment 20000185 PARAMETER Experiment Name: At_Roots__P Parameter: Organism Value: A. thaliana
  misc_feature: MA Experiment 20000185 PARAMETER Experiment Name: At_Roots__P Parameter: Tissue Value: Roots vs. Whole Plant
  misc_feature: MA Experiment ID: 20000234 Result: Up-regulated in Transcription
  misc_feature: MA Experiment 20000234 PARAMETER Experiment Name: At_Siliques_P Parameter: Age (day) Value: 21
  misc_feature: MA Experiment 20000234 PARAMETER Experiment Name: At_Siliques_P Parameter: Organism Value: A. thaliana
  misc_feature: MA Experiment 20000234 PARAMETER Experiment Name: At_Siliques_P Parameter: Plant Line Value: WS
  misc_feature: MA Experiment 20000234 PARAMETER Experiment Name: At_Siliques_P Parameter: Tissue Value: Less Than 5mm Siliques vs. Whole Plant
  misc_feature: MA Experiment ID: 20000235 Result: Up-regulated in Transcription
  misc_feature: MA Experiment 20000235 PARAMETER Experiment Name: At_Siliques_P Parameter: Age (day) Value: 21
  misc_feature: MA Experiment 20000235 PARAMETER Experiment Name: At_Siliques_P Parameter: Organism Value: A. thaliana
  misc_feature: MA Experiment 20000235 PARAMETER Experiment Name: At_Siliques_P Parameter: Plant Line Value: WS
  misc_feature: MA Experiment 20000235 PARAMETER Experiment Name: At_Siliques_P Parameter: Tissue Value: 5-10mm Siliques vs. Whole Plant
  misc_feature: MA Experiment ID: 20000439 Result: Up-regulated in Transcription
  misc_feature: MA Experiment 20000439 PARAMETER Experiment Name: At_Roots__P Parameter: Age (day) Value: 14 vs. 21
  misc_feature: MA Experiment 20000439 PARAMETER Experiment Name: At_Roots__P Parameter: Organism Value: A. thaliana
  misc_feature: MA Experiment 20000439 PARAMETER Experiment Name: At_Roots__P Parameter: Tissue Value: Roots vs. Whole Plant
  misc_feature: MA Experiment ID: 20000443 Result: Down-regulated in Transcription
  misc_feature: MA Experiment 20000443 PARAMETER Experiment Name: At_1uM_BR-BRZ__P Parameter: Tissue Value: Shoot Apices
  misc_feature: MA Experiment 20000443 PARAMETER Experiment Name: At_1uM_BR-BRZ__P Parameter: Treatment Value: 1uM BRZ vs. No Treatment
  misc_feature: MA Experiment ID: 20000451 Result: Up-regulated in Transcription
  misc_feature: MA Experiment 20000451 PARAMETER Experiment Name: At_CS6879_Shoots-Roots_P Parameter: Age (day) Value: 14
  misc_feature: MA Experiment 20000451 PARAMETER Experiment Name: At_CS6879_Shoots-Roots_P Parameter: Organism Value: A. thaliana
  misc_feature: MA Experiment 20000451 PARAMETER Experiment Name: At_CS6879_Shoots-Roots_P Parameter: Plant Line Value: CS6879 vs. WS
  misc_feature: MA Experiment 20000451 PARAMETER Experiment Name: At_CS6879_Shoots-Roots_P Parameter: Tissue Value: Roots
  misc_feature: MA Experiment ID: 20000453 Result: Up-regulated in Transcription
  misc_feature: MA Experiment 20000453 PARAMETER Experiment Name: At_100uM_ABA_P Parameter: Age (day) Value: 15
  misc_feature: MA Experiment 20000453 PARAMETER Experiment Name: At_100uM_ABA_P Parameter: Organism Value: A. thaliana
  misc_feature: MA Experiment 20000453 PARAMETER Experiment Name: At_100uM_ABA_P Parameter: Plant Line Value: WS
  misc_feature: MA Experiment 20000453 PARAMETER Experiment Name: At_100uM_ABA_P Parameter: Timepoint (hr) Value: 24
  misc_feature: MA Experiment 20000453 PARAMETER Experiment Name: At_100uM_ABA_P Parameter: Tissue Value: Aerial
  misc_feature: MA Experiment 20000453 PARAMETER Experiment Name: At_100uM_ABA_P Parameter: Treatment Value: 100uM ABA vs. No Treatment
  misc_feature: MA Experiment ID: 20000460 Result: Down-regulated in Transcription
  misc_feature: MA Experiment 20000460 PARAMETER Experiment Name: At_10percent_PEG_P Parameter: Age (day) Value: 12
  misc_feature: MA Experiment 20000460 PARAMETER Experiment Name: At_10percent_PEG_P Parameter: Organism Value: A. thaliana
  misc_feature: MA Experiment 20000460 PARAMETER Experiment Name: At_10percent_PEG_P Parameter: Plant Line Value: WS
  misc_feature: MA Experiment 20000460 PARAMETER Experiment Name: At_10percent_PEG_P Parameter: Timepoint (day) Value: 12
  misc_feature: MA Experiment 20000460 PARAMETER Experiment Name: At_10percent_PEG_P Parameter: Tissue Value: Whole Plant
  misc_feature: MA Experiment 20000460 PARAMETER Experiment Name: At_10percent_PEG_P Parameter: Treatment Value: 10percent PEG vs. No Treatment
  misc_feature: MA Experiment ID: 20000527 Result: Down-regulated in Transcription
  misc_feature: MA Experiment 20000527 PARAMETER Experiment Name: At_10percent_PEG_P Parameter: Age (day) Value: 20
  misc_feature: MA Experiment 20000527 PARAMETER Experiment Name: At_10percent_PEG_P Parameter: Organism Value: A. thaliana
  misc_feature: MA Experiment 20000527 PARAMETER Experiment Name: At_10percent_PEG_P Parameter: Plant Line Value: WS
  misc_feature: MA Experiment 20000527 PARAMETER Experiment Name: At_10percent_PEG_P Parameter: Timepoint (day) Value: 20
  misc_feature: MA Experiment 20000527 PARAMETER Experiment Name: At_10percent_PEG_P Parameter: Tissue Value: Whole Plant
  misc_feature: MA Experiment 20000527 PARAMETER Experiment Name: At_10percent_PEG_P Parameter: Treatment Value: 10percent PEG vs. No Treatment
  misc_feature: MA Experiment ID: 20000573 Result: Down-regulated in Transcription
  misc_feature: MA Experiment 20000573 PARAMETER Experiment Name: At_100uM_ABA_Mutants__P Parameter: Organism Value: A. thaliana
  misc_feature: MA Experiment 20000573 PARAMETER Experiment Name: At_100uM_ABA_Mutants__P Parameter: Plant Line Value: CS22 vs. Ler wt
  misc_feature: MA Experiment 20000573 PARAMETER Experiment Name: At_100uM_ABA_Mutants__P Parameter: Timepoint (hr) Value: N/A
  misc_feature: MA Experiment 20000573 PARAMETER Experiment Name: At_100uM_ABA_Mutants__P Parameter: Tissue Value: Whole Plant
  misc_feature: MA Experiment 20000573 PARAMETER Experiment Name: At_100uM_ABA_Mutants__P Parameter: Treatment Value: None
  misc_feature: MA Experiment ID: 20000574 Result: Down-regulated in Transcription
  misc_feature: MA Experiment 20000574 PARAMETER Experiment Name: At_100uM_ABA_Mutants__P Parameter: Organism Value: A. thaliana
  misc_feature: MA Experiment 20000574 PARAMETER Experiment Name: At_100uM_ABA_Mutants__P Parameter: Plant Line Value: CS23 vs. Ler wt
  misc_feature: MA Experiment 20000574 PARAMETER Experiment Name: At_100uM_ABA_Mutants__P Parameter: Timepoint (hr) Value: N/A
  misc_feature: MA Experiment 20000574 PARAMETER Experiment Name: At_100uM_ABA_Mutants__P Parameter: Tissue Value: Whole Plant
  misc_feature: MA Experiment 20000574 PARAMETER Experiment Name: At_100uM_ABA_Mutants__P Parameter: Treatment Value: None
  misc_feature: MA Experiment ID: 20000606 Result: Up-regulated in Transcription
  misc_feature: MA Experiment 20000606 PARAMETER Experiment Name: At_CS8548_Mutant_P Parameter: Age (day) Value: 14
  misc_feature: MA Experiment 20000606 PARAMETER Experiment Name: At_CS8548_Mutant_P Parameter: Plant Line Value: CS8548 vs. wt
  misc_feature: MA Experiment 20000606 PARAMETER Experiment Name: At_CS8548_Mutant_P Parameter: Tissue Value: Whole Plant
  misc_feature: MA Experiment ID: 20001450 Result: Down-regulated in Transcription
  misc_feature: MA Experiment 20001450 PARAMETER Experiment Name: At_Far-red-induction_P Parameter: Age (day) Value: 7
  misc_feature: MA Experiment 20001450 PARAMETER Experiment Name: At_Far-red-induction_P Parameter: Light Value: Far-red vs. White
  misc_feature: MA Experiment 20001450 PARAMETER Experiment Name: At_Far-red-induction_P Parameter: Organism Value: A. thaliana
  misc_feature: MA Experiment 20001450 PARAMETER Experiment Name: At_Far-red-induction_P Parameter: Plant Line Value: Columbia
  misc_feature: MA Experiment 20001450 PARAMETER Experiment Name: At_Far-red-induction_P Parameter: Timepoint (hr) Value: 8
  misc_feature: MA Experiment 20001450 PARAMETER Experiment Name: At_Far-red-induction_P Parameter: Tissue Value: Whole Plant
  misc_feature: MA Experiment ID: 20001458 Result: Up-regulated in Transcription
  misc_feature: MA Experiment 20001458 PARAMETER Experiment Name: At_50mM_NH4NO3_L-to-H_P Parameter: Age (day) Value: Undefined
  misc_feature: MA Experiment 20001458 PARAMETER Experiment Name: At_50mM_NH4NO3_L-to-H_P Parameter: Organism Value: Undefined
  misc_feature: MA Experiment 20001458 PARAMETER Experiment Name: At_50mM_NH4NO3_L-to-H_P Parameter: Plant Line Value: Undefined
  misc_feature: MA Experiment 20001458 PARAMETER Experiment Name: At_50mM_NH4NO3_L-to-H_P Parameter: Timepoint (hr) Value: 2
  misc_feature: MA Experiment 20001458 PARAMETER Experiment Name: At_50mM_NH4NO3_L-to-H_P Parameter: Tissue Value: Siliques
  misc_feature: MA Experiment 20001458 PARAMETER Experiment Name: At_50mM_NH4NO3_L-to-H_P Parameter: Treatment Value: 50mM NH4NO3 vs. 100mM Manitol
  misc_feature: MA Experiment ID: 20001459 Result: Up-regulated in Transcription
  misc_feature: MA Experiment 20001459 PARAMETER Experiment Name: At_50mM_NH4NO3_L-to-H_P Parameter: Age (day) Value: Undefined
  misc_feature: MA Experiment 20001459 PARAMETER Experiment Name: At_50mM_NH4NO3_L-to-H_P Parameter: Organism Value: Undefined
  misc_feature: MA Experiment 20001459 PARAMETER Experiment Name: At_50mM_NH4NO3_L-to-H_P Parameter: Plant Line Value: Undefined
  misc_feature: MA Experiment 20001459 PARAMETER Experiment Name: At_50mM_NH4NO3_L-to-H_P Parameter: Timepoint (hr) Value: 4
  misc_feature: MA Experiment 20001459 PARAMETER Experiment Name: At_50mM_NH4NO3_L-to-H_P Parameter: Tissue Value: Siliques
  misc_feature: MA Experiment 20001459 PARAMETER Experiment Name: At_50mM_NH4NO3_L-to-H_P Parameter: Treatment Value: 50mM NH4NO3 vs. 100mM Manitol
  misc_feature: MA Experiment ID: 20001554 Result: Up-regulated in Transcription
  misc_feature: MA Experiment 20001554 PARAMETER Experiment Name: At_Drought_Soil_Dry_P Parameter: Age (day) Value: 21
  misc_feature: MA Experiment 20001554 PARAMETER Experiment Name: At_Drought_Soil_Dry_P Parameter: Organism Value: A. thaliana
  misc_feature: MA Experiment 20001554 PARAMETER Experiment Name: At_Drought_Soil_Dry_P Parameter: Plant Line Value: WS
  misc_feature: MA Experiment 20001554 PARAMETER Experiment Name: At_Drought_Soil_Dry_P Parameter: Post Timepoint (hr) Value: None
  misc_feature: MA Experiment 20001554 PARAMETER Experiment Name: At_Drought_Soil_Dry_P Parameter: Post-Treatment Value: None
  misc_feature: MA Experiment 20001554 PARAMETER Experiment Name: At_Drought_Soil_Dry_P Parameter: Timepoint (day) Value: 7
  misc_feature: MA Experiment 20001554 PARAMETER Experiment Name: At_Drought_Soil_Dry_P Parameter: Treatment Value: Drought vs. No Drought
  misc_feature: MA Experiment ID: 20001555 Result: Up-regulated in Transcription
  misc_feature: MA Experiment 20001555 PARAMETER Experiment Name: At_Drought_Soil_Dry_P Parameter: Age (day) Value: 24
  misc_feature: MA Experiment 20001555 PARAMETER Experiment Name: At_Drought_Soil_Dry_P Parameter: Organism Value: A. thaliana
  misc_feature: MA Experiment 20001555 PARAMETER Experiment Name: At_Drought_Soil_Dry_P Parameter: Plant Line Value: WS
  misc_feature: MA Experiment 20001555 PARAMETER Experiment Name: At_Drought_Soil_Dry_P Parameter: Post Timepoint (hr) Value: None
  misc_feature: MA Experiment 20001555 PARAMETER Experiment Name: At_Drought_Soil_Dry_P Parameter: Post-Treatment Value: None
  misc_feature: MA Experiment 20001555 PARAMETER Experiment Name: At_Drought_Soil_Dry_P Parameter: Timepoint (day) Value: 10
  misc_feature: MA Experiment 20001555 PARAMETER Experiment Name: At_Drought_Soil_Dry_P Parameter: Treatment Value: Drought vs. No Drought
  misc_feature: MA Experiment ID: 20001556 Result: Up-regulated in Transcription
  misc_feature: MA Experiment 20001556 PARAMETER Experiment Name: At_Drought_Soil_Dry_P Parameter: Age (day) Value: 26
  misc_feature: MA Experiment 20001556 PARAMETER Experiment Name: At_Drought_Soil_Dry_P Parameter: Organism Value: A. thaliana
  misc_feature: MA Experiment 20001556 PARAMETER Experiment Name: At_Drought_Soil_Dry_P Parameter: Plant Line Value: WS
  misc_feature: MA Experiment 20001556 PARAMETER Experiment Name: At_Drought_Soil_Dry_P Parameter: Post Timepoint (hr) Value: None
  misc_feature: MA Experiment 20001556 PARAMETER Experiment Name: At_Drought_Soil_Dry_P Parameter: Post-Treatment Value: None
  misc_feature: MA Experiment 20001556 PARAMETER Experiment Name: At_Drought_Soil_Dry_P Parameter: Timepoint (day) Value: 12
  misc_feature: MA Experiment 20001556 PARAMETER Experiment Name: At_Drought_Soil_Dry_P Parameter: Treatment Value: Drought vs. No Drought
  misc_feature: MA Experiment ID: 20001558 Result: Down-regulated in Transcription
  misc_feature: MA Experiment 20001558 PARAMETER Experiment Name: At_Drought_Soil_Dry_P Parameter: Age (day) Value: 27
  misc_feature: MA Experiment 20001558 PARAMETER Experiment Name: At_Drought_Soil_Dry_P Parameter: Organism Value: A. thaliana
  misc_feature: MA Experiment 20001558 PARAMETER Experiment Name: At_Drought_Soil_Dry_P Parameter: Plant Line Value: WS
  misc_feature: MA Experiment 20001558 PARAMETER Experiment Name: At_Drought_Soil_Dry_P Parameter: Post Timepoint (hr) Value: 6
  misc_feature: MA Experiment 20001558 PARAMETER Experiment Name: At_Drought_Soil_Dry_P Parameter: Post-Treatment Value: Re-Water vs. No Drought
  misc_feature: MA Experiment 20001558 PARAMETER Experiment Name: At_Drought_Soil_Dry_P Parameter: Timepoint (day) Value: 13
  misc_feature: MA Experiment 20001558 PARAMETER Experiment Name: At_Drought_Soil_Dry_P Parameter: Treatment Value: Drought vs. No Drought
  misc_feature: MA Experiment ID: 20001559 Result: Up-regulated in Transcription
  misc_feature: MA Experiment 20001559 PARAMETER Experiment Name: At_Drought_Soil_Dry_P Parameter: Age (day) Value: 28
  misc_feature: MA Experiment 20001559 PARAMETER Experiment Name: At_Drought_Soil_Dry_P Parameter: Organism Value: A. thaliana
  misc_feature: MA Experiment 20001559 PARAMETER Experiment Name: At_Drought_Soil_Dry_P Parameter: Plant Line Value: WS
  misc_feature: MA Experiment 20001559 PARAMETER Experiment Name: At_Drought_Soil_Dry_P Parameter: Post Timepoint (hr) Value: 29
  misc_feature: MA Experiment 20001559 PARAMETER Experiment Name: At_Drought_Soil_Dry_P Parameter: Post-Treatment Value: Re-Water vs. No Drought
  misc_feature: MA Experiment 20001559 PARAMETER Experiment Name: At_Drought_Soil_Dry_P Parameter: Timepoint (day) Value: 14
  misc_feature: MA Experiment 20001559 PARAMETER Experiment Name: At_Drought_Soil_Dry_P Parameter: Treatment Value: Drought vs. No Drought
  misc_feature: MA Experiment ID: 20001560 Result: Down-regulated in Transcription
  misc_feature: MA Experiment 20001560 PARAMETER Experiment Name: At_Drought_Soil_Dry_P Parameter: Age (day) Value: 28
  misc_feature: MA Experiment 20001560 PARAMETER Experiment Name: At_Drought_Soil_Dry_P Parameter: Organism Value: A. thaliana
  misc_feature: MA Experiment 20001560 PARAMETER Experiment Name: At_Drought_Soil_Dry_P Parameter: Plant Line Value: WS
  misc_feature: MA Experiment 20001560 PARAMETER Experiment Name: At_Drought_Soil_Dry_P Parameter: Post Timepoint (hr) Value: None
  misc_feature: MA Experiment 20001560 PARAMETER Experiment Name: At_Drought_Soil_Dry_P Parameter: Post-Treatment Value: None
  misc_feature: MA Experiment 20001560 PARAMETER Experiment Name: At_Drought_Soil_Dry_P Parameter: Timepoint (day) Value: 14
  misc_feature: MA Experiment 20001560 PARAMETER Experiment Name: At_Drought_Soil_Dry_P Parameter: Treatment Value: Drought vs. No Drought
  misc_feature: MA Experiment ID: 20001756 Result: Up-regulated in Transcription
  misc_feature: MA Experiment 20001756 PARAMETER Experiment Name: At_50mM_NH4NO3_L-to-H_P Parameter: Timepoint (hr) Value: 4
  misc_feature: MA Experiment 20001756 PARAMETER Experiment Name: At_50mM_NH4NO3_L-to-H_P Parameter: Tissue Value: Leaf
  misc_feature: MA Experiment 20001756 PARAMETER Experiment Name: At_50mM_NH4NO3_L-to-H_P Parameter: Treatment Value: 50mM NH4NO3 vs 100mM Mannitol
  misc_feature: MA Experiment ID: 20001761 Result: Up-regulated in Transcription
  misc_feature: MA Experiment 20001761 PARAMETER Experiment Name: At_50mM_NH4NO3_L-to-H_P Parameter: Timepoint (hr) Value: 4
  misc_feature: MA Experiment 20001761 PARAMETER Experiment Name: At_50mM_NH4NO3_L-to-H_P Parameter: Tissue Value: Siliques
  misc_feature: MA Experiment 20001761 PARAMETER Experiment Name: At_50mM_NH4NO3_L-to-H_P Parameter: Treatment Value: 50mM NH4NO3 vs 100mM Mannitol
  misc_feature: MA Experiment ID: 20001771 Result: Up-regulated in Transcription
  misc_feature: MA Experiment 20001771 PARAMETER Experiment Name: At_Far-red-enriched-adult_P Parameter: Age (day) Value: 28
  misc_feature: MA Experiment 20001771 PARAMETER Experiment Name: At_Far-red-enriched-adult_P Parameter: Light Value: Far-red enriched vs. White
  misc_feature: MA Experiment 20001771 PARAMETER Experiment Name: At_Far-red-enriched-adult_P Parameter: Organism Value: A. thaliana
  misc_feature: MA Experiment 20001771 PARAMETER Experiment Name: At_Far-red-enriched-adult_P Parameter: Plant Line Value: Columbia
  misc_feature: MA Experiment 20001771 PARAMETER Experiment Name: At_Far-red-enriched-adult_P Parameter: Timepoint (hr) Value: 16
  misc_feature: MA Experiment 20001771 PARAMETER Experiment Name: At_Far-red-enriched-adult_P Parameter: Tissue Value: Aerial
  misc_feature: MA Experiment ID: 20001906 Result: Up-regulated in Transcription
  misc_feature: MA Experiment 20001906 PARAMETER Experiment Name: At_Drought_Reproduction_P Parameter: Age (day) Value: 35
  misc_feature: MA Experiment 20001906 PARAMETER Experiment Name: At_Drought_Reproduction_P Parameter: Organism Value: A. thaliana
  misc_feature: MA Experiment 20001906 PARAMETER Experiment Name: At_Drought_Reproduction_P Parameter: Plant Line Value: WS
  misc_feature: MA Experiment 20001906 PARAMETER Experiment Name: At_Drought_Reproduction_P Parameter: Timepoint (day) Value: 5
  misc_feature: MA Experiment 20001906 PARAMETER Experiment Name: At_Drought_Reproduction_P Parameter: Tissue Value: Siliques
  misc_feature: MA Experiment 20001906 PARAMETER Experiment Name: At_Drought_Reproduction_P Parameter: Treatment Value: Drought vs. No Drought
  misc_feature: MA Experiment ID: 20001911 Result: Down-regulated in Transcription
  misc_feature: MA Experiment 20001911 PARAMETER Experiment Name: At_Drought_Reproduction_P Parameter: Age (day) Value: 40
  misc_feature: MA Experiment 20001911 PARAMETER Experiment Name: At_Drought_Reproduction_P Parameter: Organism Value: A. thaliana
  misc_feature: MA Experiment 20001911 PARAMETER Experiment Name: At_Drought_Reproduction_P Parameter: Plant Line Value: WS
  misc_feature: MA Experiment 20001911 PARAMETER Experiment Name: At_Drought_Reproduction_P Parameter: Timepoint (day) Value: 10
  misc_feature: MA Experiment 20001911 PARAMETER Experiment Name: At_Drought_Reproduction_P Parameter: Tissue Value: Flowers
  misc_feature: MA Experiment 20001911 PARAMETER Experiment Name: At_Drought_Reproduction_P Parameter: Treatment Value: Drought vs. No Drought
atggagagaagcttgaagaagacgaagaacaattataacaactccataaagagcaatcttatgaaagatgatgaattgtttcatgtgattcacaaagttccctgtggagacactccttatgtcagagccaaacatgctcagttgatagagaagaacccggagatggcaatagtgtggttttggaaagccatcaacactggagacagagtagacagtgccctcaaggacatggctgttgtaatgaaacaacttgaccgttctgaagaagctattgaagctatcaaatctttccgtcctcgttgttccaagaattcccaagattcccttgacaatgtcctcatcgacttatacaagaaatgtgggagaatggaggagcaagttgagttgttgaagaggaaattaaggcagatctatcaaggagaagctttcaatggtaaacctaccaaaaccgctcgctcccacggaaaaaagtttcaagtgactgttcaacaagaaatctcaagattactgggtaacttggggtgggcatatatgcaacaagccaagtacttatcggccgaagcggtatacagaaaagcccagatggttgagccagatgctaacaaatcgtgcaaccttgcgatgtgccttatcaaacaaggcaggtttgaggagggaagattggttcttgacgatgttctcgagtatagggttttgggtgcggatgattgtagaacaaggcaacgggccgaagagcttctgagtgaattagagtcttcgctgccacggatgcgagatgctgagatggaggatgtcttgggaaatatcttagacgatgactttgttcttgggcttgaagagatgacatccactagttttaaatctaagagactcccaatcttcgaacagatctcgtcttttagaaatacattagtttgctag

SEQ ID NO: 71121 - protein, 306 aa, Arabidopsis thaliana
  peptide (1)..(306): Ceres Seq. ID no. 3061895
  misc_feature (167)..(200): Pfam Name: TPR Domain Pfam Description: TPR Domain
  misc_feature (1)..(306): Homolog of NCBI NO: 9758884 NR Description: gb|AAC72543.1~gene_id:K24G6.19~similar to unknown
  misc_feature (1)..(306): Homolog of NCBI NO: 30695554 NR Description: male sterility MS5 family [Arabidopsis thaliana] unknown protein [Arabidopsis thaliana]
  misc_feature (25)..(306): Homolog of NCBI NO: 3859116 NR Description: unknown [Oryza sativa]
  misc_feature (27)..(306): Homolog of NCBI NO: 25406811 NR Description: hypothetical protein [imported] - Arabidopsis
  misc_feature (27)..(306): Homolog of NCBI NO: 30678993 NR Description: male sterility MS5 family [Arabidopsis thaliana] unknown protein [Arabidopsis thaliana]
  misc_feature (25)..(256): Homolog of NCBI NO: 15230439 NR Description: MS5-like protein; protein id: At3g51280.1
  misc_feature (27)..(255): Homolog of NCBI NO: 3859112 NR Description: male sterility MS5 [Arabidopsis thaliana]
  misc_feature (27)..(255): Homolog of NCBI NO: 4028970 NR Description: pollenless3 [Arabidopsis thaliana]
  misc_feature (37)..(252): Homolog of NCBI NO: 29467532 NR Description: P0582D05.25 [Oryza sativa (japonica
  misc_feature (27)..(226): Homolog of NCBI NO: 15233432 NR Description: putative protein; protein id: At4g20900.1
MERSLKKTKNNYNNSIKSNLMKDDELFHVIHKVPCGDTPYVRAKHAQLIEKNPEMAIVWFWKAINTGDRVDSALKDMAVVMKQLDRSEEAIEAIKSFRPRCSKNSQDSLDNVLIDLYKKCGRMEEQVELLKRKLRQIYQGEAFNGKPTKTARSHGKKFQVTVQQEISRLLGNLGWAYMQQAKYLSAEAVYRKAQMVEPDANKSCNLAMCLIKQGRFEEGRLVLDDVLEYRVLGADDCRTRQRAEELLSELESSLPRMRDAEMEDVLGNILDDDFVLGLEEMTSTSFKSKRLPIFEQISSFRNTLVC

SEQ ID NO: 71122 - protein, 286 aa, Arabidopsis thaliana
  peptide (1)..(286): Ceres Seq. ID no. 3061896
  misc_feature (147)..(180): Pfam Name: TPR Domain Pfam Description: TPR Domain
  misc_feature (7)..(286): Homolog of NCBI NO: 30678993 NR Description: male sterility MS5 family [Arabidopsis thaliana] unknown protein [Arabidopsis thaliana]
  misc_feature (5)..(236): Homolog of NCBI NO: 15230439 NR Description: MS5-like protein; protein id: At3g51280.1
  misc_feature (7)..(235): Homolog of NCBI NO: 3859112 NR Description: male sterility MS5 [Arabidopsis thaliana]
  misc_feature (1)..(286): Homolog of NCBI NO: 9758884 NR Description: gb|AAC72543.1~gene_id:K24G6.19~similar to unknown
  misc_feature (5)..(286): Homolog of NCBI NO: 3859116 NR Description: unknown [Oryza sativa]
  misc_feature (7)..(286): Homolog of NCBI NO: 25406811 NR Description: hypothetical protein [imported] - Arabidopsis
  misc_feature (1)..(286): Homolog of NCBI NO: 30695554 NR Description: male sterility MS5 family [Arabidopsis thaliana] unknown protein [Arabidopsis thaliana]
  misc_feature (7)..(235): Homolog of NCBI NO: 4028970 NR Description: pollenless3 [Arabidopsis thaliana]
  misc_feature (17)..(232): Homolog of NCBI NO: 29467532 NR Description: P0582D05.25 [Oryza sativa (japonica
  misc_feature (7)..(206): Homolog of NCBI NO: 15233432 NR Description: putative protein; protein id: At4g20900.1
MKDDELFHVIHKVPCGDTPYVRAKHAQLIEKNPEMAIVWFWKAINTGDRVDSALKDMAVVMKQLDRSEEAIEAIKSFRPRCSKNSQDSLDNVLIDLYKKCGRMEEQVELLKRKLRQIYQGEAFNGKPTKTARSHGKKFQVTVQQEISRLLGNLGWAYMQQAKYLSAEAVYRKAQMVEPDANKSCNLAMCLIKQGRFEEGRLVLDDVLEYRVLGADDCRTRQRAEELLSELESSLPRMRDAEMEDVLGNILDDDFVLGLEEMTSTSFKSKRLPIFEQISSFRNTLVC

SEQ ID NO: 71123 - protein, 252 aa, Arabidopsis thaliana
  peptide (1)..(252): Ceres Seq. ID no. 3061897
  misc_feature (113)..(146): Pfam Name: TPR Domain Pfam Description: TPR Domain
  misc_feature (1)..(252): Homolog of NCBI NO: 9758884 NR Description: gb|AAC72543.1~gene_id:K24G6.19~similar to unknown
  misc_feature (1)..(252): Homolog of NCBI NO: 30695554 NR Description: male sterility MS5 family [Arabidopsis thaliana] unknown protein [Arabidopsis thaliana]
  misc_feature (1)..(252): Homolog of NCBI NO: 3859116 NR Description: unknown [Oryza sativa]
  misc_feature (1)..(252): Homolog of NCBI NO: 25406811 NR Description: hypothetical protein [imported] - Arabidopsis
  misc_feature (1)..(252): Homolog of NCBI NO: 30678993 NR Description: male sterility MS5 family [Arabidopsis thaliana] unknown protein [Arabidopsis thaliana]
  misc_feature (1)..(202): Homolog of NCBI NO: 15230439 NR Description: MS5-like protein; protein id: At3g51280.1
  misc_feature (1)..(201): Homolog of NCBI NO: 3859112 NR Description: male sterility MS5 [Arabidopsis thaliana]
  misc_feature (1)..(201): Homolog of NCBI NO: 4028970 NR Description: pollenless3 [Arabidopsis thaliana]
  misc_feature (1)..(198): Homolog of NCBI NO: 29467532 NR Description: P0582D05.25 [Oryza sativa (japonica
  misc_feature (1)..(172): Homolog of NCBI NO: 15233432 NR Description: putative protein; protein id: At4g20900.1
MAIVWFWKAINTGDRVDSALKDMAVVMKQLDRSEEAIEAIKSFRPRCSKNSQDSLDNVLIDLYKKCGRMEEQVELLKRKLRQIYQGEAFNGKPTKTARSHGKKFQVTVQQEISRLLGNLGWAYMQQAKYLSAEAVYRKAQMVEPDANKSCNLAMCLIKQGRFEEGRLVLDDVLEYRVLGADDCRTRQRAEELLSELESSLPRMRDAEMEDVLGNILDDDFVLGLEEMTSTSFKSKRLPIFEQISSFRNTLVC

SEQ ID NO: 71124 - DNA, 1980 bp, Arabidopsis thaliana
  misc_feature (1)..(1980): Ceres Seq. ID no. 3063784
  misc_feature: MA Experiment ID: 20000307 Result: Down-regulated in Transcription
  misc_feature: MA Experiment 20000307 PARAMETER Experiment Name: At_Germinating_Seeds_Sub_P Parameter: Age (hr) Value: 24 vs. 0
  misc_feature: MA Experiment 20000307 PARAMETER Experiment Name: At_Germinating_Seeds_Sub_P Parameter: Organism Value: A. thaliana
  misc_feature: MA Experiment 20000307 PARAMETER Experiment Name: At_Germinating_Seeds_Sub_P Parameter: Plant Line Value: WS
  misc_feature: MA Experiment 20000307 PARAMETER Experiment Name: At_Germinating_Seeds_Sub_P Parameter: Tissue Value: Germinating Seeds
atgaaggttcggagtaaaaaagcactgttttgttccgtctctcgtcttctccacacggagagacacacagagagacaaaacctaacaacgctgttcaacagatatgtcgacaaaacagatgttttctcatggaactctgtcatcgccgacctcgctcgtagcggtgattctgctgaagctcttctcgctttttcctcaatgcggaagctttctctatacccaactcgctctagctttccttgcgccattaaagcatgttcgtctctttttgatatcttctccggcaaacagacccatcagcaagcttttgtcttcggttatcaatccgacatctttgtgtcttcggctttgatcgttatgtattcaacttgtgggaaactggaggatgcacggaaagtgttcgacgaaattcccaagagaaatattgtatcttggacttcgatgattcgagggtatgatcttaacggtaatgcccttgatgctgtttctcttttcaaggatctattggtcgatgaaaatgatgatgacgatgcaatgtttcttgattctatgggtttggtttcggtaatctctgcttgttctcgtgttcctgctaagggtttaacggaatctattcatagctttgtgattaagagaggttttgatagaggagtgagtgttggtaatactcttttggatgcttatgctaagggtggagaaggaggtgttgctgtggcgagaaaaatctttgatcagattgtggataaggatcgtgtttcgtataattcgattatgagtgtgtatgctcagagtgggatgtctaatgaggcttttgaggtttttcgtagacttgttaagaataaagttgtgacctttaacgccattacattgtctactgtgttgttggcggtctcgcattcaggtgctctgcgtattggaaagtgtatacatgatcaggtaataaggatgggtcttgaggatgatgtgatagtggggacgtcgataattgatatgtattgcaaatgcggaagagttgagacggcgagaaaagcatttgatcgaatgaaaaacaagaatgttaggtcgtggaccgccatgattgctggatatggaatgcacggccacgcggctaaagcgttagagttattccctgctatgatcgattcaggggttcgaccaaattacattacttttgtatcagtgttagctgcttgcagtcatgcgggtcttcatgtggaaggctggcgctggtttaacgcaatgaaggggagatttggtgtggaaccagggttagaacactacggttgtatggttgatcttctaggtagagctgggtttcttcagaaagcttatgatttgattcagagaatgaagatgaagccggactctatcatctggagctcacttcttgcagcttgtagaattcacaagaacgtggagctagctgagatatccgtggcgcgtttgtttgaattggactcttcgaattgcggttactacatgctgctttcgcatatctacgctgatgcgggtcgttggaaagatgttgagagggtgagaatgatcatgaagaatcgcggattggtgaaaccgccaggttttagtctactcgagttgaatggtgaggttcatgtgttcttgatcggagacgaagagcatcctcagcgtgagaagatttacgagtttttagcagaactgaacaggaagctgttagaggcaggttacgtatcgaacacgtcatctgtatgtcatgatgttgatgaggaagagaaagagatgacactgagagttcacagcgagaaactagcgattgcgtttgggatcatgaacacggttcctggctcgacggttaatgtggtcaagaatctgagagtttgcagcgattgtcacaatgtgatcaagttgatttcaaagattgttgatagagagtttgtggttagagatgcgaagaggtttcaccatttcaaagatggtggatgttcctgtggagattactggtga

SEQ ID NO: 71125 - protein, 659 aa, Arabidopsis thaliana
  peptide (1)..(659): Ceres Seq. ID no. 3063785
  misc_feature (389)..(423): Pfam Name: PPR repeat Pfam Description: PPR repeat
  misc_feature (23)..(659): Homolog of NCBI NO: 34394298 NR Description: putative pentatricopeptide (PPR)
  misc_feature (16)..(659): Homolog of NCBI NO: 18418348 NR Description: putative protein; protein id: At4g33990.1
  misc_feature (31)..(659): Homolog of NCBI NO: 15234831 NR Description: putative protein; protein id: At4g30700.1
  misc_feature (38)..(659): Homolog of NCBI NO: 11994419 NR Description: selenium-binding protein-like [Arabidopsis
  misc_feature (40)..(659): Homolog of NCBI NO: 11281371 NR Description: hypothetical protein T8H10.30 - Arabidopsis >gi|6706414|emb|CAB66100.1| putative protein [Arabidopsis
  misc_feature (40)..(659): Homolog of NCBI NO: 30694644 NR Description: pentatricopeptide (PPR) repeat-containing protein
  misc_feature (40)..(659): Homolog of NCBI NO: 30794008 NR Description: unknown protein [Arabidopsis thaliana]
  misc_feature (31)..(659): Homolog of NCBI NO: 34897884 NR Description: Similar to Arabidopsis thaliana DNA chromosome 4,
  misc_feature (38)..(658): Homolog of NCBI NO: 15230593 NR Description: unknown protein; protein id: At3g12770.1
  misc_feature (31)..(659): Homolog of NCBI NO: 15220337 NR Description: hypothetical protein; protein id: At1g11290.1
MKVRSKKALFCSVSRLLHTERHTERQNLTTLFNRYVDKTDVFSWNSVIADLARSGDSAEALLAFSSMRKLSLYPTRSSFPCAIKACSSLFDIFSGKQTHQQAFVFGYQSDIFVSSALIVMYSTCGKLEDARKVFDEIPKRNIVSWTSMIRGYDLNGNALDAVSLFKDLLVDENDDDDAMFLDSMGLVSVISACSRVPAKGLTESIHSFVIKRGFDRGVSVGNTLLDAYAKGGEGGVAVARKIFDQIVDKDRVSYNSIMSVYAQSGMSNEAFEVFRRLVKNKVVTFNAITLSTVLLAVSHSGALRIGKCIHDQVIRMGLEDDVIVGTSIIDMYCKCGRVETARKAFDRMKNKNVRSWTAMIAGYGMHGHAAKALELFPAMIDSGVRPNYITFVSVLAACSHAGLHVEGWRWFNAMKGRFGVEPGLEHYGCMVDLLGRAGFLQKAYDLIQRMKMKPDSIIWSSLLAACRIHKNVELAEISVARLFELDSSNCGYYMLLSHIYADAGRWKDVERVRMIMKNRGLVKPPGFSLLELNGEVHVFLIGDEEHPQREKIYEFLAELNRKLLEAGYVSNTSSVCHDVDEEEKEMTLRVHSEKLAIAFGIMNTVPGSTVNVVKNLRVCSDCHNVIKLISKIVDREFVVRDAKRFHHFKDGGCSCGDYW

SEQ ID NO: 71126 - protein, 593 aa, Arabidopsis thaliana
  peptide (1)..(593): Ceres Seq. ID no. 3063786
  misc_feature (323)..(357): Pfam Name: PPR repeat Pfam Description: PPR repeat
  misc_feature (1)..(593): Homolog of NCBI NO: 34394298 NR Description: putative pentatricopeptide (PPR)
  misc_feature (1)..(593): Homolog of NCBI NO: 18418348 NR Description: putative protein; protein id: At4g33990.1
  misc_feature (1)..(593): Homolog of NCBI NO: 15234831 NR Description: putative protein; protein id: At4g30700.1
  misc_feature (1)..(593): Homolog of NCBI NO: 11994419 NR Description: selenium-binding protein-like [Arabidopsis
  misc_feature (1)..(593): Homolog of NCBI NO: 11281371 NR Description: hypothetical protein T8H10.30 - Arabidopsis >gi|6706414|emb|CAB66100.1| putative protein [Arabidopsis
  misc_feature (1)..(593): Homolog of NCBI NO: 30694644 NR Description: pentatricopeptide (PPR) repeat-containing protein
  misc_feature (1)..(593): Homolog of NCBI NO: 30794008 NR Description: unknown protein [Arabidopsis thaliana]
  misc_feature (1)..(593): Homolog of NCBI NO: 34897884 NR Description: Similar to Arabidopsis thaliana DNA chromosome 4,
  misc_feature (1)..(592): Homolog of NCBI NO: 15230593 NR Description: unknown protein; protein id: At3g12770.1
  misc_feature (1)..(593): Homolog of NCBI NO: 15220337 NR Description: hypothetical protein; protein id: At1g11290.1
MRKLSLYPTRSSFPCAIKACSSLFDIFSGKQTHQQAFVFGYQSDIFVSSALIVMYSTCGKLEDARKVFDEIPKRNIVSWTSMIRGYDLNGNALDAVSLFKDLLVDENDDDDAMFLDSMGLVSVISACSRVPAKGLTESIHSFVIKRGFDRGVSVGNTLLDAYAKGGEGGVAVARKIFDQIVDKDRVSYNSIMSVYAQSGMSNEAFEVFRRLVKNKVVTFNAITLSTVLLAVSHSGALRIGKCIHDQVIRMGLEDDVIVGTSIIDMYCKCGRVETARKAFDRMKNKNVRSWTAMIAGYGMHGHAAKALELFPAMIDSGVRPNYITFVSVLAACSHAGLHVEGWRWFNAMKGRFGVEPGLEHYGCMVDLLGRAGFLQKAYDLIQRMKMKPDSIIWSSLLAACRIHKNVELAEISVARLFELDSSNCGYYMLLSHIYADAGRWKDVERVRMIMKNRGLVKPPGFSLLELNGEVHVFLIGDEEHPQREKIYEFLAELNRKLLEAGYVSNTSSVCHDVDEEEKEMTLRVHSEKLAIAFGIMNTVPGSTVNVVKNLRVCSDCHNVIKLISKIVDREFVVRDAKRFHHFKDGGCSCGDYW

SEQ ID NO: 71127 - protein, 540 aa, Arabidopsis thaliana
  peptide (1)..(540): Ceres Seq. ID no. 3063787
  misc_feature (270)..(304): Pfam Name: PPR repeat Pfam Description: PPR repeat
  misc_feature (1)..(540): Homolog of NCBI NO: 34394298 NR Description: putative pentatricopeptide (PPR)
  misc_feature (1)..(540): Homolog of NCBI NO: 18418348 NR Description: putative protein; protein id: At4g33990.1
  misc_feature (1)..(540): Homolog of NCBI NO: 15234831 NR Description: putative protein; protein id: At4g30700.1
  misc_feature (1)..(540): Homolog of NCBI NO: 11994419 NR Description: selenium-binding protein-like [Arabidopsis
  misc_feature (1)..(540): Homolog of NCBI NO: 11281371 NR Description: hypothetical protein T8H10.30 - Arabidopsis >gi|6706414|emb|CAB66100.1| putative protein [Arabidopsis
  misc_feature (1)..(540): Homolog of NCBI NO: 30694644 NR Description: pentatricopeptide (PPR) repeat-containing protein
  misc_feature (1)..(540): Homolog of NCBI NO: 30794008 NR Description: unknown protein [Arabidopsis thaliana]
  misc_feature (1)..(540): Homolog of NCBI NO: 34897884 NR Description: Similar to Arabidopsis thaliana DNA chromosome 4,
  misc_feature (1)..(539): Homolog of NCBI NO: 15230593 NR Description: unknown protein; protein id: At3g12770.1
  misc_feature (1)..(540): Homolog of NCBI NO: 15220337 NR Description: hypothetical protein; protein id: At1g11290.1
MYSTCGKLEDARKVFDEIPKRNIVSWTSMIRGYDLNGNALDAVSLFKDLLVDENDDDDAMFLDSMGLVSVISACSRVPAKGLTESIHSFVIKRGFDRGVSVGNTLLDAYAKGGEGGVAVARKIFDQIVDKDRVSYNSIMSVYAQSGMSNEAFEVFRRLVKNKVVTFNAITLSTVLLAVSHSGALRIGKCIHDQVIRMGLEDDVIVGTSIIDMYCKCGRVETARKAFDRMKNKNVRSWTAMIAGYGMHGHAAKALELFPAMIDSGVRPNYITFVSVLAACSHAGLHVEGWRWFNAMKGRFGVEPGLEHYGCMVDLLGRAGFLQKAYDLIQRMKMKPDSIIWSSLLAACRIHKNVELAEISVARLFELDSSNCGYYMLLSHIYADAGRWKDVERVRMIMKNRGLVKPPGFSLLELNGEVHVFLIGDEEHPQREKIYEFLAELNRKLLEAGYVSNTSSVCHDVDEEEKEMTLRVHSEKLAIAFGIMNTVPGSTVNVVKNLRVCSDCHNVIKLISKIVDREFVVRDAKRFHHFKDGGCSCGDYW

SEQ ID NO: 71128 - DNA, 1200 bp, Arabidopsis thaliana
  misc_feature (1)..(1200): Ceres Seq. ID no. 3063788
  misc_feature: MA Experiment ID: 20000227 Result: Up-regulated in Transcription
  misc_feature: MA Experiment 20000227 PARAMETER Experiment Name: At_Root-Tips-vs-Tops_P Parameter: Tissue Value: Root Tips vs. Root Tops
  misc_feature: MA Experiment ID: 20000794 Result: Down-regulated in Transcription
  misc_feature: MA Experiment 20000794 PARAMETER Experiment Name: At_Petals_P Parameter: Age (day) Value: 23-25 days
  misc_feature: MA Experiment 20000794 PARAMETER Experiment Name: At_Petals_P Parameter: Plant Line Value: WS
  misc_feature: MA Experiment 20000794 PARAMETER Experiment Name: At_Petals_P Parameter: Tissue Value: Petals vs. Whole plant
  misc_feature: MA Experiment ID: 20001451 Result: Down-regulated in Transcription
  misc_feature: MA Experiment 20001451 PARAMETER Experiment Name: At_Far-red-induction_P Parameter: Age (day) Value: 7
  misc_feature: MA Experiment 20001451 PARAMETER Experiment Name: At_Far-red-induction_P Parameter: Light Value: Far-red vs. White
  misc_feature: MA Experiment 20001451 PARAMETER Experiment Name: At_Far-red-induction_P Parameter: Organism Value: A. thaliana
  misc_feature: MA Experiment 20001451 PARAMETER Experiment Name: At_Far-red-induction_P Parameter: Plant Line Value: Columbia
  misc_feature: MA Experiment 20001451 PARAMETER Experiment Name: At_Far-red-induction_P Parameter: Timepoint (hr) Value: 24
  misc_feature: MA Experiment 20001451 PARAMETER Experiment Name: At_Far-red-induction_P Parameter: Tissue Value: Whole Plant
  misc_feature: MA Experiment ID: 20001905 Result: Down-regulated in Transcription
  misc_feature: MA Experiment 20001905 PARAMETER Experiment Name: At_Drought_Reproduction_P Parameter: Age (day) Value: 40
  misc_feature: MA Experiment 20001905 PARAMETER Experiment Name: At_Drought_Reproduction_P Parameter: Organism Value: A. thaliana
  misc_feature: MA Experiment 20001905 PARAMETER Experiment Name: At_Drought_Reproduction_P Parameter: Plant Line Value: WS
  misc_feature: MA Experiment 20001905 PARAMETER Experiment Name: At_Drought_Reproduction_P Parameter: Timepoint (day) Value: 10
  misc_feature: MA Experiment 20001905 PARAMETER Experiment Name: At_Drought_Reproduction_P Parameter: Tissue Value: Rosettes
  misc_feature: MA Experiment 20001905 PARAMETER Experiment Name: At_Drought_Reproduction_P Parameter: Treatment Value: Drought vs. No Drought
  misc_feature: MA Experiment ID: 20001911 Result: Down-regulated in Transcription
  misc_feature: MA Experiment 20001911 PARAMETER Experiment Name: At_Drought_Reproduction_P Parameter: Age (day) Value: 40
  misc_feature: MA Experiment 20001911 PARAMETER Experiment Name: At_Drought_Reproduction_P Parameter: Organism Value: A. thaliana
  misc_feature: MA Experiment 20001911 PARAMETER Experiment Name: At_Drought_Reproduction_P Parameter: Plant Line Value: WS
  misc_feature: MA Experiment 20001911 PARAMETER Experiment Name: At_Drought_Reproduction_P Parameter: Timepoint (day) Value: 10
  misc_feature: MA Experiment 20001911 PARAMETER Experiment Name: At_Drought_Reproduction_P Parameter: Tissue Value: Flowers
  misc_feature: MA Experiment 20001911 PARAMETER Experiment Name: At_Drought_Reproduction_P Parameter: Treatment Value: Drought vs. No Drought
atgggttcttcacaatctacgcaaatggaagacgaagaagaagaagaagaggaaactgacaatgaagaagaagaagaagaagataatggcagatcaaacacaagacaattagacaatctcctagtaaagaaagttctagaacaagagcctgagatgttaccatgtcacgcttcagcttcaccactctcaccacaactatcatctctcggtactccaaggcttggaccatcgattaaagtctgggatccttacaacgtcctctctccgccgccgcaaccgccgtctatcttctctcgaatcgtgtctggtgatgaagatcgagctgtgacagaggtttatctgattagccatggtgagtctgatcttaatcttaaacctgatttgattggtgggagatgtcatgtagctgctcttactgctaatggtaaacgtcaagctagggctcttgctgttttcttcaaatctcaaggtgttcggtttaattcggtttattcgtcacctctagatcgagctagatccatggctgtttctgtttgtcaggaaatgagttttccggaggagcatgtacaatcttcggatgctgttattgagatgagtttaggggattgggaaggctgtaatcaagcagagatttatagtcctgaaactttgagtttgattgaaaggtgccaacctgatttcacagctccatctggagaatcactgaggcaagtagagtttcgaatggttcagtttctaaacgggacagtctcaggagttgcagagaagcttaggtcagattattcttccactacgaatcacaatgaaactcatgagcgtgatggtggtgtgtcacttgcttcgactaactgggacttactacacaagcatcgtcccagtcttacaaggaagaaatctggtaaaagcaggcttcaagtgatgactaatcacgaacctgacgatggaaactccccaagggaagaagttaatcataatcacactgacctaagtgattcgtcttccttaatctcgaattgtgtcggggttttcacgcattctttgcctataaagtgtcttttaaccggaatcctcggttgcagtccggtaatgactcataagatctgtgtagaagactcttcagtgactgtgttacaacattcatggagaaacgggtggcagatcaaacgaatgaatgatactgctcatcttagattgttgtaa

SEQ ID NO: 71129 - protein, 399 aa, Arabidopsis thaliana
  peptide (1)..(399): Ceres Seq. ID no. 3063789
  misc_feature (110)..(291): Pfam Name: Phosphoglycerate mutase family Pfam Description: Phosphoglycerate mutase family
  misc_feature (1)..(399): Homolog of NCBI NO: 9279667 NR Description: gene_id:MDJ14.7~similar to unknown [Arabidopsis thaliana] >gi|26449922|dbj|BAC42082.1| unknown
  misc_feature (1)..(398): Homolog of NCBI NO: 15231617 NR Description: unknown protein; protein id: At3g26780.1
  misc_feature (1)..(399): Homolog of NCBI NO: 18391446 NR Description: expressed protein; protein id: At1g12850.1, by cDNA: 207684., supported by cDNA: gi_14517375 [Arabidopsis >gi|14517376|gb|AAK62579.1| At1g12850/F13K23_8 [Arabidopsis
  misc_feature (1)..(399): Homolog of NCBI NO: 21554168 NR Description: putative fructose-2,6-bisphosphatase [Arabidopsis
  misc_feature (1)..(386): Homolog of NCBI NO: 25518294 NR Description: hypothetical protein F13K23.10 [imported] - thaliana >gi|8698732|gb|AAF78490.1|AC012187_10 Contains weak to LIP1 gene product gi|7297743 from Drosophila melanogaster
  misc_feature (1)..(399): Homolog of NCBI NO: 17902578 NR Description: putative fructose-2,6-bisphosphatase [Silene
  misc_feature (1)..(399): Homolog of NCBI NO: 17902574 NR Description: putative Fructose-2,6-bisphosphatase [Silene
  misc_feature (1)..(399): Homolog of NCBI NO: 17902576 NR Description: putative fructose-2,6-bisphosphatase [Silene
  misc_feature (46)..(399): Homolog of NCBI NO: 17902572 NR Description: putative fructose-2,6-bisphosphatase [Silene
  misc_feature (51)..(399): Homolog of NCBI NO: 21386798 NR Description: X4 protein [Silene dioica]
MGSSQSTQMEDEEEEEEETDNEEEEEEDNGRSNTRQLDNLLVKKVLEQEPEMLPCHASASPLSPQLSSLGTPRLGPSIKVWDPYNVLSPPPQPPSIFSRIVSGDEDRAVTEVYLISHGESDLNLKPDLIGGRCHVAALTANGKRQARALAVFFKSQGVRFNSVYSSPLDRARSMAVSVCQEMSFPEEHVQSSDAVIEMSLGDWEGCNQAEIYSPETLSLIERCQPDFTAPSGESLRQVEFRMVQFLNGTVSGVAEKLRSDYSSTTNHNETHERDGGVSLASTNWDLLHKHRPSLTRKKSGKSRLQVMTNHEPDDGNSPREEVNHNHTDLSDSSSLISNCVGVFTHSLPIKCLLTGILGCSPVMTHKICVEDSSVTVLQHSWRNGWQIKRMNDTAHLRLL

SEQ ID NO: 71130 - protein, 391 aa, Arabidopsis thaliana
  peptide (1)..(391): Ceres Seq. ID no. 3063790
  misc_feature (102)..(283): Pfam Name: Phosphoglycerate mutase family Pfam Description: Phosphoglycerate mutase family
  misc_feature (1)..(391): Homolog of NCBI NO: 9279667 NR Description: gene_id:MDJ14.7~similar to unknown [Arabidopsis thaliana] >gi|26449922|dbj|BAC42082.1| unknown
  misc_feature (1)..(390): Homolog of NCBI NO: 15231617 NR Description: unknown protein; protein id: At3g26780.1
  misc_feature (1)..(391): Homolog of NCBI NO: 18391446 NR Description: expressed protein; protein id: At1g12850.1, by cDNA: 207684., supported by cDNA: gi_14517375 [Arabidopsis >gi|14517376|gb|AAK62579.1| At1g12850/F13K23_8 [Arabidopsis
  misc_feature (1)..(391): Homolog of NCBI NO: 21554168 NR Description: putative fructose-2,6-bisphosphatase [Arabidopsis
  misc_feature (1)..(378): Homolog of NCBI NO: 25518294 NR Description: hypothetical protein F13K23.10 [imported] - thaliana >gi|8698732|gb|AAF78490.1|AC012187_10 Contains weak to LIP1 gene product gi|7297743 from Drosophila melanogaster
  misc_feature (1)..(391): Homolog of NCBI NO: 17902578 NR Description: putative fructose-2,6-bisphosphatase [Silene
  misc_feature (1)..(391): Homolog of NCBI NO: 17902574 NR Description: putative Fructose-2,6-bisphosphatase [Silene
  misc_feature (1)..(391): Homolog of NCBI NO: 17902576 NR Description: putative fructose-2,6-bisphosphatase [Silene
  misc_feature (38)..(391): Homolog of NCBI NO: 17902572 NR Description: putative fructose-2,6-bisphosphatase [Silene
  misc_feature (43)..(391): Homolog of NCBI NO: 21386798 NR Description: X4 protein [Silene dioica]
MEDEEEEEEETDNEEEEEEDNGRSNTRQLDNLLVKKVLEQEPEMLPCHASASPLSPQLSSLGTPRLGPSIKVWDPYNVLSPPPQPPSIFSRIVSGDEDRAVTEVYLISHGESDLNLKPDLIGGRCHVAALTANGKRQARALAVFFKSQGVRFNSVYSSPLDRARSMAVSVCQEMSFPEEHVQSSDAVIEMSLGDWEGCNQAEIYSPETLSLIERCQPDFTAPSGESLRQVEFRMVQFLNGTVSGVAEKLRSDYSSTTNHNETHERDGGVSLASTNWDLLHKHRPSLTRKKSGKSRLQVMTNHEPDDGNSPREEVNHNHTDLSDSSSLISNCVGVFTHSLPIKCLLTGILGCSPVMTHKICVEDSSVTVLQHSWRNGWQIKRMNDTAHLRLL

SEQ ID NO: 71131 - protein, 348 aa, Arabidopsis thaliana
  peptide (1)..(348): Ceres Seq. ID no. 3063791
  misc_feature (59)..(240): Pfam Name: Phosphoglycerate mutase family Pfam Description: Phosphoglycerate mutase family
  misc_feature (1)..(348): Homolog of NCBI NO: 9279667 NR Description: gene_id:MDJ14.7~similar to unknown [Arabidopsis thaliana] >gi|26449922|dbj|BAC42082.1| unknown
  misc_feature (1)..(347): Homolog of NCBI NO: 15231617 NR Description: unknown protein; protein id: At3g26780.1
  misc_feature (1)..(348): Homolog of NCBI NO: 18391446 NR Description: expressed protein; protein id: At1g12850.1, by cDNA: 207684., supported by cDNA: gi_14517375 [Arabidopsis >gi|14517376|gb|AAK62579.1| At1g12850/F13K23_8 [Arabidopsis
  misc_feature (1)..(348): Homolog of NCBI NO: 21554168 NR Description: putative fructose-2,6-bisphosphatase [Arabidopsis
  misc_feature (1)..(335): Homolog of NCBI NO: 25518294 NR Description: hypothetical protein F13K23.10 [imported] - thaliana >gi|8698732|gb|AAF78490.1|AC012187_10 Contains weak to LIP1 gene product gi|7297743 from Drosophila melanogaster
  misc_feature (1)..(348): Homolog of NCBI NO: 17902578 NR Description: putative fructose-2,6-bisphosphatase [Silene
  misc_feature (1)..(348): Homolog of NCBI NO: 17902574 NR Description: putative Fructose-2,6-bisphosphatase [Silene
  misc_feature (1)..(348): Homolog of NCBI NO: 17902576 NR Description: putative fructose-2,6-bisphosphatase [Silene
  misc_feature (1)..(348): Homolog of NCBI NO: 17902572 NR Description: putative fructose-2,6-bisphosphatase [Silene
  misc_feature (1)..(348): Homolog of NCBI NO: 21386798 NR Description: X4 protein [Silene dioica]
MLPCHASASPLSPQLSSLGTPRLGPSIKVWDPYNVLSPPPQPPSIFSRIVSGDEDRAVTEVYLISHGESDLNLKPDLIGGRCHVAALTANGKRQARALAVFFKSQGVRFNSVYSSPLDRARSMAVSVCQEMSFPEEHVQSSDAVIEMSLGDWEGCNQAEIYSPETLSLIERCQPDFTAPSGESLRQVEFRMVQFLNGTVSGVAEKLRSDYSSTTNHNETHERDGGVSLASTNWDLLHKHRPSLTRKKSGKSRLQVMTNHEPDDGNSPREEVNHNHTDLSDSSSLISNCVGVFTHSLPIKCLLTGILGCSPVMTHKICVEDSSVTVLQHSWRNGWQIKRMNDTAHLRLL

SEQ ID NO: 71132 - DNA, 2007 bp, Arabidopsis thaliana
  misc_feature (1)..(2007): Ceres Seq. ID no. 3063838
  misc_feature: MA Experiment ID: 20000227 Result: Down-regulated in Transcription
  misc_feature: MA Experiment 20000227 PARAMETER Experiment Name: At_Root-Tips-vs-Tops_P Parameter: Tissue Value: Root Tips vs. Root Tops
  misc_feature: MA Experiment ID: 20000439 Result: Up-regulated in Transcription
  misc_feature: MA Experiment 20000439 PARAMETER Experiment Name: At_Roots__P Parameter: Age (day) Value: 14 vs. 21
  misc_feature: MA Experiment 20000439 PARAMETER Experiment Name: At_Roots__P Parameter: Organism Value: A. thaliana
  misc_feature: MA Experiment 20000439 PARAMETER Experiment Name: At_Roots__P Parameter: Tissue Value: Roots vs. Whole Plant
  misc_feature: Pfam Name: Lectin_legB Pfam Description: Legume lectin domain
atggctggagttctaagatcactgaggttctggatgataatatgtgtccaggtgttgtctttggtgctagctcaagaccgggatgaatttgtgtaccatgacttcagtcaagcagacctgcatcttgacggcatggcaagtatcgatgatggccgattgcatcttacaaataatacaactaagagcaccggtcatgctttctggaaaattccaatgaacttcacaacatcaccttccagttcactttctttttcgacagagtttgtcttcgcaatctttccattgctaggtgacggtcaaggaatggcgtttgtggtagctcctttcatggacatcaggtatagtggtgatgcagcctcatacttaggacttttcaatagaaaaaatgataacaaaacagaaaaccatatcctggctgtagagcttgatactaattcaagccctgaagcaattgaagatagtgataaccatgtggggattgatattaacagtatcatctcagaagactctgccaatgctagttactttagcggtacggagggaaagaacataagcttccggctagctagtgaaaaaagtattctggtatggatagattataatggaacagagaaactactaaatgtaacggtagctccagtgccaactccaaaaccagcattgccttacttgtcaagctccatcaaaccaagaaagcctctcttgtcaagattcatcaatatttcagaaattttcaatgggacaatgtttgtagaaagccttgacttgtcaaagattttggatcctcctaatcgacctccaccaccatcctctccaccaccacctcctccgccacctcccactccgccaacctcaaggtctaaagactctaagaatattattatcatatgtgttactgtaacatcaattgcttttctgttgatgttggggggatttttgtatctttacaaaaaaaagaagtatgcagaggtgcttgaacattgggaaaatgaatacagtccccaaaggtactcctttaggaacctctacaaagcaataaggggtttcagggagaatcggctacttggggcaggaggttttggaaaagtctataaaggagaacttccttcaggtacacagattgcggttaagagagtctaccataatgcagaacaagggatgaaacagtatgccgcagagattgctagtatgggaaggttaaggcacaagaacttagtgcagcttcttggttactgcagaaggaaaggtgaattgcttttggtttatgactacatgccaaatggaagccttgatgactacttgttcaataaaaacaagctgaaagatcttacttggtctcagagagtaaatataatcaagggagtagcctctgcccttctgtatcttcatgaagaatgggaacaagttgtactacatcgagatattaaagctagcaacattcttttagatgcggatctaaatggaaggttgggagatttcgggcttgcaagattccatgatcgtggcgagaatcttcaagcaacgcgtgtggtaggaaccattggctacatggcaccagagcttacagcaatgggagtggccactactaaaaccgatatctatgcttttggatctttcatccttgaggtggtttgcgggagaaggcctgtagaacctgatagaccacctgagcaaatgcatttacttaagtgggttgccacttgtgggaaaagagatactttgatggatgttgttgacagtaaactaggagactttaaagctaaggaagccaagctgcttctgaagctaggcatgctttgttcacagagtaacccggaaagtagacctagtatgaggcacatcatacaatatctggaaggaaatgccactattccaagcatatcatttgatacagcagggtttggtattcccaatataagcaatgaaacgataacacagatgacagccacctcctcatcggccaatttctcttttgaagatgttacaatactatttggcggtcgttga

SEQ ID NO: 71133 - protein, 668 aa, Arabidopsis thaliana
  peptide (1)..(668): Ceres Seq. ID no. 3063839
  misc_feature: Pfam Name: Lectin_legB Pfam Description: Legume lectin domain
  misc_feature (358)..(668): Homolog of NCBI NO: 9759248 NR Description: receptor-like protein kinase-like protein
  misc_feature (1)..(251): Homolog of NCBI NO: 9759248 NR Description: receptor-like protein kinase-like protein
  misc_feature (1)..(668): Homolog of NCBI NO: 15237849 NR Description: receptor-like protein kinase; protein id: [Arabidopsis thaliana] >gi|9759247|dbj|BAB09771.1|
  misc_feature (15)..(668): Homolog of NCBI NO: 15230694 NR Description: receptor-like protein kinase; protein id:
  misc_feature (11)..(668): Homolog of NCBI NO: 15230700 NR Description: receptor like protein kinase; protein id:
  misc_feature (1)..(668): Homolog of NCBI NO: 15230670 NR Description: receptor-like protein kinase; protein id:
  misc_feature (8)..(668): Homolog of NCBI NO: 15239268 NR Description: receptor-like protein kinase; protein id:
  misc_feature (11)..(668): Homolog of NCBI NO: 15239261 NR Description: receptor like protein kinase; protein id:
  misc_feature (3)..(668): Homolog of NCBI NO: 15239260 NR Description: receptor like protein kinase; protein id:
  misc_feature (5)..(635): Homolog of NCBI NO: 15230696 NR Description: receptor-like protein kinase; protein id:
MAGVLRSLRFWMIICVQVLSLVLAQDRDEFVYHDFSQADLHLDGMASIDDGRLHLTNNTTKSTGHAFWKIPMNFTTSPSSSLSFSTEFVFAIFPLLGDGQGMAFVVAPFMDIRYSGDAASYLGLFNRKNDNKTENHILAVELDTNSSPEAIEDSDNHVGIDINSIISEDSANASYFSGTEGKNISFRLASEKSILVWIDYNGTEKLLNVTVAPVPTPKPALPYLSSSIKPRKPLLSRFINISEIFNGTMFVESLDLSKILDPPNRPPPPSSPPPPPPPPPTPPTSRSKDSKNIIIICVTVTSIAFLLMLGGFLYLYKKKKYAEVLEHWENEYSPQRYSFRNLYKAIRGFRENRLLGAGGFGKVYKGELPSGTQIAVKRVYHNAEQGMKQYAAEIASMGRLRHKNLVQLLGYCRRKGELLLVYDYMPNGSLDDYLFNKNKLKDLTWSQRVNIIKGVASALLYLHEEWEQVVLHRDIKASNILLDADLNGRLGDFGLARFHDRGENLQATRVVGTIGYMAPELTAMGVATTKTDIYAFGSFILEVVCGRRPVEPDRPPEQMHLLKWVATCGKRDTLMDVVDSKLGDFKAKEAKLLLKLGMLCSQSNPESRPSMRHIIQYLEGNATIPSISFDTAGFGIPNISNETITQMTATSSSANFSFEDVTILFGGR

SEQ ID NO: 71134 - protein, 657 aa, Arabidopsis thaliana
  peptide (1)..(657): Ceres Seq. ID no. 3063840
  misc_feature: Pfam Name: Lectin_legB Pfam Description: Legume lectin domain
  misc_feature (347)..(657): Homolog of NCBI NO: 9759248 NR Description: receptor-like protein kinase-like protein
  misc_feature (1)..(240): Homolog of NCBI NO: 9759248 NR Description: receptor-like protein kinase-like protein
  misc_feature (1)..(657): Homolog of NCBI NO: 15237849 NR Description: receptor-like protein kinase; protein id: [Arabidopsis thaliana] >gi|9759247|dbj|BAB09771.1|
  misc_feature (4)..(657): Homolog of NCBI NO: 15230694 NR Description: receptor-like protein kinase; protein id:
  misc_feature (1)..(657): Homolog of NCBI NO: 15230700 NR Description: receptor like protein kinase; protein id:
  misc_feature (1)..(657): Homolog of NCBI NO: 15230670 NR Description: receptor-like protein kinase; protein id:
  misc_feature (1)..(657): Homolog of NCBI NO: 15239268 NR Description: receptor-like protein kinase; protein id:
  misc_feature (1)..(657): Homolog of NCBI NO: 15239261 NR Description: receptor like protein kinase; protein id:
  misc_feature (1)..(657): Homolog of NCBI NO: 15239260 NR Description: receptor like protein kinase; protein id:
  misc_feature (1)..(624): Homolog of NCBI NO: 15230696 NR Description: receptor-like protein kinase; protein id:
MIICVQVLSLVLAQDRDEFVYHDFSQADLHLDGMASIDDGRLHLTNNTTKSTGHAFWKIPMNFTTSPSSSLSFSTEFVFAIFPLLGDGQGMAFVVAPFMDIRYSGDAASYLGLFNRKNDNKTENHILAVELDTNSSPEAIEDSDNHVGIDINSIISEDSANASYFSGTEGKNISFRLASEKSILVWIDYNGTEKLLNVTVAPVPTPKPALPYLSSSIKPRKPLLSRFINISEIFNGTMFVESLDLSKILDPPNRPPPPSSPPPPPPPPPTPPTSRSKDSKNIIIICVTVTSIAFLLMLGGFLYLYKKKKYAEVLEHWENEYSPQRYSFRNLYKAIRGFRENRLLGAGGFGKVYKGELPSGTQIAVKRVYHNAEQGMKQYAAEIASMGRLRHKNLVQLLGYCRRKGELLLVYDYMPNGSLDDYLFNKNKLKDLTWSQRVNIIKGVASALLYLHEEWEQVVLHRDIKASNILLDADLNGRLGDFGLARFHDRGENLQATRVVGTIGYMAPELTAMGVATTKTDIYAFGSFILEVVCGRRPVEPDRPPEQMHLLKWVATCGKRDTLMDVVDSKLGDFKAKEAKLLLKLGMLCSQSNPESRPSMRHIIQYLEGNATIPSISFDTAGFGIPNISNETITQMTATSSSANFSFEDVTILFGGR

SEQ ID NO: 71135 - protein, 624 aa, Arabidopsis thaliana
  peptide (1)..(624): Ceres Seq. ID no. 3063841
  misc_feature: Pfam Name: Lectin_legB Pfam Description: Legume lectin domain
  misc_feature (314)..(624): Homolog of NCBI NO: 9759248 NR Description: receptor-like protein kinase-like protein
  misc_feature (1)..(207): Homolog of NCBI NO: 9759248 NR Description: receptor-like protein kinase-like protein
  misc_feature (1)..(624): Homolog of NCBI NO: 15237849 NR Description: receptor-like protein kinase; protein id: [Arabidopsis thaliana] >gi|9759247|dbj|BAB09771.1|
  misc_feature (1)..(624): Homolog of NCBI NO: 15230694 NR Description: receptor-like protein kinase; protein id:
  misc_feature (1)..(624): Homolog of NCBI NO: 15230700 NR Description: receptor like protein kinase; protein id:
  misc_feature (1)..(624): Homolog of NCBI NO: 15230670 NR Description: receptor-like protein kinase; protein id:
  misc_feature (1)..(624): Homolog of NCBI NO: 15239268 NR Description: receptor-like protein kinase; protein id:
  misc_feature (1)..(624): Homolog of NCBI NO: 15239261 NR Description: receptor like protein kinase; protein id:
  misc_feature (1)..(624): Homolog of NCBI NO: 15239260 NR Description: receptor like protein kinase; protein id:
  misc_feature (1)..(591): Homolog of NCBI NO: 15230696 NR Description: receptor-like protein kinase; protein id:
MASIDDGRLHLTNNTTKSTGHAFWKIPMNFTTSPSSSLSFSTEFVFAIFPLLGDGQGMAFVVAPFMDIRYSGDAASYLGLFNRKNDNKTENHILAVELDTNSSPEAIEDSDNHVGIDINSIISEDSANASYFSGTEGKNISFRLASEKSILVWIDYNGTEKLLNVTVAPVPTPKPALPYLSSSIKPRKPLLSRFINISEIFNGTMFVESLDLSKILDPPNRPPPPSSPPPPPPPPPTPPTSRSKDSKNIIIICVTVTSIAFLLMLGGFLYLYKKKKYAEVLEHWENEYSPQRYSFRNLYKAIRGFRENRLLGAGGFGKVYKGELPSGTQIAVKRVYHNAEQGMKQYAAEIASMGRLRHKNLVQLLGYCRRKGELLLVYDYMPNGSLDDYLFNKNKLKDLTWSQRVNIIKGVASALLYLHEEWEQVVLHRDIKASNILLDADLNGRLGDFGLARFHDRGENLQATRVVGTIGYMAPELTAMGVATTKTDIYAFGSFILEVVCGRRPVEPDRPPEQMHLLKWVATCGKRDTLMDVVDSKLGDFKAKEAKLLLKLGMLCSQSNPESRPSMRHIIQYLEGNATIPSISFDTAGFGIPNISNETITQMTATSSSANFSFEDVTILFGGR

SEQ ID NO: 71136 - DNA, 1176 bp, Arabidopsis thaliana
  misc_feature (1)..(1176): Ceres Seq. ID no. 3064164
  misc_feature: MA Experiment ID: 20000180 Result: Up-regulated in Transcription
  misc_feature: MA Experiment 20000180 PARAMETER Experiment Name: At_Germinating_Seeds_P Parameter: Age (hr) Value: 24 vs. 0
  misc_feature: MA Experiment 20000180 PARAMETER Experiment Name: At_Germinating_Seeds_P Parameter: Tissue Value: Germinating Seeds
  misc_feature: MA Experiment ID: 20000182 Result: Up-regulated in Transcription
  misc_feature: MA Experiment 20000182 PARAMETER Experiment Name: At_2mM_SA_P Parameter: Age (day) Value: 14
  misc_feature: MA Experiment 20000182 PARAMETER Experiment Name: At_2mM_SA_P Parameter: Organism Value: A. thaliana
  misc_feature: MA Experiment 20000182 PARAMETER Experiment Name: At_2mM_SA_P Parameter: Plant Line Value: WS
  misc_feature: MA Experiment 20000182 PARAMETER Experiment Name: At_2mM_SA_P Parameter: Timepoint (hr) Value: 6
  misc_feature: MA Experiment 20000182 PARAMETER Experiment Name: At_2mM_SA_P Parameter: Tissue Value: Aerial
  misc_feature: MA Experiment 20000182 PARAMETER Experiment Name: At_2mM_SA_P Parameter: Treatment Value: 2mM SA vs. No Treatment
  misc_feature: MA Experiment ID: 20000185 Result: Up-regulated in Transcription
  misc_feature: MA Experiment 20000185 PARAMETER Experiment Name: At_Roots__P Parameter: Age (day) Value: 7 vs. 21
  misc_feature: MA Experiment 20000185 PARAMETER Experiment Name: At_Roots__P Parameter: Organism Value: A. thaliana
  misc_feature: MA Experiment 20000185 PARAMETER Experiment Name: At_Roots__P Parameter: Tissue Value: Roots vs. Whole Plant
  misc_feature: MA Experiment ID: 20000438 Result: Down-regulated in Transcription
  misc_feature: MA Experiment 20000438 PARAMETER Experiment Name: At_Shoots__P Parameter: Age (day) Value: 14
  misc_feature: MA Experiment 20000438 PARAMETER Experiment Name: At_Shoots__P Parameter: Tissue Value: Shoots vs. Whole Plant
  misc_feature: MA Experiment ID: 20000439 Result: Up-regulated in Transcription
  misc_feature: MA Experiment 20000439 PARAMETER Experiment Name: At_Roots__P Parameter: Age (day) Value: 14 vs. 21
  misc_feature: MA Experiment 20000439 PARAMETER Experiment Name: At_Roots__P Parameter: Organism Value: A. thaliana
  misc_feature: MA Experiment 20000439 PARAMETER Experiment Name: At_Roots__P Parameter: Tissue Value: Roots vs. Whole Plant
  misc_feature: MA Experiment ID: 20001757 Result: Down-regulated in Transcription
  misc_feature: MA Experiment 20001757 PARAMETER Experiment Name: At_50mM_NH4NO3_L-to-H_P Parameter: Timepoint (hr) Value: 6
  misc_feature: MA Experiment 20001757 PARAMETER Experiment Name: At_50mM_NH4NO3_L-to-H_P Parameter: Tissue Value: Leaf
  misc_feature: MA Experiment 20001757 PARAMETER Experiment Name: At_50mM_NH4NO3_L-to-H_P Parameter: Treatment Value: 50mM NH4NO3 vs 100mM Mannitol
  misc_feature: MA Experiment ID: 20001905 Result: Up-regulated in Transcription
  misc_feature: MA Experiment 20001905 PARAMETER Experiment Name: At_Drought_Reproduction_P Parameter: Age (day) Value: 40
  misc_feature: MA Experiment 20001905 PARAMETER Experiment Name: At_Drought_Reproduction_P Parameter: Organism Value: A. thaliana
  misc_feature: MA Experiment 20001905 PARAMETER Experiment Name: At_Drought_Reproduction_P Parameter: Plant Line Value: WS
  misc_feature: MA Experiment 20001905 PARAMETER Experiment Name: At_Drought_Reproduction_P Parameter: Timepoint (day) Value: 10
  misc_feature: MA Experiment 20001905 PARAMETER Experiment Name: At_Drought_Reproduction_P Parameter: Tissue Value: Rosettes
  misc_feature: MA Experiment 20001905 PARAMETER Experiment Name: At_Drought_Reproduction_P Parameter: Treatment Value: Drought vs. No Drought
  misc_feature: MA Experiment ID: 20001906 Result: Up-regulated in Transcription
  misc_feature: MA Experiment 20001906 PARAMETER Experiment Name: At_Drought_Reproduction_P Parameter: Age (day) Value: 35
  misc_feature: MA Experiment 20001906 PARAMETER Experiment Name: At_Drought_Reproduction_P Parameter: Organism Value: A. thaliana
  misc_feature: MA Experiment 20001906 PARAMETER Experiment Name: At_Drought_Reproduction_P Parameter: Plant Line Value: WS
  misc_feature: MA Experiment 20001906 PARAMETER Experiment Name: At_Drought_Reproduction_P Parameter: Timepoint (day) Value: 5
  misc_feature: MA Experiment 20001906 PARAMETER Experiment Name: At_Drought_Reproduction_P Parameter: Tissue Value: Siliques
  misc_feature: MA Experiment 20001906 PARAMETER Experiment Name: At_Drought_Reproduction_P Parameter: Treatment Value: Drought vs. No Drought
atggattgcttagaacccaaaacaaagaacaatctcactggaaagcttctcttagtagcttcactcttaattttagccattattgtgatcagtcaatcttcaagtttcacatctccaagcgcgttttctcaaagagaggaaggagtgactcatgtgttagtcactggtggtgctggttatatcgggtcacatgcggctttaagacttcttagagattcataccgcgtaaccattgtggacaatctttcgcgtggaaatcttggtgcggttaagactttacagcaattattcccgcagacaggaagacttcagttcatttatgctgacttaggagatcccttagcggtcgagaaaatcttctcggagaatgcttttgacgctgtaatgcattttgctgcggtagcttatgtcggagaaagcactctttatcctctaaaatattaccataacattacatcaaacacgttaggagttcttgaagctatggctagacataaagtaaagaaactgatatattctagcacttgtgctacatatggagagcctgaaaaaatgccgattactgaagacactccacaggtaccgattaatccatacggaaaagctaaaaagatggcagaggatatgatcttggatttctcaaagaactctgacatggcggttatgatcttaagatacttcaatgtgattggttcagatccaggaggtagattaggagaagcgccaagacccgaacttcgtgagcaaggaaggatttctggtgcttgtttcgatgcagctcgtggtttcattcccggactacaagtgaaaggaacggattacaaaacatcggacggtacttgcattagagactatatagatgttactgacctcgtggatgctcacgtgaaggctctcgagaaagctcagcctcgaaaagtcggtatctacaatgttggaaccggaaaagggagatcggttaaagaattcgttgaggcatgtaagaaggcgacaggagttgagatcaaagtagatttcttgcctcgacgaccgggagattacgcagaggtttacagtgatccaacaaagattttgaaagatttgaattggactgctcgattcactaatcttcaagatagtcttcaagttgcttggagatggcaaaaaattcatcctcatggatataattcttattaa

SEQ ID NO: 71137 - protein, 391 aa, Arabidopsis thaliana
  peptide (1)..(391): Ceres Seq. ID no. 3064165
  misc_feature (52)..(385): Pfam Name: NAD dependent epimerase/dehydratase family Pfam Description: NAD dependent epimerase/dehydratase family
  misc_feature (1)..(391): Homolog of NCBI NO: 15241503 NR Description: putative protein; protein id: At5g44480.1
  misc_feature (14)..(390): Homolog of NCBI NO: 15237098 NR Description: UDP-glucose 4-epimerase - like protein; protein
  misc_feature (1)..(388): Homolog of NCBI NO: 22329866 NR Description: UDP-galactose 4-epimerase-like protein; protein At1g30620.1, supported by cDNA: gi_13272474, supported by cDNA: [Arabidopsis thaliana] >gi|25292360|pir||E86431 T5I8.7 Strong
  misc_feature (1)..(388): Homolog of NCBI NO: 24417398 NR Description: unknown [Arabidopsis thaliana]
  misc_feature (1)..(390): Homolog of NCBI NO: 26106016 NR Description: UDP-galactose 4-epimerase-like protein [Oryza
  misc_feature (1)..(390): Homolog of NCBI NO: 27529690 NR Description: UDP-galactose 4-epimerase-like protein [Oryza
  misc_feature (14)..(390): Homolog of NCBI NO: 7437275 NR Description: probable UDPglucose 4-epimerase (EC 5.1.3.2)
  misc_feature (1)..(388): Homolog of NCBI NO: 27260937 NR Description: OJ1417_E01.21 [Oryza sativa (japonica
  misc_feature (1)..(388): Homolog of NCBI NO: 25553524 NR Description: UDP-galactose 4-epimerase-like protein [Oryza
  misc_feature (224)..(387): Homolog of NCBI NO: 5852089 NR Description: zwh12.1 [Oryza sativa (indica cultivar-group)]
MDCLEPKTKNNLTGKLLLVASLLILAIIVISQSSSFTSPSAFSQREEGVTHVLVTGGAGYIGSHAALRLLRDSYRVTIVDNLSRGNLGAVKTLQQLFPQTGRLQFIYADLGDPLAVEKIFSENAFDAVMHFAAVAYVGESTLYPLKYYHNITSNTLGVLEAMARHKVKKLIYSSTCATYGEPEKMPITEDTPQVPINPYGKAKKMAEDMILDFSKNSDMAVMILRYFNVIGSDPGGRLGEAPRPELREQGRISGACFDAARGFIPGLQVKGTDYKTSDGTCIRDYIDVTDLVDAHVKALEKAQPRKVGIYNVGTGKGRSVKEFVEACKKATGVEIKVDFLPRRPGDYAEVYSDPTKILKDLNWTARFTNLQDSLQVAWRWQKIHPHGYNSY

SEQ ID NO: 71138 - protein, 263 aa, Arabidopsis thaliana
  peptide (1)..(263): Ceres Seq. ID no. 3064167
  misc_feature (1)..(257): Pfam Name: NAD dependent epimerase/dehydratase family Pfam Description: NAD dependent epimerase/dehydratase family
  misc_feature (1)..(260): Homolog of NCBI NO: 25553524 NR Description: UDP-galactose 4-epimerase-like protein [Oryza
  misc_feature (1)..(263): Homolog of NCBI NO: 15241503 NR Description: putative protein; protein id: At5g44480.1
  misc_feature (1)..(260): Homolog of NCBI NO: 22329866 NR Description: UDP-galactose 4-epimerase-like protein; protein At1g30620.1, supported by cDNA: gi_13272474, supported by cDNA: [Arabidopsis thaliana] >gi|25292360|pir||E86431 T5I8.7 Strong
  misc_feature (1)..(262): Homolog of NCBI NO: 26106016 NR Description: UDP-galactose 4-epimerase-like protein [Oryza
  misc_feature (1)..(262): Homolog of NCBI NO: 7437275 NR Description: probable UDPglucose 4-epimerase (EC 5.1.3.2)
  misc_feature (1)..(260): Homolog of NCBI NO: 27260937 NR Description: OJ1417_E01.21 [Oryza sativa (japonica
  misc_feature (1)..(262): Homolog of NCBI NO: 27529690 NR Description: UDP-galactose 4-epimerase-like protein [Oryza
  misc_feature (1)..(260): Homolog of NCBI NO: 24417398 NR Description: unknown [Arabidopsis thaliana]
  misc_feature (1)..(262): Homolog of NCBI NO: 15237098 NR Description: UDP-glucose 4-epimerase - like protein; protein
  misc_feature (96)..(259): Homolog of NCBI NO: 5852089 NR Description: zwh12.1 [Oryza sativa (indica cultivar-group)]
MHFAAVAYVGESTLYPLKYYHNITSNTLGVLEAMARHKVKKLIYSSTCATYGEPEKMPITEDTPQVPINPYGKAKKMAEDMILDFSKNSDMAVMILRYFNVIGSDPGGRLGEAPRPELREQGRISGACFDAARGFIPGLQVKGTDYKTSDGTCIRDYIDVTDLVDAHVKALEKAQPRKVGIYNVGTGKGRSVKEFVEACKKATGVEIKVDFLPRRPGDYAEVYSDPTKILKDLNWTARFTNLQDSLQVAWRWQKIHPHGYNSY

SEQ ID NO: 71139 - protein, 230 aa, Arabidopsis thaliana
  peptide (1)..(230): Ceres Seq. ID no. 3064168
  misc_feature (1)..(224): Pfam Name: NAD dependent epimerase/dehydratase family Pfam Description: NAD dependent epimerase/dehydratase family
  misc_feature (1)..(230): Homolog of NCBI NO: 15241503 NR Description: putative protein; protein id: At5g44480.1
  misc_feature (1)..(229): Homolog of NCBI NO: 15237098 NR Description: UDP-glucose 4-epimerase - like protein; protein
  misc_feature (1)..(227): Homolog of NCBI NO: 22329866 NR Description: UDP-galactose 4-epimerase-like protein; protein At1g30620.1, supported by cDNA: gi_13272474, supported by cDNA: [Arabidopsis thaliana] >gi|25292360|pir||E86431 T5I8.7 Strong
  misc_feature (1)..(227): Homolog of NCBI NO: 24417398 NR Description: unknown [Arabidopsis thaliana]
  misc_feature (1)..(229): Homolog of NCBI NO: 26106016 NR Description: UDP-galactose 4-epimerase-like protein [Oryza
  misc_feature (1)..(229): Homolog of NCBI NO: 27529690 NR Description: UDP-galactose 4-epimerase-like protein [Oryza
  misc_feature (1)..(229): Homolog of NCBI NO: 7437275 NR Description: probable UDPglucose 4-epimerase (EC 5.1.3.2)
  misc_feature (1)..(227): Homolog of NCBI NO: 27260937 NR Description: OJ1417_E01.21 [Oryza sativa (japonica
  misc_feature (1)..(227): Homolog of NCBI NO: 25553524 NR Description: UDP-galactose 4-epimerase-like protein [Oryza
  misc_feature (63)..(226): Homolog of NCBI NO: 5852089 NR Description: zwh12.1 [Oryza sativa (indica cultivar-group)]
MARHKVKKLIYSSTCATYGEPEKMPITEDTPQVPINPYGKAKKMAEDMILDFSKNSDMAVMILRYFNVIGSDPGGRLGEAPRPELREQGRISGACFDAARGFIPGLQVKGTDYKTSDGTCIRDYIDVTDLVDAHVKALEKAQPRKVGIYNVGTGKGRSVKEFVEACKKATGVEIKVDFLPRRPGDYAEVYSDPTKILKDLNWTARFTNLQDSLQVAWRWQKIHPHGYNSY

SEQ ID NO: 71140 - DNA, 660 bp, Arabidopsis thaliana
  misc_feature (1)..(660): Ceres Seq. ID no. 3065961
  misc_feature: MA Experiment ID: 20000306 Result: Up-regulated in Transcription
  misc_feature: MA Experiment 20000306 PARAMETER Experiment Name: At_Germinating_Seeds_Sub_P Parameter: Age (hr) Value: 6 vs. 0
  misc_feature: MA Experiment 20000306 PARAMETER Experiment Name: At_Germinating_Seeds_Sub_P Parameter: Organism Value: A. thaliana
  misc_feature: MA Experiment 20000306 PARAMETER Experiment Name: At_Germinating_Seeds_Sub_P Parameter: Plant Line Value: WS
  misc_feature: MA Experiment 20000306 PARAMETER Experiment Name: At_Germinating_Seeds_Sub_P Parameter: Tissue Value: Germinating Seeds
  misc_feature: MA Experiment ID: 20000440 Result: Up-regulated in Transcription
  misc_feature: MA Experiment 20000440 PARAMETER Experiment Name: At_Closed-Flower__Sub_P Parameter: Tissue Value: Closed Flower vs. Whole Plant
atgaacccatctctcttccaaaattacacttggaacaacatcatcaacagcagcaacaacaacaacaagaatgatgatcatcatcatcaacataataatgatccaatcggtatggccatggaccagtacacacagctccatatcttcaatcctttctcttcttctcatttccctcctctctcttcttccctcacaaccaccactcttctctccggagatcaagaagacgacgaagacgaagaagaacctctagaggaactcggtgctatgaaggaaatgatgtacaagatcgcagccatgcaatcggttgacatcgacccagcaaccgtcaagaaacccaaacgccgtaacgtgaggatctccgacgaccctcagagtgtggcggctagacatcgccgtgagagaatcagtgagaggatcagaattcttcagagactcgtgccaggtggcactaaaatggatacggcttcaatgctcgatgaagctatacgctatgtcaagttcttgaaacggcagatccggctactcaataataataccggatatactcctccgccgccgcaagatcaagcttctcaggcggtgacgacgtcatgggtttcaccgccaccaccgccaagtttcggccgtgggggaagaggagtaggagaattaatctag

SEQ ID NO: 71141 - protein, 219 aa, Arabidopsis thaliana; identical to SEQ ID NO: 48806
  peptide (1)..(219): Ceres Seq. ID no. 3065962
  misc_feature (123)..(170): Pfam Name: Helix-loop-helix DNA-binding domain Pfam Description: Helix-loop-helix DNA-binding domain
  misc_feature (1)..(219): Homolog of NCBI NO: 15242494 NR Description: putative protein; protein id: At5g09750.1
  misc_feature (77)..(185): Homolog of NCBI NO: 15236714 NR Description: hypothetical protein; protein id: At4g00120.1
  misc_feature (62)..(183): Homolog of NCBI NO: 15240189 NR Description: putative protein; protein id: At5g67060.1, by cDNA: gi_20127096 [Arabidopsis thaliana] emb|CAB62312.1~gene_id:K21H1.2~similar to unknown protein
  misc_feature (87)..(179): Homolog of NCBI NO: 15229725 NR Description: putative protein; protein id: At3g50330.1
  misc_feature (79)..(208): Homolog of NCBI NO: 9294680 NR Description: emb|CAB62312.1~gene_id:MHC9.1~similar to unknown
  misc_feature (79)..(208): Homolog of NCBI NO: 15232534 NR Description: hypothetical protein; protein id: At3g21330.1, by cDNA: gi_20127094 [Arabidopsis thaliana]
  misc_feature (79)..(208): Homolog of NCBI NO: 28393737 NR Description: unknown protein [Arabidopsis thaliana]
  misc_feature (51)..(219): Homolog of NCBI NO: 15289790 NR Description: P0002B05.9 [Oryza sativa (japonica
  misc_feature (51)..(219): Homolog of NCBI NO: 34914234 NR Description: P0697C12.24 [Oryza sativa (japonica
  misc_feature (25)..(198): Homolog of NCBI NO: 34910410 NR Description: P0692C11.28 [Oryza sativa (japonica

SEQ ID NO: 71142 - protein, 182 aa, Arabidopsis thaliana; identical to SEQ ID NO: 48807
  peptide (1)..(182): Ceres Seq. ID no. 3065963
  misc_feature (86)..(133): Pfam Name: Helix-loop-helix DNA-binding domain Pfam Description: Helix-loop-helix DNA-binding domain
  misc_feature (1)..(182): Homolog of NCBI NO: 15242494 NR Description: putative protein; protein id: At5g09750.1
  misc_feature (40)..(148): Homolog of NCBI NO: 15236714 NR Description: hypothetical protein; protein id: At4g00120.1
  misc_feature (25)..(146): Homolog of NCBI NO: 15240189 NR Description: putative protein; protein id: At5g67060.1, by cDNA: gi_20127096 [Arabidopsis thaliana] emb|CAB62312.1~gene_id:K21H1.2~similar to unknown protein
  misc_feature (50)..(142): Homolog of NCBI NO: 15229725 NR Description: putative protein; protein id: At3g50330.1
  misc_feature (42)..(171): Homolog of NCBI NO: 9294680 NR Description: emb|CAB62312.1~gene_id:MHC9.1~similar to unknown
  misc_feature (42)..(171): Homolog of NCBI NO: 15232534 NR Description: hypothetical protein; protein id: At3g21330.1, by cDNA: gi_20127094 [Arabidopsis thaliana]
  misc_feature (42)..(171): Homolog of NCBI NO: 28393737 NR Description: unknown protein [Arabidopsis thaliana]
  misc_feature (14)..(182): Homolog of NCBI NO: 15289790 NR Description: P0002B05.9 [Oryza sativa (japonica
  misc_feature (14)..(182): Homolog of NCBI NO: 34914234 NR Description: P0697C12.24 [Oryza sativa (japonica
  misc_feature (1)..(161): Homolog of NCBI NO: 34910410 NR Description: P0692C11.28 [Oryza sativa (japonica

SEQ ID NO: 71143 - protein, 180 aa, Arabidopsis thaliana
  peptide (1)..(180): Ceres Seq. ID no. 3065964
  misc_feature (84)..(131): Pfam Name: Helix-loop-helix DNA-binding domain Pfam Description: Helix-loop-helix DNA-binding domain
  misc_feature (1)..(180): Homolog of NCBI NO: 15242494 NR Description: putative protein; protein id: At5g09750.1
  misc_feature (38)..(146): Homolog of NCBI NO: 15236714 NR Description: hypothetical protein; protein id: At4g00120.1
  misc_feature (23)..(144): Homolog of NCBI NO: 15240189 NR Description: putative protein; protein id: At5g67060.1, by cDNA: gi_20127096 [Arabidopsis thaliana] emb|CAB62312.1~gene_id:K21H1.2~similar to unknown protein
  misc_feature (48)..(140): Homolog of NCBI NO: 15229725 NR Description: putative protein; protein id: At3g50330.1
  misc_feature (40)..(169): Homolog of NCBI NO: 9294680 NR Description: emb|CAB62312.1~gene_id:MHC9.1~similar to unknown
  misc_feature (40)..(169): Homolog of NCBI NO: 15232534 NR Description: hypothetical protein; protein id: At3g21330.1, by cDNA: gi_20127094 [Arabidopsis thaliana]
  misc_feature (40)..(169): Homolog of NCBI NO: 28393737 NR Description: unknown protein [Arabidopsis thaliana]
  misc_feature (12)..(180): Homolog of NCBI NO: 15289790 NR Description: P0002B05.9 [Oryza sativa (japonica
  misc_feature (12)..(180): Homolog of NCBI NO: 34914234 NR Description: P0697C12.24 [Oryza sativa (japonica
  misc_feature (1)..(159): Homolog of NCBI NO: 34910410 NR Description: P0692C11.28 [Oryza sativa (japonica
MDQYTQLHIFNPFSSSHFPPLSSSLTTTTLLSGDQEDDEDEEEPLEELGAMKEMMYKIAAMQSVDIDPATVKKPKRRNVRISDDPQSVAARHRRERISERIRILQRLVPGGTKMDTASMLDEAIRYVKFLKRQIRLLNNNTGYTPPPPQDQASQAVTTSWVSPPPPPSFGRGGRGVGELI

SEQ ID NO: 71144 - DNA, 1521 bp, Arabidopsis thaliana
  misc_feature (1)..(1521): Ceres Seq. ID no. 3066605
  misc_feature: MA Experiment ID: 20000185 Result: Up-regulated in Transcription
  misc_feature: MA Experiment 20000185 PARAMETER Experiment Name: At_Roots__P Parameter: Age (day) Value: 7 vs. 21
  misc_feature: MA Experiment 20000185 PARAMETER Experiment Name: At_Roots__P Parameter: Organism Value: A. thaliana
  misc_feature: MA Experiment 20000185 PARAMETER Experiment Name: At_Roots__P Parameter: Tissue Value: Roots vs. Whole Plant
  misc_feature: MA Experiment ID: 20000439 Result: Up-regulated in Transcription
  misc_feature: MA Experiment 20000439 PARAMETER Experiment Name: At_Roots__P Parameter: Age (day) Value: 14 vs. 21
  misc_feature: MA Experiment 20000439 PARAMETER Experiment Name: At_Roots__P Parameter: Organism Value: A. thaliana
  misc_feature: MA Experiment 20000439 PARAMETER Experiment Name: At_Roots__P Parameter: Tissue Value: Roots vs. Whole Plant
  misc_feature: MA Experiment ID: 20001451 Result: Up-regulated in Transcription
  misc_feature: MA Experiment 20001451 PARAMETER Experiment Name: At_Far-red-induction_P Parameter: Age (day) Value: 7
  misc_feature: MA Experiment 20001451 PARAMETER Experiment Name: At_Far-red-induction_P Parameter: Light Value: Far-red vs. White
  misc_feature: MA Experiment 20001451 PARAMETER Experiment Name: At_Far-red-induction_P Parameter: Organism Value: A. thaliana
  misc_feature: MA Experiment 20001451 PARAMETER Experiment Name: At_Far-red-induction_P Parameter: Plant Line Value: Columbia
  misc_feature: MA Experiment 20001451 PARAMETER Experiment Name: At_Far-red-induction_P Parameter: Timepoint (hr) Value: 24
  misc_feature: MA Experiment 20001451 PARAMETER Experiment Name: At_Far-red-induction_P Parameter: Tissue Value: Whole Plant
atggcggtgaagaagaaatcatcttggagatcattgatggttttgtgtttccaagatccagacaacatatattctcccaagaagacaaagaaagatgatggtgaacgtgtgattaccaaacagaaatcgtttcttggattgtcgattctagacataagtaatccaagttccactaccttgtccgaagatctctcaatctccctcgccggctcggatctccacgtgttcacacaagcagagcttagagtcataacacaaagcttctcttctagcaactttcttggtgaaggagggtttggtccggttcataaagggttcatcgatgacaagctccgtcctggtcttaaggctcagcccgttgccgttaaacttcttgatcttgatggtcttcaaggtcaccgtgagtttatgacggaggttatgtgtttgggaaaactaaagcatccgaatctggtgaagctgatcggatattgctgcgaggaagcacatagacttcttgtttatgagttcatgcctcgtggaagtttggagtctcaactcttcagaaggtgctccctaccgctgccatggacaacgaggttgaacatcgcttatgaagctgcaaagggtctacagtttctacatgaagccgagaagcccatcatctatcgcgatttcaaggcctctaatatcttgttagattctgattatacagcgaaactctcggacttcgggctagcaaaagacggaccacaaggcgatgatacacatgtgtcgactcgcgtgatgggcacacaagggtacgcggcgccagagtacataatgacaggtcatttaacggctaagagtgatgtgtacagctttggagtggtgttgcttgagctgttgacaggtcggaaatcggtggacatagcgagatcatcaagaaaagaaaccctcgttgagtgggctcgtccaatgctcaacgacgcacgtaaactcgggagaataatggacccgaggcttgaagatcagtactcagagaccggagcacgaaaggcagcaactctagcttatcaatgcctaaggtaccgaccaaagacaaggccagacattagcactgttgtctccgttctccaagacatcaaagattacaaagatgatattcccattgggatattcacttacaccgttcctaccaagccacgccgggaagttaaagagacaagtcttcaaaactttgacaagccacgccgtgaaactaaagtgacaagtcttcaaaacttcgacaaaacacgccgtgaagttaaagatacaagtcttcaaaacttcgacaaaacacgccgtgaagttaaagagacaagtcttcaaaacttcgacaaaacacgccgtgaagttaaagagacaagtcttcaaaacttcgacaagcctcgcaacgtttccacgactgataaccatcaaaagttccggtcgcccgcacacacggcaagaaaccaccggataactttgagaaacggatataattcaccaatgcgtaacgaggccggaggggaacggtactga

SEQ ID NO: 71145 - protein, 506 aa, Arabidopsis thaliana
  peptide (1)..(506): Ceres Seq. ID no. 3066606
  misc_feature (1)..(434): Homolog of NCBI NO: 10176804 NR Description: serine/threonine protein kinase-like [Arabidopsis
  misc_feature (417)..(506): Homolog of NCBI NO: 10176804 NR Description: serine/threonine protein kinase-like [Arabidopsis
  misc_feature (1)..(430): Homolog of NCBI NO: 15238553 NR Description: serine/threonine protein kinase-like; protein id:
  misc_feature (432)..(506): Homolog of NCBI NO: 15238553 NR Description: serine/threonine protein kinase-like; protein id:
  misc_feature (417)..(473): Homolog of NCBI NO: 15238553 NR Description: serine/threonine protein kinase-like; protein id:
  misc_feature (1)..(407): Homolog of NCBI NO: 15225019 NR Description: putative protein kinase; protein id: At2g05940.1, by cDNA: gi_15810412, supported by cDNA: gi_21280976 [Arabidopsis >gi|25287639|pir||C84473 probable protein kinase putative protein
  misc_feature (476)..(506): Homolog of NCBI NO: 15225019 NR Description: putative protein kinase; protein id: At2g05940.1, by cDNA: gi_15810412, supported by cDNA: gi_21280976 [Arabidopsis >gi|25287639|pir||C84473 probable protein kinase putative protein
  misc_feature (6)..(427): Homolog of NCBI NO: 30013675 NR Description: Avr9/Cf-9 rapidly elicited protein 264 [Nicotiana
  misc_feature (9)..(421): Homolog of NCBI NO: 14484938 NR Description: auxin-regulated dual specificity cytosolic kinase
  misc_feature (137)..(385): Homolog of NCBI NO: 27436752 NR Description: Putative serine/threonine protein kinase [Oryza
MAVKKKSSWRSLMVLCFQDPDNIYSPKKTKKDDGERVITKQKSFLGLSILDISNPSSTTLSEDLSISLAGSDLHVFTQAELRVITQSFSSSNFLGEGGFGPVHKGFIDDKLRPGLKAQPVAVKLLDLDGLQGHREFMTEVMCLGKLKHPNLVKLIGYCCEEAHRLLVYEFMPRGSLESQLFRRCSLPLPWTTRLNIAYEAAKGLQFLHEAEKPIIYRDFKASNILLDSDYTAKLSDFGLAKDGPQGDDTHVSTRVMGTQGYAAPEYIMTGHLTAKSDVYSFGVVLLELLTGRKSVDIARSSRKETLVEWARPMLNDARKLGRIMDPRLEDQYSETGARKAATLAYQCLRYRPKTRPDISTVVSVLQDIKDYKDDIPIGIFTYTVPTKPRREVKETSLQNFDKPRRETKVTSLQNFDKTRREVKDTSLQNFDKTRREVKETSLQNFDKTRREVKETSLQNFDKPRNVSTTDNHQKFRSPAHTARNHRITLRNGYNSPMRNEAGGERY

SEQ ID NO: 71146 - protein, 494 aa, Arabidopsis thaliana
  peptide (1)..(494): Ceres Seq. ID no. 3066607
  misc_feature (1)..(422): Homolog of NCBI NO: 10176804 NR Description: serine/threonine protein kinase-like [Arabidopsis
  misc_feature (405)..(494): Homolog of NCBI NO: 10176804 NR Description: serine/threonine protein kinase-like [Arabidopsis
  misc_feature (1)..(418): Homolog of NCBI NO: 15238553 NR Description: serine/threonine protein kinase-like; protein id:
  misc_feature (420)..(494): Homolog of NCBI NO: 15238553 NR Description: serine/threonine protein kinase-like; protein id:
  misc_feature (405)..(461): Homolog of NCBI NO: 15238553 NR Description: serine/threonine protein kinase-like; protein id:
  misc_feature (1)..(395): Homolog of NCBI NO: 15225019 NR Description: putative protein kinase; protein id: At2g05940.1, by cDNA: gi_15810412, supported by cDNA: gi_21280976 [Arabidopsis >gi|25287639|pir||C84473 probable protein kinase putative protein
  misc_feature (464)..(494): Homolog of NCBI NO: 15225019 NR Description: putative protein kinase; protein id: At2g05940.1, by cDNA: gi_15810412, supported by cDNA: gi_21280976 [Arabidopsis >gi|25287639|pir||C84473 probable protein kinase putative protein
  misc_feature (1)..(415): Homolog of NCBI NO: 30013675 NR Description: Avr9/Cf-9 rapidly elicited protein 264 [Nicotiana
  misc_feature (1)..(409): Homolog of NCBI NO: 14484938 NR Description: auxin-regulated dual specificity cytosolic kinase
  misc_feature (125)..(373): Homolog of NCBI NO: 27436752 NR Description: Putative serine/threonine protein kinase [Oryza
MVLCFQDPDNIYSPKKTKKDDGERVITKQKSFLGLSILDISNPSSTTLSEDLSISLAGSDLHVFTQAELRVITQSFSSSNFLGEGGFGPVHKGFIDDKLRPGLKAQPVAVKLLDLDGLQGHREFMTEVMCLGKLKHPNLVKLIGYCCEEAHRLLVYEFMPRGSLESQLFRRCSLPLPWTTRLNIAYEAAKGLQFLHEAEKPIIYRDFKASNILLDSDYTAKLSDFGLAKDGPQGDDTHVSTRVMGTQGYAAPEYIMTGHLTAKSDVYSFGVVLLELLTGRKSVDIARSSRKETLVEWARPMLNDARKLGRIMDPRLEDQYSETGARKAATLAYQCLRYRPKTRPDISTVVSVLQDIKDYKDDIPIGIFTYTVPTKPRREVKETSLQNFDKPRRETKVTSLQNFDKTRREVKDTSLQNFDKTRREVKETSLQNFDKTRREVKETSLQNFDKPRNVSTTDNHQKFRSPAHTARNHRITLRNGYNSPMRNEAGGERY

SEQ ID NO: 71147 - protein, 370 aa, Arabidopsis thaliana
  peptide (1)..(370): Ceres Seq. ID no. 3066608
  misc_feature (1)..(298): Homolog of NCBI NO: 10176804 NR Description: serine/threonine protein kinase-like [Arabidopsis
  misc_feature (281)..(370): Homolog of NCBI NO: 10176804 NR Description: serine/threonine protein kinase-like [Arabidopsis
  misc_feature (1)..(294): Homolog of NCBI NO: 15238553 NR Description: serine/threonine protein kinase-like; protein id:
  misc_feature (296)..(370): Homolog of NCBI NO: 15238553 NR Description: serine/threonine protein kinase-like; protein id:
  misc_feature (281)..(337): Homolog of NCBI NO: 15238553 NR Description: serine/threonine protein kinase-like; protein id:
  misc_feature (1)..(271): Homolog of NCBI NO: 15225019 NR Description: putative protein kinase; protein id: At2g05940.1, by cDNA: gi_15810412, supported by cDNA: gi_21280976 [Arabidopsis >gi|25287639|pir||C84473 probable protein kinase putative protein
  misc_feature (340)..(370): Homolog of NCBI NO: 15225019 NR Description: putative protein kinase; protein id: At2g05940.1, by cDNA: gi_15810412, supported by cDNA: gi_21280976 [Arabidopsis >gi|25287639|pir||C84473 probable protein kinase putative protein
  misc_feature (1)..(291): Homolog of NCBI NO: 30013675 NR Description: Avr9/Cf-9 rapidly elicited protein 264 [Nicotiana
  misc_feature (1)..(285): Homolog of NCBI NO: 14484938 NR Description: auxin-regulated dual specificity cytosolic kinase
  misc_feature (1)..(249): Homolog of NCBI NO: 27436752 NR Description: Putative serine/threonine protein kinase [Oryza
MTEVMCLGKLKHPNLVKLIGYCCEEAHRLLVYEFMPRGSLESQLFRRCSLPLPWTTRLNIAYEAAKGLQFLHEAEKPIIYRDFKASNILLDSDYTAKLSDFGLAKDGPQGDDTHVSTRVMGTQGYAAPEYIMTGHLTAKSDVYSFGVVLLELLTGRKSVDIARSSRKETLVEWARPMLNDARKLGRIMDPRLEDQYSETGARKAATLAYQCLRYRPKTRPDISTVVSVLQDIKDYKDDIPIGIFTYTVPTKPRREVKETSLQNFDKPRRETKVTSLQNFDKTRREVKDTSLQNFDKTRREVKETSLQNFDKTRREVKETSLQNFDKPRNVSTTDNHQKFRSPAHTARNHRITLRNGYNSPMRNEAGGERY

SEQ ID NO: 71148 - DNA, 3657 bp, Arabidopsis thaliana
  misc_feature (1)..(3657): Ceres Seq. ID no. 3066975
  misc_feature: MA Experiment ID: 20000314 Result: Down-regulated in Transcription
  misc_feature: MA Experiment 20000314 PARAMETER Experiment Name: At_14day_Shoots-Roots_Sub_P Parameter: Age (day) Value: 14
  misc_feature: MA Experiment 20000314 PARAMETER Experiment Name: At_14day_Shoots-Roots_Sub_P Parameter: Organism Value: A. thaliana
  misc_feature: MA Experiment 20000314 PARAMETER Experiment Name: At_14day_Shoots-Roots_Sub_P Parameter: Plant Line Value: WS
  misc_feature: MA Experiment 20000314 PARAMETER Experiment Name: At_14day_Shoots-Roots_Sub_P Parameter: Tissue Value: Roots vs. Whole Plant
atggcaggaactccgatcgtgatctttgatggatcaggagatttttctttgtggaaaacaaggattatggcacatctaagcgtcattggacttaaggatgttgtcatcggaacatcgtctccgccgctcactgcagaagaagaagaagatccggagaaaaagaagaaacgagatgcagatgatgcagcaaggcttgagcgatgtgataaagcgaagaatgtgatcttccttaatgttgcagataaggtcttaagaaagatcgagctatgtcaaactgcagcagaagcttggggaactctagatcgattgttcatgattcgatctctacctcatagagtctttactcagctaagtttctatacttttaagatgcaagaaaacaagaaaatcgatgagaatattgatgatttcttaaagattgtggctgatttgaatcatttgcagattgaggtgactgatgaggttcaagcaattctgttgctaagttcgttgccttcaagatatgatggtttagttgaaaccatgaagtatagtaatagccgagaaaagttgaggttagatgatgtgatggttgcagctcgagacaaagaaagagagttgtcacagagtaatcgatctgtatcagaaggaaattttgctagaggaagacaagaaggatcttccaacaataaccaaagaaataagggtaaagggagatcaagatctaagtctcgagatggtaagcgagtatgctggatatgtggtaaagagggacactttaagaaacagtgtttcaaatggcttgaaagaaacaaagataaaggatcaggatcaagttcagacaaaggagaagcgagtatagctaaagctgaatatgatccagcaatggttcttatggcagaagaagagaatctatttgtttcagggaatactgcagacgaatgggttctagatacaggctgttcttttcacatgacaccaaggagagattggttttcagattttagagaagtaaaaggaattggaaacataagaatcaagaactctgatgggacacatattactttaacagaagtgagatacatgccaacaatgtctaggaacctaatttctttaggaaccttagaagacaaaggatgctggttcaagtctcaagatgaaaatcatagagtcagtttcccatctgctcagcatgttacaaaggagaagctagcttatatccattcagatttatggggatctcctcataatccagcatctttgggaaactgtcaatacttcatctccttcattgatgactattccaggaaagtgtggatatattttctgaagaagaaagatgaagcttttgagaaatttgttgaatggaagaaaatggtggaaaatcagtctgataagaaggttaagaaactcagaactgataatggcttagagtactgtaatcattactttgagaagttttgtaaagaggaaggcattgtaaggcacaagactgttgcttacacacctcaacagaacggtgtcgctgagagactcaatcgaactataatggataaagttcgcagcatgttaagtgaaagtggtatggaaaagagattttgggcagaagctgctgctacagcagtgtatttaataaatcgatctccctctactgcaacgaactttgagctgccagaagaaagatggacaggagcgttaccggatatgagttcattgagaaggtttggttgtttggcttatgtacacgcagatcaagggaagttgaatcctagagcaaagaagggaatattcacgagctatcctgagggtgttaaaggatataaagtttggctacttgaagaaaagaagtgtgtcattagtagaaacgtgatattcagagaggaaatgatgtacaaagaccttaaaactgattctcagaacagtttctatgaagaagtcatggagaacataggagaagaacagattattaatgaacagaatcaagtgcagacagaaacttatgaagaagaagaaagcagtagtgataattctactgaagaagtggatctcagtaactacctactagtaagagacagggagaaaaggactgttaagttgaacagaagatataatgagtctaatatggttgggtttgcctacaatacagaagatgggggtaagtctaagcctaaaacataccaagaggcattaagtgatcaagattgggagttatggaatggagctatgaaagaagagatatcatccatgggaaaaaaccacacgtgggacttagtagataaactagtaaatgcgaaaatcattggttgcagatgggtcttcacaaggaaagctggtattcccggagtggaagcacctagatttaaagctcggctggtagccaaaggttttacacagaaagaaggtgtagattataatgaaatcttctcaccagttgttaaacatgtgtctatcaggtttatgctctcaatggtggctcaatttgacatggagctacatcagatggacgttaaaacagcgttcctacatggatttcttgatgaagagatattgatggctcaacctgaaggttttgaagataagaaataccctgaaaaggtatgtttactgaaaagatccctatatggtctaaagcaatctcctagacagtggaatctgagatttgatgagtttataaagagtattgatttcactaggagcgcttatgacagctgtgtatacttgaagcagcaaactgctaaagaaaagtcaagtatcatggagttaaaacagttactgggtaaagagtttgagatgaaggatttgggtgaagctcagaaaattttaggcatggagattgctaaagatagagctgcaggtgtgttgactctgtcacaggaaggttatgtgaagaaagttttgagatctagtcagatggatcaggctaaacctgtgtcaacaccattaggaatccatttcaagctccgagcagctactgaaaaagagtatcaagaacaatttgacagaatgaagattgtaccttactcaaacactgttggaagcatcatgtattcaatgataggcacgaggccagatcttgcttatccagttggagtgatcagtcactacatgagtagaccattaaaggatcattggcaagcggctaagtgggtcttgaggtacatgaaggggacagagaaaaagaagctttgcttcagaaagaataaagacttcttattaagaggttactgtgactctgactatggtggtgattatgataaccggaggtcaatcacaggttatgttttcactattggtgtaaacaccattagctggaaatcacggcaacagaaggtggtagctatatctactacagaggcagaatatatggcattaactgatgctgttaaagaggctttgtggctgagaggtttttctgaagaacttggttttgcacaggaaagtgtagaggtgaattgtgattcagagagtgctattgctttggcaaagaactctgtacatcacgaaagaacaaagcatattgatatcaggttacatttcattcgggatatcataaatgcaggtctggttaaagtggtgaagattgcaagtgaatgcaatcctgcagatattttttcaaaggtattgcccgtggagaagtttgaaggagcattgcatatgctccgagttactgagaactga

SEQ ID NO: 71149 - protein, 1218 aa, Arabidopsis thaliana
  peptide (1)..(1218): Ceres Seq. ID no. 3066976
  misc_feature (392)..(556): Pfam Name: Integrase core domain Pfam Description: Integrase core domain
  misc_feature (214)..(414): Homolog of NCBI NO: 15230716 NR Description: copia-like polyprotein; protein id: At3g45520.1
  misc_feature (642)..(1147): Homolog of NCBI NO: 99721 NR Description: retrovirus-related polyprotein - Arabidopsis
  misc_feature (4)..(386): Homolog of NCBI NO: 99721 NR Description: retrovirus-related polyprotein - Arabidopsis
  misc_feature (383)..(704): Homolog of NCBI NO: 99721 NR Description: retrovirus-related polyprotein - Arabidopsis
  misc_feature (380)..(1215): Homolog of NCBI NO: 15234421 NR Description: putative transposable element; protein id:
  misc_feature (6)..(386): Homolog of NCBI NO: 15234421 NR Description: putative transposable element; protein id:
  misc_feature (295)..(516): Homolog of NCBI NO: 25405112 NR Description: hypothetical protein T10P12.1 [imported] - thaliana >gi|5080760|gb|AAD39270.1|AC007203_2 Similar to reverse
  misc_feature (975)..(1187): Homolog of NCBI NO: 25405112 NR Description: hypothetical protein T10P12.1 [imported] - thaliana >gi|5080760|gb|AAD39270.1|AC007203_2 Similar to reverse
  misc_feature (668)..(862): Homolog of NCBI NO: 25405112 NR Description: hypothetical protein T10P12.1 [imported] - thaliana >gi|5080760|gb|AAD39270.1|AC007203_2 Similar to reverse
  misc_feature (73)..(216): Homolog of NCBI NO: 25405112 NR Description: hypothetical protein T10P12.1 [imported] - thaliana >gi|5080760|gb|AAD39270.1|AC007203_2 Similar to reverse
MAGTPIVIFDGSGDFSLWKTRIMAHLSVIGLKDVVIGTSSPPLTAEEEEDPEKKKKRDADDAARLERCDKAKNVIFLNVADKVLRKIELCQTAAEAWGTLDRLFMIRSLPHRVFTQLSFYTFKMQENKKIDENIDDFLKIVADLNHLQIEVTDEVQAILLLSSLPSRYDGLVETMKYSNSREKLRLDDVMVAARDKERELSQSNRSVSEGNFARGRQEGSSNNNQRNKGKGRSRSKSRDGKRVCWICGKEGHFKKQCFKWLERNKDKGSGSSSDKGEASIAKAEYDPAMVLMAEEENLFVSGNTADEWVLDTGCSFHMTPRRDWFSDFREVKGIGNIRIKNSDGTHITLTEVRYMPTMSRNLISLGTLEDKGCWFKSQDENHRVSFPSAQHVTKEKLAYIHSDLWGSPHNPASLGNCQYFISFIDDYSRKVWIYFLKKKDEAFEKFVEWKKMVENQSDKKVKKLRTDNGLEYCNHYFEKFCKEEGIVRHKTVAYTPQQNGVAERLNRTIMDKVRSMLSESGMEKRFWAEAAATAVYLINRSPSTATNFELPEERWTGALPDMSSLRRFGCLAYVHADQGKLNPRAKKGIFTSYPEGVKGYKVWLLEEKKCVISRNVIFREEMMYKDLKTDSQNSFYEEVMENIGEEQIINEQNQVQTETYEEEESSSDNSTEEVDLSNYLLVRDREKRTVKLNRRYNESNMVGFAYNTEDGGKSKPKTYQEALSDQDWELWNGAMKEEISSMGKNHTWDLVDKLVNAKIIGCRWVFTRKAGIPGVEAPRFKARLVAKGFTQKEGVDYNEIFSPVVKHVSIRFMLSMVAQFDMELHQMDVKTAFLHGFLDEEILMAQPEGFEDKKYPEKVCLLKRSLYGLKQSPRQWNLRFDEFIKSIDFTRSAYDSCVYLKQQTAKEKSSIMELKQLLGKEFEMKDLGEAQKILGMEIAKDRAAGVLTLSQEGYVKKVLRSSQMDQAKPVSTPLGIHFKLRAATEKEYQEQFDRMKIVPYSNTVGSIMYSMIGTRPDLAYPVGVISHYMSRPLKDHWQAAKWVLRYMKGTEKKKLCFRKNKDFLLRGYCDSDYGGDYDNRRSITGYVFTIGVNTISWKSRQQKVVAISTTEAEYMALTDAVKEALWLRGFSEELGFAQESVEVNCDSESAIALAKNSVHHERTKHIDIRLHFIRDIINAGLVKVVKIASECNPADIFSKVLPVEKFEGALHMLRVTEN

SEQ ID NO: 71150 - protein, 1196 aa, Arabidopsis thaliana
  peptide (1)..(1196): Ceres Seq. ID no. 3066977
  misc_feature (370)..(534): Pfam Name: Integrase core domain Pfam Description: Integrase core domain
  misc_feature (192)..(392): Homolog of NCBI NO: 15230716 NR Description: copia-like polyprotein; protein id: At3g45520.1
  misc_feature (620)..(1125): Homolog of NCBI NO: 99721 NR Description: retrovirus-related polyprotein - Arabidopsis
  misc_feature (1)..(364): Homolog of NCBI NO: 99721 NR Description: retrovirus-related polyprotein - Arabidopsis
  misc_feature (361)..(682): Homolog of NCBI NO: 99721 NR Description: retrovirus-related polyprotein - Arabidopsis
  misc_feature (358)..(1193): Homolog of NCBI NO: 15234421 NR Description: putative transposable element; protein id:
  misc_feature (1)..(364): Homolog of NCBI NO: 15234421 NR Description: putative transposable element; protein id:
  misc_feature (273)..(494): Homolog of NCBI NO: 25405112 NR Description: hypothetical protein T10P12.1 [imported] - thaliana >gi|5080760|gb|AAD39270.1|AC007203_2 Similar to reverse
  misc_feature (953)..(1165): Homolog of NCBI NO: 25405112 NR Description: hypothetical protein T10P12.1 [imported] - thaliana >gi|5080760|gb|AAD39270.1|AC007203_2 Similar to reverse
  misc_feature (646)..(840): Homolog of NCBI NO: 25405112 NR Description: hypothetical protein T10P12.1 [imported] - thaliana >gi|5080760|gb|AAD39270.1|AC007203_2 Similar to reverse
  misc_feature (51)..(194): Homolog of NCBI NO: 25405112 NR Description: hypothetical protein T10P12.1 [imported] - thaliana >gi|5080760|gb|AAD39270.1|AC007203_2 Similar to reverse
MAHLSVIGLKDVVIGTSSPPLTAEEEEDPEKKKKRDADDAARLERCDKAKNVIFLNVADKVLRKIELCQTAAEAWGTLDRLFMIRSLPHRVFTQLSFYTFKMQENKKIDENIDDFLKIVADLNHLQIEVTDEVQAILLLSSLPSRYDGLVETMKYSNSREKLRLDDVMVAARDKERELSQSNRSVSEGNFARGRQEGSSNNNQRNKGKGRSRSKSRDGKRVCWICGKEGHFKKQCFKWLERNKDKGSGSSSDKGEASIAKAEYDPAMVLMAEEENLFVSGNTADEWVLDTGCSFHMTPRRDWFSDFREVKGIGNIRIKNSDGTHITLTEVRYMPTMSRNLISLGTLEDKGCWFKSQDENHRVSFPSAQHVTKEKLAYIHSDLWGSPHNPASLGNCQYFISFIDDYSRKVWIYFLKKKDEAFEKFVEWKKMVENQSDKKVKKLRTDNGLEYCNHYFEKFCKEEGIVRHKTVAYTPQQNGVAERLNRTIMDKVRSMLSESGMEKRFWAEAAATAVYLINRSPSTATNFELPEERWTGALPDMSSLRRFGCLAYVHADQGKLNPRAKKGIFTSYPEGVKGYKVWLLEEKKCVISRNVIFREEMMYKDLKTDSQNSFYEEVMENIGEEQIINEQNQVQTETYEEEESSSDNSTEEVDLSNYLLVRDREKRTVKLNRRYNESNMVGFAYNTEDGGKSKPKTYQEALSDQDWELWNGAMKEEISSMGKNHTWDLVDKLVNAKIIGCRWVFTRKAGIPGVEAPRFKARLVAKGFTQKEGVDYNEIFSPVVKHVSIRFMLSMVAQFDMELHQMDVKTAFLHGFLDEEILMAQPEGFEDKKYPEKVCLLKRSLYGLKQSPRQWNLRFDEFIKSIDFTRSAYDSCVYLKQQTAKEKSSIMELKQLLGKEFEMKDLGEAQKILGMEIAKDRAAGVLTLSQEGYVKKVLRSSQMDQAKPVSTPLGIHFKLRAATEKEYQEQFDRMKIVPYSNTVGSIMYSMIGTRPDLAYPVGVISHYMSRPLKDHWQAAKWVLRYMKGTEKKKLCFRKNKDFLLRGYCDSDYGGDYDNRRSITGYVFTIGVNTISWKSRQQKVVAISTTEAEYMALTDAVKEALWLRGFSEELGFAQESVEVNCDSESAIALAKNSVHHERTKHIDIRLHFIRDIINAGLVKVVKIASECNPADIFSKVLPVEKFEGALHMLRVTEN

SEQ ID NO: 71151 - protein, 1114 aa, Arabidopsis thaliana
  peptide (1)..(1114): Ceres Seq. ID no. 3066978
  misc_feature (288)..(452): Pfam Name: Integrase core domain Pfam Description: Integrase core domain
  misc_feature (110)..(310): Homolog of NCBI NO: 15230716 NR Description: copia-like polyprotein; protein id: At3g45520.1
  misc_feature (538)..(1043): Homolog of NCBI NO: 99721 NR Description: retrovirus-related polyprotein - Arabidopsis
  misc_feature (1)..(282): Homolog of NCBI NO: 99721 NR Description: retrovirus-related polyprotein - Arabidopsis
  misc_feature (279)..(600): Homolog of NCBI NO: 99721 NR Description: retrovirus-related polyprotein - Arabidopsis
  misc_feature (276)..(1111): Homolog of NCBI NO: 15234421 NR Description: putative transposable element; protein id:
  misc_feature (1)..(282): Homolog of NCBI NO: 15234421 NR Description: putative transposable element; protein id:
  misc_feature (191)..(412): Homolog of NCBI NO: 25405112 NR Description: hypothetical protein T10P12.1 [imported] - thaliana >gi|5080760|gb|AAD39270.1|AC007203_2 Similar to reverse
  misc_feature (871)..(1083): Homolog of NCBI NO: 25405112 NR Description: hypothetical protein T10P12.1 [imported] - thaliana >gi|5080760|gb|AAD39270.1|AC007203_2 Similar to reverse
  misc_feature (564)..(758): Homolog of NCBI NO: 25405112 NR Description: hypothetical protein T10P12.1 [imported] - thaliana >gi|5080760|gb|AAD39270.1|AC007203_2 Similar to reverse
  misc_feature (1)..(112): Homolog of NCBI NO: 25405112 NR Description: hypothetical protein T10P12.1 [imported] - thaliana >gi|5080760|gb|AAD39270.1|AC007203_2 Similar to reverse
MIRSLPHRVFTQLSFYTFKMQENKKIDENIDDFLKIVADLNHLQIEVTDEVQAILLLSSLPSRYDGLVETMKYSNSREKLRLDDVMVAARDKERELSQSNRSVSEGNFARGRQEGSSNNNQRNKGKGRSRSKSRDGKRVCWICGKEGHFKKQCFKWLERNKDKGSGSSSDKGEASIAKAEYDPAMVLMAEEENLFVSGNTADEWVLDTGCSFHMTPRRDWFSDFREVKGIGNIRIKNSDGTHITLTEVRYMPTMSRNLISLGTLEDKGCWFKSQDENHRVSFPSAQHVTKEKLAYIHSDLWGSPHNPASLGNCQYFISFIDDYSRKVWIYFLKKKDEAFEKFVEWKKMVENQSDKKVKKLRTDNGLEYCNHYFEKFCKEEGIVRHKTVAYTPQQNGVAERLNRTIMDKVRSMLSESGMEKRFWAEAAATAVYLINRSPSTATNFELPEERWTGALPDMSSLRRFGCLAYVHADQGKLNPRAKKGIFTSYPEGVKGYKVWLLEEKKCVISRNVIFREEMMYKDLKTDSQNSFYEEVMENIGEEQIINEQNQVQTETYEEEESSSDNSTEEVDLSNYLLVRDREKRTVKLNRRYNESNMVGFAYNTEDGGKSKPKTYQEALSDQDWELWNGAMKEEISSMGKNHTWDLVDKLVNAKIIGCRWVFTRKAGIPGVEAPRFKARLVAKGFTQKEGVDYNEIFSPVVKHVSIRFMLSMVAQFDMELHQMDVKTAFLHGFLDEEILMAQPEGFEDKKYPEKVCLLKRSLYGLKQSPRQWNLRFDEFIKSIDFTRSAYDSCVYLKQQTAKEKSSIMELKQLLGKEFEMKDLGEAQKILGMEIAKDRAAGVLTLSQEGYVKKVLRSSQMDQAKPVSTPLGIHFKLRAATEKEYQEQFDRMKIVPYSNTVGSIMYSMIGTRPDLAYPVGVISHYMSRPLKDHWQAAKWVLRYMKGTEKKKLCFRKNKDFLLRGYCDSDYGGDYDNRRSITGYVFTIGVNTISWKSRQQKVVAISTTEAEYMALTDAVKEALWLRGFSEELGFAQESVEVNCDSESAIALAKNSVHHERTKHIDIRLHFIRDIINAGLVKVVKIASECNPADIFSKVLPVEKFEGALHMLRVTEN

SEQ ID NO: 71152 - DNA, 1377 bp, Arabidopsis thaliana
  misc_feature (1)..(1377): Ceres Seq. ID no. 3067643
  misc_feature: MA Experiment ID: 20000171 Result: Down-regulated in Transcription
  misc_feature: MA Experiment 20000171 PARAMETER Experiment Name: At_42deg_Heat_P Parameter: Age (day) Value: 14
  misc_feature: MA Experiment 20000171 PARAMETER Experiment Name: At_42deg_Heat_P Parameter: Organism Value: A. thaliana
  misc_feature: MA Experiment 20000171 PARAMETER Experiment Name: At_42deg_Heat_P Parameter: Plant Line Value: WS
  misc_feature: MA Experiment 20000171 PARAMETER Experiment Name: At_42deg_Heat_P Parameter: Temperature (deg C) Value: 42 vs. 22
  misc_feature: MA Experiment 20000171 PARAMETER Experiment Name: At_42deg_Heat_P Parameter: Timepoint (hr) Value: 1
  misc_feature: MA Experiment 20000171 PARAMETER Experiment Name: At_42deg_Heat_P Parameter: Tissue Value: Aerial
  misc_feature: MA Experiment ID: 20000173 Result: Down-regulated in Transcription
  misc_feature: MA Experiment 20000173 PARAMETER Experiment Name: At_42deg_Heat_P Parameter: Age (day) Value: 14
  misc_feature: MA Experiment 20000173 PARAMETER Experiment Name: At_42deg_Heat_P Parameter: Organism Value: A. thaliana
  misc_feature: MA Experiment 20000173 PARAMETER Experiment Name: At_42deg_Heat_P Parameter: Plant Line Value: WS
  misc_feature: MA Experiment 20000173 PARAMETER Experiment Name: At_42deg_Heat_P Parameter: Temperature (deg C) Value: 42 vs. 22
  misc_feature: MA Experiment 20000173 PARAMETER Experiment Name: At_42deg_Heat_P Parameter: Timepoint (hr) Value: 6
  misc_feature: MA Experiment 20000173 PARAMETER Experiment Name: At_42deg_Heat_P Parameter: Tissue Value: Aerial
  misc_feature: MA Experiment ID: 20000184 Result: Down-regulated in Transcription
  misc_feature: MA Experiment 20000184 PARAMETER Experiment Name: At_Shoots__P Parameter: Age (day) Value: 7
  misc_feature: MA Experiment 20000184 PARAMETER Experiment Name: At_Shoots__P Parameter: Tissue Value: Shoots vs. Whole Plant
  misc_feature: MA Experiment ID: 20000185 Result: Down-regulated in Transcription
  misc_feature: MA Experiment 20000185 PARAMETER Experiment Name: At_Roots__P Parameter: Age (day) Value: 7 vs. 21
  misc_feature: MA Experiment 20000185 PARAMETER Experiment Name: At_Roots__P Parameter: Organism Value: A. thaliana
  misc_feature: MA Experiment 20000185 PARAMETER Experiment Name: At_Roots__P Parameter: Tissue Value: Roots vs. Whole Plant
  misc_feature: MA Experiment ID: 20000234 Result: Down-regulated in Transcription
  misc_feature: MA Experiment 20000234 PARAMETER Experiment Name: At_Siliques_P Parameter: Age (day) Value: 21
  misc_feature: MA Experiment 20000234 PARAMETER Experiment Name: At_Siliques_P Parameter: Organism Value: A. thaliana
  misc_feature: MA Experiment 20000234 PARAMETER Experiment Name: At_Siliques_P Parameter: Plant Line Value: WS
  misc_feature: MA Experiment 20000234 PARAMETER Experiment Name: At_Siliques_P Parameter: Tissue Value: Less Than 5mm Siliques vs. Whole Plant
  misc_feature: MA Experiment ID: 20000235 Result: Down-regulated in Transcription
  misc_feature: MA Experiment 20000235 PARAMETER Experiment Name: At_Siliques_P Parameter: Age (day) Value: 21
  misc_feature: MA Experiment 20000235 PARAMETER Experiment Name: At_Siliques_P Parameter: Organism Value: A. thaliana
  misc_feature: MA Experiment 20000235 PARAMETER Experiment Name: At_Siliques_P Parameter: Plant Line Value: WS
  misc_feature: MA Experiment 20000235 PARAMETER Experiment Name: At_Siliques_P Parameter: Tissue Value: 5-10mm Siliques vs. Whole Plant
  misc_feature: MA Experiment ID: 20000265 Result: Down-regulated in Transcription
  misc_feature: MA Experiment 20000265 PARAMETER Experiment Name: At_Open_Flower_P Parameter: Age (day) Value: 21
  misc_feature: MA Experiment 20000265 PARAMETER Experiment Name: At_Open_Flower_P Parameter: Plant Line Value: WS
  misc_feature: MA Experiment 20000265 PARAMETER Experiment Name: At_Open_Flower_P Parameter: Tissue Value: Closed Flower vs. Whole Plant
  misc_feature: MA Experiment ID: 20000286 Result: Down-regulated in Transcription
  misc_feature: MA Experiment 20000286 PARAMETER Experiment Name: At_Open_Flower_P Parameter: Age (day) Value: 21
  misc_feature: MA Experiment 20000286 PARAMETER Experiment Name: At_Open_Flower_P Parameter: Plant Line Value: WS
  misc_feature: MA Experiment 20000286 PARAMETER Experiment Name: At_Open_Flower_P Parameter: Tissue Value: Half Open vs. Whole Plant
  misc_feature: MA Experiment ID: 20001557 Result: Down-regulated in Transcription
  misc_feature: MA Experiment 20001557 PARAMETER Experiment Name: At_Drought_Soil_Dry_P Parameter: Age (day) Value: 27
  misc_feature: MA Experiment 20001557 PARAMETER Experiment Name: At_Drought_Soil_Dry_P Parameter: Organism Value: A. thaliana
  misc_feature: MA Experiment 20001557 PARAMETER Experiment Name: At_Drought_Soil_Dry_P Parameter: Plant Line Value: WS
  misc_feature: MA Experiment 20001557 PARAMETER Experiment Name: At_Drought_Soil_Dry_P Parameter: Post Timepoint (hr) Value: 3
  misc_feature: MA Experiment 20001557 PARAMETER Experiment Name: At_Drought_Soil_Dry_P Parameter: Post-Treatment Value: Re-Water vs. No Drought
  misc_feature: MA Experiment 20001557 PARAMETER Experiment Name: At_Drought_Soil_Dry_P Parameter: Timepoint (day) Value: 13
  misc_feature: MA Experiment 20001557 PARAMETER Experiment Name: At_Drought_Soil_Dry_P Parameter: Treatment Value: Drought vs. No Drought
atgagaggaaataaaattgttgatctagaaaaagttgaagagcttgtgcttatcaaacgatctaaatggaattttcctcccagccctcctaagtttccggtcatcggaaacttacatcaacttggagaattgcctcacaggtcacttcaacgtctagccgaaaaaaccggagatgttatgcttattcacttagggtttgtccctgtaactgttatctcatcgaaagaagcagctgaagaagtgcttagaactcatgacctaaactgttgcagcaggcctaatcttgttgggacgaggctactttctcggggttttaaagatgttggttttactccatacggtgaagagtggaaggagcggcgtaagttcttggtgcgtgagtttttctctttgaaaaaggttcagtctttcggttatatcagagaggaagaatgtaactttcttgtcaagaaactgttggaatcagccgtggatcaatctccggttgatttgagcaaaacccttttttggctaaccgcgagtgtcatgtttagagttgcttttggacagagtttccacgagagcgagttcatcgataaagacaaggtcgatgagcttgtgtttgaagccgagaccgctcaagctagtttcacttgctctgatttcttccctattgctggacttggttggctcgttgactgtatttccgggcaacacaagaggctcaaagatgttttcttcaagctggatgctctgtttcaatgttggatgtcatgcagaaacaacaatatatttctcggagggatagacaccggagctcttactatgatatgggcaatgacggagctcgctagaaacccggaagtgatgaagaaagttcaaggcgagatccgagaccgccttggcagaaataaagagagaatcaccgaagaagatatcaataaagttccttacttgaacctagtgatcaaggaaacattcagattacaccatccagttcctcttcttctcccaagggaaacaatggctcacatcaaggttcaaggctatgatattcctcccaagagacggatcttggtcaacgcttgggcgataggaagagatccaaaactctggactaacccggaagagtttaaccccgagagatttatcaatagtcctgtggattataggggacaacatttcgagctcttaccgtttgggtctggacgaaggatatgtcccgggatatcgatgggtatggctactgtagaattgggactcttgaacttactttacttcttcgactggaagttgcctgatgggatgacacataaagatatcgatactgaagaagttggcactcttacaatcgtcaagaaagtaccactaaaacttcttccagttcgatttcagtga

SEQ ID NO: 71153 - protein, 458 aa, Arabidopsis thaliana
  peptide (1)..(458): Ceres Seq. ID no. 3067644
  misc_feature (29)..(452): Pfam Name: Cytochrome P450 Pfam Description: Cytochrome P450
  misc_feature (18)..(247): Homolog of NCBI NO: 15231520 NR Description: cytochrome p450 family; protein id: At3g26170.1, by cDNA: 262802. [Arabidopsis thaliana] Cytochrome P450 71B19 >gi|11994436|dbj|BAB02438.1| cytochrome
  misc_feature (18)..(247): Homolog of NCBI NO: 21554748 NR Description: cytochrome P450, putative [Arabidopsis thaliana]
  misc_feature (256)..(458): Homolog of NCBI NO: 15231520 NR Description: cytochrome p450 family; protein id: At3g26170.1, by cDNA: 262802. [Arabidopsis thaliana] Cytochrome P450 71B19 >gi|11994436|dbj|BAB02438.1| cytochrome
  misc_feature (256)..(458): Homolog of NCBI NO: 21554748 NR Description: cytochrome P450, putative [Arabidopsis thaliana]
  misc_feature (18)..(247): Homolog of NCBI NO: 15231517 NR Description: cytochrome p450 family; protein id: At3g26160.1 thaliana] >gi|13878388|sp|Q9LTM6|C72H_ARATH Cytochrome P450 71B17
  misc_feature (256)..(456): Homolog of NCBI NO: 15231517 NR Description: cytochrome p450 family; protein id: At3g26160.1 thaliana] >gi|13878388|sp|Q9LTM6|C72H_ARATH Cytochrome P450 71B17
  misc_feature (29)..(458): Homolog of NCBI NO: 11994435 NR Description: cytochrome P450 [Arabidopsis thaliana]
  misc_feature (18)..(247): Homolog of NCBI NO: 15231516 NR Description: cytochrome p450 family; protein id: At3g26150.1 thaliana] >gi|13878389|sp|Q9LTM7|C72G_ARATH Cytochrome P450 71B16
  misc_feature (256)..(458): Homolog of NCBI NO: 15231516 NR Description: cytochrome p450 family; protein id: At3g26150.1 thaliana] >gi|13878389|sp|Q9LTM7|C72G_ARATH Cytochrome P450 71B16
  misc_feature (18)..(247): Homolog of NCBI NO: 15231522 NR Description: cytochrome p450 family; protein id: At3g26180.1, by cDNA: gi_15810462, supported by cDNA: gi_16226473 [Arabidopsis >gi|13878386|sp|Q9LTM3|C72K_ARATH Cytochrome P450 71B20
MRGNKIVDLEKVEELVLIKRSKWNFPPSPPKFPVIGNLHQLGELPHRSLQRLAEKTGDVMLIHLGFVPVTVISSKEAAEEVLRTHDLNCCSRPNLVGTRLLSRGFKDVGFTPYGEEWKERRKFLVREFFSLKKVQSFGYIREEECNFLVKKLLESAVDQSPVDLSKTLFWLTASVMFRVAFGQSFHESEFIDKDKVDELVFEAETAQASFTCSDFFPIAGLGWLVDCISGQHKRLKDVFFKLDALFQCWMSCRNNNIFLGGIDTGALTMIWAMTELARNPEVMKKVQGEIRDRLGRNKERITEEDINKVPYLNLVIKETFRLHHPVPLLLPRETMAHIKVQGYDIPPKRRILVNAWAIGRDPKLWTNPEEFNPERFINSPVDYRGQHFELLPFGSGRRICPGISMGMATVELGLLNLLYFFDWKLPDGMTHKDIDTEEVGTLTIVKKVPLKLLPVRFQ

SEQ ID NO: 71154 - protein, 399 aa, Arabidopsis thaliana
  peptide (1)..(399): Ceres Seq. ID no. 3067645
  misc_feature (1)..(393): Pfam Name: Cytochrome P450 Pfam Description: Cytochrome P450
  misc_feature (1)..(399): Homolog of NCBI NO: 11994435 NR Description: cytochrome P450 [Arabidopsis thaliana]
  misc_feature (1)..(188): Homolog of NCBI NO: 15231517 NR Description: cytochrome p450 family; protein id: At3g26160.1 thaliana] >gi|13878388|sp|Q9LTM6|C72H_ARATH Cytochrome P450 71B17
  misc_feature (197)..(397): Homolog of NCBI NO: 15231517 NR Description: cytochrome p450 family; protein id: At3g26160.1 thaliana] >gi|13878388|sp|Q9LTM6|C72H_ARATH Cytochrome P450 71B17
  misc_feature (1)..(188): Homolog of NCBI NO: 15231520 NR Description: cytochrome p450 family; protein id: At3g26170.1, by cDNA: 262802. [Arabidopsis thaliana] Cytochrome P450 71B19 >gi|11994436|dbj|BAB02438.1| cytochrome
  misc_feature (1)..(188): Homolog of NCBI NO: 21554748 NR Description: cytochrome P450, putative [Arabidopsis thaliana]
  misc_feature (197)..(399): Homolog of NCBI NO: 15231520 NR Description: cytochrome p450 family; protein id: At3g26170.1, by cDNA: 262802. [Arabidopsis thaliana] Cytochrome P450 71B19 >gi|11994436|dbj|BAB02438.1| cytochrome
  misc_feature (197)..(399): Homolog of NCBI NO: 21554748 NR Description: cytochrome P450, putative [Arabidopsis thaliana]
  misc_feature (1)..(188): Homolog of NCBI NO: 15231516 NR Description: cytochrome p450 family; protein id: At3g26150.1 thaliana] >gi|13878389|sp|Q9LTM7|C72G_ARATH Cytochrome P450 71B16
  misc_feature (197)..(399): Homolog of NCBI NO: 15231516 NR Description: cytochrome p450 family; protein id: At3g26150.1 thaliana] >gi|13878389|sp|Q9LTM7|C72G_ARATH Cytochrome P450 71B16
  misc_feature (1)..(188): Homolog of NCBI NO: 15231522 NR Description: cytochrome p450 family; protein id: At3g26180.1, by cDNA: gi_15810462, supported by cDNA: gi_16226473 [Arabidopsis >gi|13878386|sp|Q9LTM3|C72K_ARATH Cytochrome P450 71B20
MLIHLGFVPVTVISSKEAAEEVLRTHDLNCCSRPNLVGTRLLSRGFKDVGFTPYGEEWKERRKFLVREFFSLKKVQSFGYIREEECNFLVKKLLESAVDQSPVDLSKTLFWLTASVMFRVAFGQSFHESEFIDKDKVDELVFEAETAQASFTCSDFFPIAGLGWLVDCISGQHKRLKDVFFKLDALFQCWMSCRNNNIFLGGIDTGALTMIWAMTELARNPEVMKKVQGEIRDRLGRNKERITEEDINKVPYLNLVIKETFRLHHPVPLLLPRETMAHIKVQGYDIPPKRRILVNAWAIGRDPKLWTNPEEFNPERFINSPVDYRGQHFELLPFGSGRRICPGISMGMATVELGLLNLLYFFDWKLPDGMTHKDIDTEEVGTLTIVKKVPLKLLPVRFQ

SEQ ID NO: 71155 - protein, 283 aa, Arabidopsis thaliana
  peptide (1)..(283): Ceres Seq. ID no. 3067646
  misc_feature (1)..(277): Pfam Name: Cytochrome P450 Pfam Description: Cytochrome P450
  misc_feature (1)..(283): Homolog of NCBI NO: 11994435 NR Description: cytochrome P450 [Arabidopsis thaliana]
  misc_feature (1)..(72): Homolog of NCBI NO: 15231517 NR Description: cytochrome p450 family; protein id: At3g26160.1 thaliana] >gi|13878388|sp|Q9LTM6|C72H_ARATH Cytochrome P450 71B17
  misc_feature (81)..(281): Homolog of NCBI NO: 15231517 NR Description: cytochrome p450 family; protein id: At3g26160.1 thaliana] >gi|13878388|sp|Q9LTM6|C72H_ARATH Cytochrome P450 71B17
  misc_feature (1)..(72): Homolog of NCBI NO: 15231520 NR Description: cytochrome p450 family; protein id: At3g26170.1, by cDNA: 262802. [Arabidopsis thaliana] Cytochrome P450 71B19 >gi|11994436|dbj|BAB02438.1| cytochrome
  misc_feature (1)..(72): Homolog of NCBI NO: 21554748 NR Description: cytochrome P450, putative [Arabidopsis thaliana]
  misc_feature (81)..(283): Homolog of NCBI NO: 15231520 NR Description: cytochrome p450 family; protein id: At3g26170.1, by cDNA: 262802. [Arabidopsis thaliana] Cytochrome P450 71B19 >gi|11994436|dbj|BAB02438.1| cytochrome
  misc_feature (81)..(283): Homolog of NCBI NO: 21554748 NR Description: cytochrome P450, putative [Arabidopsis thaliana]
  misc_feature (1)..(72): Homolog of NCBI NO: 15231516 NR Description: cytochrome p450 family; protein id: At3g26150.1 thaliana] >gi|13878389|sp|Q9LTM7|C72G_ARATH Cytochrome P450 71B16
  misc_feature (81)..(283): Homolog of NCBI NO: 15231516 NR Description: cytochrome p450 family; protein id: At3g26150.1 thaliana] >gi|13878389|sp|Q9LTM7|C72G_ARATH Cytochrome P450 71B16
  misc_feature (1)..(72): Homolog of NCBI NO: 15231522 NR Description: cytochrome p450 family; protein id: At3g26180.1, by cDNA: gi_15810462, supported by cDNA: gi_16226473 [Arabidopsis >gi|13878386|sp|Q9LTM3|C72K_ARATH Cytochrome P450 71B20
MFRVAFGQSFHESEFIDKDKVDELVFEAETAQASFTCSDFFPIAGLGWLVDCISGQHKRLKDVFFKLDALFQCWMSCRNNNIFLGGIDTGALTMIWAMTELARNPEVMKKVQGEIRDRLGRNKERITEEDINKVPYLNLVIKETFRLHHPVPLLLPRETMAHIKVQGYDIPPKRRILVNAWAIGRDPKLWTNPEEFNPERFINSPVDYRGQHFELLPFGSGRRICPGISMGMATVELGLLNLLYFFDWKLPDGMTHKDIDTEEVGTLTIVKKVPLKLLPVRFQ

SEQ ID NO: 71156 - DNA, 777 bp, Arabidopsis thaliana
  misc_feature (1)..(777): Ceres Seq. ID no. 3067976
  misc_feature: MA Experiment ID: 20000185 Result: Down-regulated in Transcription
  misc_feature: MA Experiment 20000185 PARAMETER Experiment Name: At_Roots__P Parameter: Age (day) Value: 7 vs. 21
  misc_feature: MA Experiment 20000185 PARAMETER Experiment Name: At_Roots__P Parameter: Organism Value: A. thaliana
  misc_feature: MA Experiment 20000185 PARAMETER Experiment Name: At_Roots__P Parameter: Tissue Value: Roots vs. Whole Plant
  misc_feature: MA Experiment ID: 20000227 Result: Down-regulated in Transcription
  misc_feature: MA Experiment 20000227 PARAMETER Experiment Name: At_Root-Tips-vs-Tops_P Parameter: Tissue Value: Root Tips vs. Root Tops
  misc_feature: MA Experiment ID: 20000264 Result: Down-regulated in Transcription
  misc_feature: MA Experiment 20000264 PARAMETER Experiment Name: At_Open_Flower_P Parameter: Age (day) Value: 21
  misc_feature: MA Experiment 20000264 PARAMETER Experiment Name: At_Open_Flower_P Parameter: Plant Line Value: WS
  misc_feature: MA Experiment 20000264 PARAMETER Experiment Name: At_Open_Flower_P Parameter: Tissue Value: Open Flower vs. Whole Plant
  misc_feature: MA Experiment ID: 20000269 Result: Down-regulated in Transcription
  misc_feature: MA Experiment 20000269 PARAMETER Experiment Name: At_1mM_KNO3_L-vs-H_Roots_P Parameter: Age (day) Value: 7,10,12
  misc_feature: MA Experiment 20000269 PARAMETER Experiment Name: At_1mM_KNO3_L-vs-H_Roots_P Parameter: Organism Value: A. thaliana
  misc_feature: MA Experiment 20000269 PARAMETER Experiment Name: At_1mM_KNO3_L-vs-H_Roots_P Parameter: Plant Line Value: WS
  misc_feature: MA Experiment 20000269 PARAMETER Experiment Name: At_1mM_KNO3_L-vs-H_Roots_P Parameter: Timepoint (day) Value: 7,10,12
  misc_feature: MA Experiment 20000269 PARAMETER Experiment Name: At_1mM_KNO3_L-vs-H_Roots_P Parameter: Tissue Value: Roots
  misc_feature: MA Experiment 20000269 PARAMETER Experiment Name: At_1mM_KNO3_L-vs-H_Roots_P Parameter: Treatment Value: 1mM KNO3 vs. 50mM KNO3
  misc_feature: MA Experiment ID: 20000439 Result: Down-regulated in Transcription
  misc_feature: MA Experiment 20000439 PARAMETER Experiment Name: At_Roots__P Parameter: Age (day) Value: 14 vs. 21
  misc_feature: MA Experiment 20000439 PARAMETER Experiment Name: At_Roots__P Parameter: Organism Value: A. thaliana
  misc_feature: MA Experiment 20000439 PARAMETER Experiment Name: At_Roots__P Parameter: Tissue Value: Roots vs. Whole Plant
  misc_feature: MA Experiment ID: 20000794 Result: Down-regulated in Transcription
  misc_feature: MA Experiment 20000794 PARAMETER Experiment Name: At_Petals_P Parameter: Age (day) Value: 23-25 days
  misc_feature: MA Experiment 20000794 PARAMETER Experiment Name: At_Petals_P Parameter: Plant Line Value: WS
  misc_feature: MA Experiment 20000794 PARAMETER Experiment Name: At_Petals_P Parameter: Tissue Value: Petals vs. Whole plant
  misc_feature: MA Experiment ID: 20001904 Result: Down-regulated in Transcription
  misc_feature: MA Experiment 20001904 PARAMETER Experiment Name: At_Drought_Reproduction_P Parameter: Age (day) Value: 37
  misc_feature: MA Experiment 20001904 PARAMETER Experiment Name: At_Drought_Reproduction_P Parameter: Organism Value: A. thaliana
  misc_feature: MA Experiment 20001904 PARAMETER Experiment Name: At_Drought_Reproduction_P Parameter: Plant Line Value: WS
  misc_feature: MA Experiment 20001904 PARAMETER Experiment Name: At_Drought_Reproduction_P Parameter: Timepoint (day) Value: 7
  misc_feature: MA Experiment 20001904 PARAMETER Experiment Name: At_Drought_Reproduction_P Parameter: Tissue Value: Rosettes
  misc_feature: MA Experiment 20001904 PARAMETER Experiment Name: At_Drought_Reproduction_P Parameter: Treatment Value: Drought vs. No Drought
  misc_feature: MA Experiment ID: 20001905 Result: Down-regulated in Transcription
  misc_feature: MA Experiment 20001905 PARAMETER Experiment Name: At_Drought_Reproduction_P Parameter: Age (day) Value: 40
  misc_feature: MA Experiment 20001905 PARAMETER Experiment Name: At_Drought_Reproduction_P Parameter: Organism Value: A. thaliana
  misc_feature: MA Experiment 20001905 PARAMETER Experiment Name: At_Drought_Reproduction_P Parameter: Plant Line Value: WS
  misc_feature: MA Experiment 20001905 PARAMETER Experiment Name: At_Drought_Reproduction_P Parameter: Timepoint (day) Value: 10
  misc_feature: MA Experiment 20001905 PARAMETER Experiment Name: At_Drought_Reproduction_P Parameter: Tissue Value: Rosettes
  misc_feature: MA Experiment 20001905 PARAMETER Experiment Name: At_Drought_Reproduction_P Parameter: Treatment Value: Drought vs. No Drought
atgtctatatccatggcgttattctctccgccgatctcttcctcacttcagaaccctaatctcatccccaagatctcaacctctcttctctccaccaagcgtttctctctaatctccgtccctagagcttcctccgacaatggtacgacttcccccgtcgtggagattccgaagcctgcttctgtggctgtagaggaagttccagttaaatctccagccgaaagctcctccgcttctgaaaacggcgccgttggaggtgaagcgactgattcgagtactgagacggtaatcaaatatcagaatgcgaagtgggttaatggaacttgggatctgaaacagttcgagaaagatggcaaaactgattgggattctgttatcgtttctgaggcaaagaggagaaaatggcttgaagataacccggaaacaacgagtaacgacgagcttgttgtcttcgatacttcgattattccatggtgggcatggatgaagagataccatctacctgaagctgaacttctcaatggtcgtgctgcgatgatagggttcttcatggcttactttgttgatagtcttaccggagtaggacttgttgatcaaatgggaaatttcttctgcaaaacactcttgtttgtggctgtagctggagttctcttcatccgtaagaatgaagatttagacaaacttaaggatctgttcgatgagactacgttatatgacaaacaatggcaagctgcatggaaagagccagattcatcaacagtttcttcaaagaagtga

SEQ ID NO: 71157 - protein, 258 aa, Arabidopsis thaliana
  peptide (1)..(258): Ceres Seq. ID no. 3067977
  misc_feature (1)..(258): Homolog of NCBI NO: 30695110 NR Description: Lil3 protein [Arabidopsis thaliana]
  misc_feature (5)..(258): Homolog of NCBI NO: 8978078 NR Description: Lil3 protein [Arabidopsis thaliana]
  misc_feature (5)..(258): Homolog of NCBI NO: 21555799 NR Description: Lil3 protein [Arabidopsis thaliana]
  misc_feature (5)..(258): Homolog of NCBI NO: 7485188 NR Description: hypothetical protein - Arabidopsis thaliana hypothetical protein [Arabidopsis thaliana]
  misc_feature (5)..(258): Homolog of NCBI NO: 18414927 NR Description: Lil3 protein; protein id: At4g17600.1, supported cDNA: 29150., supported by cDNA: gi_14030672, supported by cDNA: supported by cDNA: gi_4741965 [Arabidopsis thaliana] thaliana
MSISMALFSPPISSSLQNPNLIPKISTSLLSTKRFSLISVPRASSDNGTTSPVVEIPKPASVAVEEVPVKSPAESSSASENGAVGGEATDSSTETVIKYQNAKWVNGTWDLKQFEKDGKTDWDSVIVSEAKRRKWLEDNPETTSNDELVVFDTSIIPWWAWMKRYHLPEAELLNGRAAMIGFFMAYFVDSLTGVGLVDQMGNFFCKTLLFVAVAGVLFIRKNEDLDKLKDLFDETTLYDKQWQAAWKEPDSSTVSSKK

SEQ ID NO: 71158 - protein, 254 aa, Arabidopsis thaliana
  peptide (1)..(254): Ceres Seq. ID no. 3067978
  misc_feature (1)..(254): Homolog of NCBI NO: 30695110 NR Description: Lil3 protein [Arabidopsis thaliana]
  misc_feature (1)..(254): Homolog of NCBI NO: 8978078 NR Description: Lil3 protein [Arabidopsis thaliana]
  misc_feature (1)..(254): Homolog of NCBI NO: 21555799 NR Description: Lil3 protein [Arabidopsis thaliana]
  misc_feature (1)..(254): Homolog of NCBI NO: 7485188 NR Description: hypothetical protein - Arabidopsis thaliana hypothetical protein [Arabidopsis thaliana]
  misc_feature (1)..(254): Homolog of NCBI NO: 18414927 NR Description: Lil3 protein; protein id: At4g17600.1, supported cDNA: 29150., supported by cDNA: gi_14030672, supported by cDNA: supported by cDNA: gi_4741965 [Arabidopsis thaliana] thaliana
MALFSPPISSSLQNPNLIPKISTSLLSTKRFSLISVPRASSDNGTTSPVVEIPKPASVAVEEVPVKSPAESSSASENGAVGGEATDSSTETVIKYQNAKWVNGTWDLKQFEKDGKTDWDSVIVSEAKRRKWLEDNPETTSNDELVVFDTSIIPWWAWMKRYHLPEAELLNGRAAMIGFFMAYFVDSLTGVGLVDQMGNFFCKTLLFVAVAGVLFIRKNEDLDKLKDLFDETTLYDKQWQAAWKEPDSSTVSSKK

SEQ ID NO: 71159 - DNA, 1440 bp, Arabidopsis thaliana
  misc_feature (1)..(1440): Ceres Seq. ID no. 3068637
  misc_feature: MA Experiment ID: 20000314 Result: Down-regulated in Transcription
  misc_feature: MA Experiment 20000314 PARAMETER Experiment Name: At_14day_Shoots-Roots_Sub_P Parameter: Age (day) Value: 14
  misc_feature: MA Experiment 20000314 PARAMETER Experiment Name: At_14day_Shoots-Roots_Sub_P Parameter: Organism Value: A. thaliana
  misc_feature: MA Experiment 20000314 PARAMETER Experiment Name: At_14day_Shoots-Roots_Sub_P Parameter: Plant Line Value: WS
  misc_feature: MA Experiment 20000314 PARAMETER Experiment Name: At_14day_Shoots-Roots_Sub_P Parameter: Tissue Value: Roots vs. Whole Plant
  misc_feature: MA Experiment ID: 20000315 Result: Down-regulated in Transcription
  misc_feature: MA Experiment 20000315 PARAMETER Experiment Name: At_14day_Shoots-Roots_Sub_P Parameter: Age (day) Value: 14
  misc_feature: MA Experiment 20000315 PARAMETER Experiment Name: At_14day_Shoots-Roots_Sub_P Parameter: Organism Value: A. thaliana
  misc_feature: MA Experiment 20000315 PARAMETER Experiment Name: At_14day_Shoots-Roots_Sub_P Parameter: Plant Line Value: WS
  misc_feature: MA Experiment 20000315 PARAMETER Experiment Name: At_14day_Shoots-Roots_Sub_P Parameter: Tissue Value: Shoots vs. Whole Plant
  misc_feature: MA Experiment ID: 20000346 Result: Up-regulated in Transcription
  misc_feature: MA Experiment 20000346 PARAMETER Experiment Name: At_2mM_SA_Sub_P Parameter: Age (day) Value: 14
  misc_feature: MA Experiment 20000346 PARAMETER Experiment Name: At_2mM_SA_Sub_P Parameter: Organism Value: A. thaliana
  misc_feature: MA Experiment 20000346 PARAMETER Experiment Name: At_2mM_SA_Sub_P Parameter: Plant Line Value: WS
  misc_feature: MA Experiment 20000346 PARAMETER Experiment Name: At_2mM_SA_Sub_P Parameter: Timepoint (hr) Value: 1
  misc_feature: MA Experiment 20000346 PARAMETER Experiment Name: At_2mM_SA_Sub_P Parameter: Tissue Value: Aerial
  misc_feature: MA Experiment 20000346 PARAMETER Experiment Name: At_2mM_SA_Sub_P Parameter: Treatment Value: 2mM SA vs. No Treatment
  misc_feature: MA Experiment ID: 20000347 Result: Up-regulated in Transcription
  misc_feature: MA Experiment 20000347 PARAMETER Experiment Name: At_2mM_SA_Sub_P Parameter: Age (day) Value: 14
  misc_feature: MA Experiment 20000347 PARAMETER Experiment Name: At_2mM_SA_Sub_P Parameter: Organism Value: A. thaliana
  misc_feature: MA Experiment 20000347 PARAMETER Experiment Name: At_2mM_SA_Sub_P Parameter: Plant Line Value: WS
  misc_feature: MA Experiment 20000347 PARAMETER Experiment Name: At_2mM_SA_Sub_P Parameter: Timepoint (hr) Value: 6
  misc_feature: MA Experiment 20000347 PARAMETER Experiment Name: At_2mM_SA_Sub_P Parameter: Tissue Value: Aerial
  misc_feature: MA Experiment 20000347 PARAMETER Experiment Name: At_2mM_SA_Sub_P Parameter: Treatment Value: 2mM SA vs. No Treatment
  misc_feature: MA Experiment ID: 20000355 Result: Down-regulated in Transcription
  misc_feature: MA Experiment 20000355 PARAMETER Experiment Name: At_Siliques_Sub_P Parameter: Age (day) Value: 21
  misc_feature: MA Experiment 20000355 PARAMETER Experiment Name: At_Siliques_Sub_P Parameter: Organism Value: A. thaliana
  misc_feature: MA Experiment 20000355 PARAMETER Experiment Name: At_Siliques_Sub_P Parameter: Plant Line Value: WS
  misc_feature: MA Experiment 20000355 PARAMETER Experiment Name: At_Siliques_Sub_P Parameter: Tissue Value: Less Than 5mm Siliques vs. Whole Plant
  misc_feature: MA Experiment ID: 20000440 Result: Down-regulated in Transcription
  misc_feature: MA Experiment 20000440 PARAMETER Experiment Name: At_Closed-Flower__Sub_P Parameter: Tissue Value: Closed Flower vs. Whole Plant
atgaaaatagagctagtattcattccctctccggcaattagtcatctcatggcgacggtagagatggcggagcaactagttgataaaaacgacaacctctctatcaccgtaatcatcatatcttttagttctaaaaatacatccatgatcacctctcttacatccaacaaccgcctccggtacgaaataatctccggaggagatcaacaaccaacggagctcaaagcaactgattcccacatccaaagtctaaagccactggtgagagacgcggttgctaaactcgtagattccactctaccagacgcgcctcgtcttgcgggattcgttgttgacatgtactgcacgtcgatgatcgatgtcgctaacgaatttggcgtccctagttacttgttttacacctctaacgctggatttcttggacttttgcttcacattcagttcatgtacgatgcagaggatatctatgacatgagcgaattagaagactctgacgtagagttggtggttccgagtttgactagtccttatccgttgaaatgtcttccttacattttcaaatcaaaagagtggctcactttttttgtaactcaagcgagaagattcagagaaactaagggcattttggtaaacacggttcctgacttggaacctcaagcgttgacgtttctttccaatggtaacattccacgtgcttacccagtaggaccattgttgcatctcaaaaacgtaaattgtgattacgtggacaagaagcaatcggagattttacggtggctagacgagcaaccgccaagatctgtagtgttcctctgtttcgggagcatgggagggttcagtgaggaacaagtgagagaaaccgcattagctctcgatcgaagcggccaccggtttctttggtctctccgtcgtgcatctccgaatatattgagagagcctcccggagaattcacaaacctagaggagattctcccagaagggtttttcgatcggacggctaacagaggaaaggttatcggatgggctgaacaggtggccatattggcgaagccggcgatcggaggttttgtttctcacggcggatggaattcgacgttggagagtttgtggtttggtgttccgatggcgatttggccgctttacgctgaacagaagtttaacgctttcgagatggtggaagagcttggtttggctgtggagatcaagaagcattggcgaggagatcttttgttggggaggtcggagattgtgacggcggaggagattgagaaaggaatcatatgtttgatggagcaagacagtgacgtcaggaagagagtgaatgagatcagcgagaagtgccacgtggctttaatggacggtggatcgtcagaaactgctttgaaaagatttattcaagacgtaacggagaatattgcttggtcggaaactgaaagctag

SEQ ID NO: 71160 - protein, 479 aa, Arabidopsis thaliana
  peptide (1)..(479): Ceres Seq. ID no. 3068638
  misc_feature (4)..(472): Pfam Name: UDP-glucoronosyl and UDP-glucosyl transferase Pfam Description: UDP-glucoronosyl and UDP-glucosyl transferase
  misc_feature (1)..(479): Homolog of NCBI NO: 11994645 NR Description: UTP-glucose glucosyltransferase [Arabidopsis
  misc_feature (49)..(479): Homolog of NCBI NO: 15233155 NR Description: putative UDP-glucose glucosyltransferase; protein
  misc_feature (1)..(478): Homolog of NCBI NO: 11994646 NR Description: UTP-glucose glucosyltransferase [Arabidopsis
  misc_feature (1)..(478): Homolog of NCBI NO: 15233157 NR Description: putative UDP-glucose glucosyltransferase; protein
  misc_feature (2)..(473): Homolog of NCBI NO: 15233158 NR Description: putative UDP-glucose glucosyltransferase; protein
  misc_feature (55)..(473): Homolog of NCBI NO: 7488111 NR Description: probable glucosyltransferase - Arabidopsis >gi|2244884|emb|CAB10305.1| glucosyltransferase [Arabidopsis >gi|7268273|emb|CAB78568.1| glucosyltransferase [Arabidopsis
  misc_feature (2)..(99): Homolog of NCBI NO: 7488111 NR Description: probable glucosyltransferase - Arabidopsis >gi|2244884|emb|CAB10305.1| glucosyltransferase [Arabidopsis >gi|7268273|emb|CAB78568.1| glucosyltransferase [Arabidopsis
  misc_feature (1)..(472): Homolog of NCBI NO: 15233761 NR Description: UTP-glucose glucosyltransferase; protein id:
  misc_feature (1)..(473): Homolog of NCBI NO: 15233151 NR Description: putative UDP-glucose glucosyltransferase; protein At3g21760.1, supported by cDNA: gi_13937235, supported by cDNA:
  misc_feature (1)..(472): Homolog of NCBI NO: 15233149 NR Description: UDP-glycosyltransferase family; protein id:
MKIELVFIPSPAISHLMATVEMAEQLVDKNDNLSITVIIISFSSKNTSMITSLTSNNRLRYEIISGGDQQPTELKATDSHIQSLKPLVRDAVAKLVDSTLPDAPRLAGFVVDMYCTSMIDVANEFGVPSYLFYTSNAGFLGLLLHIQFMYDAEDIYDMSELEDSDVELVVPSLTSPYPLKCLPYIFKSKEWLTFFVTQARRFRETKGILVNTVPDLEPQALTFLSNGNIPRAYPVGPLLHLKNVNCDYVDKKQSEILRWLDEQPPRSVVFLCFGSMGGFSEEQVRETALALDRSGHRFLWSLRRASPNILREPPGEFTNLEEILPEGFFDRTANRGKVIGWAEQVAILAKPAIGGFVSHGGWNSTLESLWFGVPMAIWPLYAEQKFNAFEMVEELGLAVEIKKHWRGDLLLGRSEIVTAEEIEKGIICLMEQDSDVRKRVNEISEKCHVALMDGGSSETALKRFIQDVTENIAWSETES

SEQ ID NO: 71161 - protein, 463 aa, Arabidopsis thaliana
  peptide (1)..(463): Ceres Seq. ID no. 3068639
  misc_feature (1)..(456): Pfam Name: UDP-glucoronosyl and UDP-glucosyl transferase Pfam Description: UDP-glucoronosyl and UDP-glucosyl transferase
  misc_feature (1)..(463): Homolog of NCBI NO: 11994645 NR Description: UTP-glucose glucosyltransferase [Arabidopsis
  misc_feature (33)..(463): Homolog of NCBI NO: 15233155 NR Description: putative UDP-glucose glucosyltransferase; protein
  misc_feature (1)..(462): Homolog of NCBI NO: 11994646 NR Description: UTP-glucose glucosyltransferase [Arabidopsis
  misc_feature (1)..(462): Homolog of NCBI NO: 15233157 NR Description: putative UDP-glucose glucosyltransferase; protein
  misc_feature (1)..(457): Homolog of NCBI NO: 15233158 NR Description: putative UDP-glucose glucosyltransferase; protein
  misc_feature (39)..(457): Homolog of NCBI NO: 7488111 NR Description: probable glucosyltransferase - Arabidopsis >gi|2244884|emb|CAB10305.1| glucosyltransferase [Arabidopsis >gi|7268273|emb|CAB78568.1| glucosyltransferase [Arabidopsis
  misc_feature (1)..(83): Homolog of NCBI NO: 7488111 NR Description: probable glucosyltransferase - Arabidopsis >gi|2244884|emb|CAB10305.1| glucosyltransferase [Arabidopsis >gi|7268273|emb|CAB78568.1| glucosyltransferase [Arabidopsis
  misc_feature (1)..(456): Homolog of NCBI NO: 15233761 NR Description: UTP-glucose glucosyltransferase; protein id:
  misc_feature (1)..(457): Homolog of NCBI NO: 15233151 NR Description: putative UDP-glucose glucosyltransferase; protein At3g21760.1, supported by cDNA: gi_13937235, supported by cDNA:
  misc_feature (1)..(456): Homolog of NCBI NO: 15233149 NR Description: UDP-glycosyltransferase family; protein id:
MATVEMAEQLVDKNDNLSITVIIISFSSKNTSMITSLTSNNRLRYEIISGGDQQPTELKATDSHIQSLKPLVRDAVAKLVDSTLPDAPRLAGFVVDMYCTSMIDVANEFGVPSYLFYTSNAGFLGLLLHIQFMYDAEDIYDMSELEDSDVELVVPSLTSPYPLKCLPYIFKSKEWLTFFVTQARRFRETKGILVNTVPDLEPQALTFLSNGNIPRAYPVGPLLHLKNVNCDYVDKKQSEILRWLDEQPPRSVVFLCFGSMGGFSEEQVRETALALDRSGHRFLWSLRRASPNILREPPGEFTNLEEILPEGFFDRTANRGKVIGWAEQVAILAKPAIGGFVSHGGWNSTLESLWFGVPMAIWPLYAEQKFNAFEMVEELGLAVEIKKHWRGDLLLGRSEIVTAEEIEKGIICLMEQDSDVRKRVNEISEKCHVALMDGGSSETALKRFIQDVTENIAWSETES

SEQ ID NO: 71162 - protein, 458 aa, Arabidopsis thaliana
  peptide (1)..(458): Ceres Seq. ID no. 3068640
  misc_feature (1)..(451): Pfam Name: UDP-glucoronosyl and UDP-glucosyl transferase Pfam Description: UDP-glucoronosyl and UDP-glucosyl transferase
  misc_feature (1)..(458): Homolog of NCBI NO: 11994645 NR Description: UTP-glucose glucosyltransferase [Arabidopsis
  misc_feature (28)..(458): Homolog of NCBI NO: 15233155 NR Description: putative UDP-glucose glucosyltransferase; protein
  misc_feature (1)..(457): Homolog of NCBI NO: 11994646 NR Description: UTP-glucose glucosyltransferase [Arabidopsis
  misc_feature (1)..(457): Homolog of NCBI NO: 15233157 NR Description: putative UDP-glucose glucosyltransferase; protein
  misc_feature (1)..(452): Homolog of NCBI NO: 15233158 NR Description: putative UDP-glucose glucosyltransferase; protein
  misc_feature (34)..(452): Homolog of NCBI NO: 7488111 NR Description: probable glucosyltransferase - Arabidopsis >gi|2244884|emb|CAB10305.1| glucosyltransferase [Arabidopsis >gi|7268273|emb|CAB78568.1| glucosyltransferase [Arabidopsis
  misc_feature (1)..(78): Homolog of NCBI NO: 7488111 NR Description: probable glucosyltransferase - Arabidopsis >gi|2244884|emb|CAB10305.1| glucosyltransferase [Arabidopsis >gi|7268273|emb|CAB78568.1| glucosyltransferase [Arabidopsis
  misc_feature (1)..(451): Homolog of NCBI NO: 15233761 NR Description: UTP-glucose glucosyltransferase; protein id:
  misc_feature (1)..(452): Homolog of NCBI NO: 15233151 NR Description: putative UDP-glucose glucosyltransferase; protein At3g21760.1, supported by cDNA: gi_13937235, supported by cDNA:
  misc_feature (1)..(451): Homolog of NCBI NO: 15233149 NR Description: UDP-glycosyltransferase family; protein id:
MAEQLVDKNDNLSITVIIISFSSKNTSMITSLTSNNRLRYEIISGGDQQPTELKATDSHIQSLKPLVRDAVAKLVDSTLPDAPRLAGFVVDMYCTSMIDVANEFGVPSYLFYTSNAGFLGLLLHIQFMYDAEDIYDMSELEDSDVELVVPSLTSPYPLKCLPYIFKSKEWLTFFVTQARRFRETKGILVNTVPDLEPQALTFLSNGNIPRAYPVGPLLHLKNVNCDYVDKKQSEILRWLDEQPPRSVVFLCFGSMGGFSEEQVRETALALDRSGHRFLWSLRRASPNILREPPGEFTNLEEILPEGFFDRTANRGKVIGWAEQVAILAKPAIGGFVSHGGWNSTLESLWFGVPMAIWPLYAEQKFNAFEMVEELGLAVEIKKHWRGDLLLGRSEIVTAEEIEKGIICLMEQDSDVRKRVNEISEKCHVALMDGGSSETALKRFIQDVTENIAWSETES

SEQ ID NO: 71163 - DNA, 2154 bp, Arabidopsis thaliana
  misc_feature (1)..(2154): Ceres Seq. ID no. 3070337
  misc_feature: MA Experiment ID: 20000227 Result: Down-regulated in Transcription
  misc_feature: MA Experiment 20000227 PARAMETER Experiment Name: At_Root-Tips-vs-Tops_P Parameter: Tissue Value: Root Tips vs. Root Tops
  misc_feature: MA Experiment ID: 20000451 Result: Down-regulated in Transcription
  misc_feature: MA Experiment 20000451 PARAMETER Experiment Name: At_CS6879_Shoots-Roots_P Parameter: Age (day) Value: 14
  misc_feature: MA Experiment 20000451 PARAMETER Experiment Name: At_CS6879_Shoots-Roots_P Parameter: Organism Value: A. thaliana
  misc_feature: MA Experiment 20000451 PARAMETER Experiment Name: At_CS6879_Shoots-Roots_P Parameter: Plant Line Value: CS6879 vs. WS
  misc_feature: MA Experiment 20000451 PARAMETER Experiment Name: At_CS6879_Shoots-Roots_P Parameter: Tissue Value: Roots
atgtcatcggcgccgcctcccggtggtactccgtcacctcctccacagcctctcccaattcctcctccgcctcagcctctgcccgttactcctccacctccacctactgcccttcctcccgcccttccccctccacctccgcctactgcccttccacccgcccttcctcctccacctccacctaccaccgttcctcctatacctccctctacgccttctcccccacctcccttgaccccttctcctctgcctccatctcccacaactccttcacctcccttgacgccttctcccacaactccttcacctcccttgactccttctcctccacctgccatcactccttcacctcctttgacaccatctcctctgcctccgtctcccaccaccccttcacctccgcctccatctccaagcattccttcacctcccttgacgccttcccctccaccgtcttctcccttgaggccttcttctcctccaccgccctctcccgccactccttcaactccgccaagatctccgccacctccctcaacacccactcctcctcctcgggtaggcagtctgagccctccacctccagcgagtccctctggcgggagatctcctagtactccatctaccactccaggctcttctccaccggcacaatcttccaaagaattatcaaagggagctatggtcgggatcgccataggaggaggatttgtgcttcttgtggcattggctttgatatttttcctttgtaagaagaaacgacgaagagacaatgaagcaccccctgctcccatagatggagtcccttacggtggtcagcaacaacaaaatgcatcacgacgatcagatcacgtggtgatgtcagtgccaccaccgaagtctccctcctctgcaccaccacgtccaccgcatttcatgagcagcggcagcagcggagactacgactcaaactactcggatcaatcagttcttcctccaccatcaccagggcttgcattaggcttaggcatatatcaaggcactttcaattacgaggagctatctagagccaccaatggattctctgaggccaatttgttaggacaaggcggtttcggatacgtgttcaaaggtatgttacgtaatgggaaagaagttgctgtgaaacaattgaaagaagggagttctcaaggagaaagagagtttcaagcagaggttgggatcattagccgagtacatcatagacatttggttgctcttgtcggttattgcatcgccgatgctcaaagattgcttgtctatgagtttgttcccaacaacactctcgagtttcacctccatggaaagggacggcctacgatggaatggagttcaagattgaagattgctgttggttctgccaaaggattgtcttatcttcatgaaaattgcaatcctaaaattattcaccgtgatatcaaggcgtcaaacatattgatagatttcaaatttgaagcaaaggttgctgattttggtcttgccaagattgcttctgatacaaatactcatgtatctacacgtgtgatgggaacttttgggtatttggctccggaatatgcttcaagcggaaaactcacggaaaagtctgacgttttctcatttggcgttgtacttctggagctaataactggacgtcgccctattgatgtaaacaatgtccatgcagataacagcttggttgattgggcacgacctttgcttaaccaagtatctgaattaggaaactttgaggttgtggttgataaaaaactgaataatgagtatgacaaagaagagatggctcgcatggttgcttgtgccgcagcttgtgttcggtccacagctccacgtagacctcgcatggatcaggttgcacgtgtgctagaaggaaacatatcaccatcagatctaaaccaaggaatcacaccgggacacagcaatgtgtatggctcatctggaggaagcacagattatgactcgagccaagacaatgaaggcatgaacaagtttaggaaagtgggacttgagactcaagatttatatagtaacccaattagtgaatatgatttgtacccgtcctggtcgagcactgacggtcagaccacacagggaaaggcgaccggcaatattaaaagacccggtcaaggttatggttaa

SEQ ID NO: 71164 - protein, 717 aa, Arabidopsis thaliana
  peptide (1)..(717): Ceres Seq. ID no. 3070338
  misc_feature (354)..(553): Pfam Name: Protein kinase domain Pfam Description: Protein kinase domain
  misc_feature (266)..(717): Homolog of NCBI NO: 11994703 NR Description: somatic embryogenesis receptor kinase-like
  misc_feature (289)..(717): Homolog of NCBI NO: 15230108 NR Description: protein kinase, putative; protein id: At3g24400.1
  misc_feature (88)..(716): Homolog of NCBI NO: 13877617 NR Description: protein kinase-like protein [Arabidopsis thaliana]
  misc_feature (88)..(716): Homolog of NCBI NO: 15230130 NR Description: protein kinase, putative; protein id: supported by cDNA: 17909., supported by cDNA: gi_13877616,
  misc_feature (85)..(716): Homolog of NCBI NO: 13447449 NR Description: receptor protein kinase PERK1 [Brassica napus]
  misc_feature (325)..(646): Homolog of NCBI NO: 15230129 NR Description: protein kinase, putative; protein id: At3g24540.1
  misc_feature (132)..(265): Homolog of NCBI NO: 15230129 NR Description: protein kinase, putative; protein id: At3g24540.1
  misc_feature (146)..(717): Homolog of NCBI NO: 34904234 NR Description: putative receptor protein kinase PERK1 [Oryza
  misc_feature (53)..(112): Homolog of NCBI NO: 34904234 NR Description: putative receptor protein kinase PERK1 [Oryza
  misc_feature (320)..(650): Homolog of NCBI NO: 9294048 NR Description: protein kinase-like protein [Arabidopsis thaliana]
MSSAPPPGGTPSPPPQPLPIPPPPQPLPVTPPPPPTALPPALPPPPPPTALPPALPPPPPPTTVPPIPPSTPSPPPPLTPSPLPPSPTTPSPPLTPSPTTPSPPLTPSPPPAITPSPPLTPSPLPPSPTTPSPPPPSPSIPSPPLTPSPPPSSPLRPSSPPPPSPATPSTPPRSPPPPSTPTPPPRVGSLSPPPPASPSGGRSPSTPSTTPGSSPPAQSSKELSKGAMVGIAIGGGFVLLVALALIFFLCKKKRRRDNEAPPAPIDGVPYGGQQQQNASRRSDHVVMSVPPPKSPSSAPPRPPHFMSSGSSGDYDSNYSDQSVLPPPSPGLALGLGIYQGTFNYEELSRATNGFSEANLLGQGGFGYVFKGMLRNGKEVAVKQLKEGSSQGEREFQAEVGIISRVHHRHLVALVGYCIADAQRLLVYEFVPNNTLEFHLHGKGRPTMEWSSRLKIAVGSAKGLSYLHENCNPKIIHRDIKASNILIDFKFEAKVADFGLAKIASDTNTHVSTRVMGTFGYLAPEYASSGKLTEKSDVFSFGVVLLELITGRRPIDVNNVHADNSLVDWARPLLNQVSELGNFEVVVDKKLNNEYDKEEMARMVACAAACVRSTAPRRPRMDQVARVLEGNISPSDLNQGITPGHSNVYGSSGGSTDYDSSQDNEGMNKFRKVGLETQDLYSNPISEYDLYPSWSSTDGQTTQGKATGNIKRPGQGYG

SEQ ID NO: 71165 - protein, 490 aa, Arabidopsis thaliana
  peptide (1)..(490): Ceres Seq. ID no. 3070339
  misc_feature (127)..(326): Pfam Name: Protein kinase domain Pfam Description: Protein kinase domain
  misc_feature (39)..(490): Homolog of NCBI NO: 11994703 NR Description: somatic embryogenesis receptor kinase-like
  misc_feature (62)..(490): Homolog of NCBI NO: 15230108 NR Description: protein kinase, putative; protein id: At3g24400.1
  misc_feature (1)..(489): Homolog of NCBI NO: 13877617 NR Description: protein kinase-like protein [Arabidopsis thaliana]
  misc_feature (1)..(489): Homolog of NCBI NO: 15230130 NR Description: protein kinase, putative; protein id: supported by cDNA: 17909., supported by cDNA: gi_13877616,
  misc_feature (1)..(489): Homolog of NCBI NO: 13447449 NR Description: receptor protein kinase PERK1 [Brassica napus]
  misc_feature (98)..(419): Homolog of NCBI NO: 15230129 NR Description: protein kinase, putative; protein id: At3g24540.1
  misc_feature (1)..(38): Homolog of NCBI NO: 15230129 NR Description: protein kinase, putative; protein id: At3g24540.1
  misc_feature (1)..(490): Homolog of NCBI NO: 34904234 NR Description: putative receptor protein kinase PERK1 [Oryza
  misc_feature (93)..(423): Homolog of NCBI NO: 9294048 NR Description: protein kinase-like protein [Arabidopsis thaliana]
  misc_feature (1)..(47): Homolog of NCBI NO: 9294048 NR Description: protein kinase-like protein [Arabidopsis thaliana]
MVGIAIGGGFVLLVALALIFFLCKKKRRRDNEAPPAPIDGVPYGGQQQQNASRRSDHVVMSVPPPKSPSSAPPRPPHFMSSGSSGDYDSNYSDQSVLPPPSPGLALGLGIYQGTFNYEELSRATNGFSEANLLGQGGFGYVFKGMLRNGKEVAVKQLKEGSSQGEREFQAEVGIISRVHHRHLVALVGYCIADAQRLLVYEFVPNNTLEFHLHGKGRPTMEWSSRLKIAVGSAKGLSYLHENCNPKIIHRDIKASNILIDFKFEAKVADFGLAKIASDTNTHVSTRVMGTFGYLAPEYASSGKLTEKSDVFSFGVVLLELITGRRPIDVNNVHADNSLVDWARPLLNQVSELGNFEVVVDKKLNNEYDKEEMARMVACAAACVRSTAPRRPRMDQVARVLEGNISPSDLNQGITPGHSNVYGSSGGSTDYDSSQDNEGMNKFRKVGLETQDLYSNPISEYDLYPSWSSTDGQTTQGKATGNIKRPGQGYG

SEQ ID NO: 71166 - protein, 431 aa, Arabidopsis thaliana
  peptide (1)..(431): Ceres Seq. ID no. 3070340
  misc_feature (68)..(267): Pfam Name: Protein kinase domain Pfam Description: Protein kinase domain
  misc_feature (8)..(411): Homolog of NCBI NO: 15240947 NR Description: putative protein; protein id: At5g38560.1, by cDNA: gi_15983496, supported by cDNA: gi_18700152 [Arabidopsis >gi|10176824|dbj|BAB10146.1| contains similarity to protein
  misc_feature (1)..(431): Homolog of NCBI NO: 11994703 NR Description: somatic embryogenesis receptor kinase-like
  misc_feature (1)..(430): Homolog of NCBI NO: 13877617 NR Description: protein kinase-like protein [Arabidopsis thaliana]
  misc_feature (1)..(430): Homolog of NCBI NO: 13447449 NR Description: receptor protein kinase PERK1 [Brassica napus]
  misc_feature (1)..(431): Homolog of NCBI NO: 34904234 NR Description: putative receptor protein kinase PERK1 [Oryza
  misc_feature (34)..(364): Homolog of NCBI NO: 9294048 NR Description: protein kinase-like protein [Arabidopsis thaliana]
  misc_feature (39)..(360): Homolog of NCBI NO: 15230129 NR Description: protein kinase, putative; protein id: At3g24540.1
  misc_feature (1)..(430): Homolog of NCBI NO: 15230130 NR Description: protein kinase, putative; protein id: supported by cDNA: 17909., supported by cDNA: gi_13877616,
  misc_feature (3)..(431): Homolog of NCBI NO: 15230108 NR Description: protein kinase, putative; protein id: At3g24400.1
  misc_feature (1)..(38): Homolog of NCBI NO: 15240947 NR Description: putative protein; protein id: At5g38560.1, by cDNA: gi_15983496, supported by cDNA: gi_18700152 [Arabidopsis >gi|10176824|dbj|BAB10146.1| contains similarity to protein
MSVPPPKSPSSAPPRPPHFMSSGSSGDYDSNYSDQSVLPPPSPGLALGLGIYQGTFNYEELSRATNGFSEANLLGQGGFGYVFKGMLRNGKEVAVKQLKEGSSQGEREFQAEVGIISRVHHRHLVALVGYCIADAQRLLVYEFVPNNTLEFHLHGKGRPTMEWSSRLKIAVGSAKGLSYLHENCNPKIIHRDIKASNILIDFKFEAKVADFGLAKIASDTNTHVSTRVMGTFGYLAPEYASSGKLTEKSDVFSFGVVLLELITGRRPIDVNNVHADNSLVDWARPLLNQVSELGNFEVVVDKKLNNEYDKEEMARMVACAAACVRSTAPRRPRMDQVARVLEGNISPSDLNQGITPGHSNVYGSSGGSTDYDSSQDNEGMNKFRKVGLETQDLYSNPISEYDLYPSWSSTDGQTTQGKATGNIKRPGQGYG

SEQ ID NO: 71167 - DNA, 1128 bp, Arabidopsis thaliana
  misc_feature (1)..(1128): Ceres Seq. ID no. 3070626
  misc_feature: MA Experiment ID: 108434 Result: Down-regulated in Transcription
  misc_feature: MA Experiment 108434 PARAMETER Experiment Name: At_Root_Tips_cDNA_P Parameter: Tissue Value: Root Tips
acaacaatctcactttgtctttttttctctctctctctctctctcatagaaaaggaagtggtggaagatgccgaggccagggccaagaccgtacgactgtatcagaagagcttggcatagtgacagacaccaacccatgaggggtttgctcatccaagagattttcaggtcatcatcatcatctctctctcactttggatatctatctgtgtatctataggtttgtgtgtgtgcatgtctttctttagctcaattgttctttgaactatttgtaggattgtttgtgagattcacagccaatccaccaggaaaaacacagaatggcaagagaagctccctgttgttgtcttgagagctgaagaaatcatgtattccaaagccaattctgaggctgagtatatggacatgaagacccttttagaccgtacaaacgacgccatcaacacaatcatacgacttgatgagaccaccgaaacaggggaatttcttcagccttgtattgaagctgcattgcatttggggtgcacaccaaggagagcttcaaggagccaacggaacattaacccgagatgttatcttagccaagactcaactaacttggacaacatgttgtcccaagtattcatgaaaccaaacaactttgctccaaagaatcttgcagtagcacaagagaattgccctgtctccaagtactctgcctaccctttatgctattcattccggccaatcagtgactcgtgtaagtccaagaacagtagaccggcgagtctcattgacgcaacaaatggcattacctttggtgggtgtgaatgtgatctatctctgcgcttaggtcctcttggacctcctactcaaaaacgaagtaagataagcagcaacaataacaactgaaaaggagagcaagattgggttttgattagcaagtcttgtgttagaagaatgtgtgcttagttaggccttttagtctcctctctagaccctaggtttaggtttgtgaacatgtaaatagagagacgaagtaacaaaacaggagatgaagtcgttttcttctacctgcatcaatctcgaatcatcagacttcacgaatgtatttttacattgcaacactgttcgagaaatatccattcc

SEQ ID NO: 71168 - protein, 174 aa, Arabidopsis thaliana; identical to SEQ ID NO: 40462
  peptide (1)..(174): Ceres Seq. ID no. 3070627
  misc_feature (1)..(174): Homolog of NCBI NO: 22329083 NR Description: unknown protein; protein id: At4g32295.1 thaliana] >gi|28392894|gb|AAO41883.1| unknown protein thaliana] >gi|28827750|gb|AAO50719.1| unknown protein
  misc_feature (1)..(71): Homolog of NCBI NO: 15230072 NR Description: hypothetical protein; protein id: At3g24150.1
  misc_feature (1)..(71): Homolog of NCBI NO: 11994234 NR Description: gene_id:MUJ8.5~unknown protein [Arabidopsis

SEQ ID NO: 71169 - protein, 163 aa, Arabidopsis thaliana; identical to SEQ ID NO: 40463
  peptide (1)..(163): Ceres Seq. ID no. 3070628
  misc_feature (1)..(163): Homolog of NCBI NO: 22329083 NR Description: unknown protein; protein id: At4g32295.1 thaliana] >gi|28392894|gb|AAO41883.1| unknown protein thaliana] >gi|28827750|gb|AAO50719.1| unknown protein
  misc_feature (1)..(60): Homolog of NCBI NO: 15230072 NR Description: hypothetical protein; protein id: At3g24150.1
  misc_feature (1)..(60): Homolog of NCBI NO: 11994234 NR Description: gene_id:MUJ8.5~unknown protein [Arabidopsis

SEQ ID NO: 71170 - protein, 161 aa, Arabidopsis thaliana; identical to SEQ ID NO: 40464
  peptide (1)..(161): Ceres Seq. ID no. 3070629
  misc_feature (1)..(161): Homolog of NCBI NO: 22329083 NR Description: unknown protein; protein id: At4g32295.1 thaliana] >gi|28392894|gb|AAO41883.1| unknown protein thaliana] >gi|28827750|gb|AAO50719.1| unknown protein
  misc_feature (1)..(58): Homolog of NCBI NO: 15230072 NR Description: hypothetical protein; protein id: At3g24150.1
  misc_feature (1)..(58): Homolog of NCBI NO: 11994234 NR Description: gene_id:MUJ8.5~unknown protein [Arabidopsis

SEQ ID NO: 71171 - DNA, 693 bp, Arabidopsis thaliana
  misc_feature (1)..(693): Ceres Seq. ID no. 3071019
  misc_feature: MA Experiment ID: 20000072 Result: Up-regulated in Transcription
  misc_feature: MA Experiment 20000072 PARAMETER Experiment Name: At_100uM_ABA_Mutants_cDNA_P Parameter: Plant Line Value: CS8105
  misc_feature: MA Experiment 20000072 PARAMETER Experiment Name: At_100uM_ABA_Mutants_cDNA_P Parameter: Timepoint (hr) Value: 6
  misc_feature: MA Experiment 20000072 PARAMETER Experiment Name: At_100uM_ABA_Mutants_cDNA_P Parameter: Tissue Value: Aerial
  misc_feature: MA Experiment 20000072 PARAMETER Experiment Name: At_100uM_ABA_Mutants_cDNA_P Parameter: Treatment Value: 100uM ABA vs. No Treatment
  misc_feature: MA Experiment ID: 20000086 Result: Up-regulated in Transcription
  misc_feature: MA Experiment 20000086 PARAMETER Experiment Name: At_100uM_ABA_Mutants_cDNA_P Parameter: Plant Line Value: CS22
  misc_feature: MA Experiment 20000086 PARAMETER Experiment Name: At_100uM_ABA_Mutants_cDNA_P Parameter: Timepoint (hr) Value: 6
  misc_feature: MA Experiment 20000086 PARAMETER Experiment Name: At_100uM_ABA_Mutants_cDNA_P Parameter: Tissue Value: Aerial
  misc_feature: MA Experiment 20000086 PARAMETER Experiment Name: At_100uM_ABA_Mutants_cDNA_P Parameter: Treatment Value: 100uM ABA vs. No Treatment
  misc_feature: MA Experiment ID: 20000087 Result: Up-regulated in Transcription
  misc_feature: MA Experiment 20000087 PARAMETER Experiment Name: At_100uM_ABA_Mutants_cDNA_P Parameter: Plant Line Value: WS
  misc_feature: MA Experiment 20000087 PARAMETER Experiment Name: At_100uM_ABA_Mutants_cDNA_P Parameter: Timepoint (hr) Value: 6
  misc_feature: MA Experiment 20000087 PARAMETER Experiment Name: At_100uM_ABA_Mutants_cDNA_P Parameter: Tissue Value: Aerial
  misc_feature: MA Experiment 20000087 PARAMETER Experiment Name: At_100uM_ABA_Mutants_cDNA_P Parameter: Treatment Value: 100uM ABA vs. No Treatment
  misc_feature: MA Experiment ID: 20000185 Result: Up-regulated in Transcription
  misc_feature: MA Experiment 20000185 PARAMETER Experiment Name: At_Roots__P Parameter: Age (day) Value: 7 vs. 21
  misc_feature: MA Experiment 20000185 PARAMETER Experiment Name: At_Roots__P Parameter: Organism Value: A. thaliana
  misc_feature: MA Experiment 20000185 PARAMETER Experiment Name: At_Roots__P Parameter: Tissue Value: Roots vs. Whole Plant
  misc_feature: MA Experiment ID: 20000234 Result: Up-regulated in Transcription
  misc_feature: MA Experiment 20000234 PARAMETER Experiment Name: At_Siliques_P Parameter: Age (day) Value: 21
  misc_feature: MA Experiment 20000234 PARAMETER Experiment Name: At_Siliques_P Parameter: Organism Value: A. thaliana
  misc_feature: MA Experiment 20000234 PARAMETER Experiment Name: At_Siliques_P Parameter: Plant Line Value: WS
  misc_feature: MA Experiment 20000234 PARAMETER Experiment Name: At_Siliques_P Parameter: Tissue Value: Less Than 5mm Siliques vs. Whole Plant
  misc_feature: MA Experiment ID: 20000235 Result: Up-regulated in Transcription
  misc_feature: MA Experiment 20000235 PARAMETER Experiment Name: At_Siliques_P Parameter: Age (day) Value: 21
  misc_feature: MA Experiment 20000235 PARAMETER Experiment Name: At_Siliques_P Parameter: Organism Value: A. thaliana
  misc_feature: MA Experiment 20000235 PARAMETER Experiment Name: At_Siliques_P Parameter: Plant Line Value: WS
  misc_feature: MA Experiment 20000235 PARAMETER Experiment Name: At_Siliques_P Parameter: Tissue Value: 5-10mm Siliques vs. Whole Plant
  misc_feature: MA Experiment ID: 20000265 Result: Up-regulated in Transcription
  misc_feature: MA Experiment 20000265 PARAMETER Experiment Name: At_Open_Flower_P Parameter: Age (day) Value: 21
  misc_feature: MA Experiment 20000265 PARAMETER Experiment Name: At_Open_Flower_P Parameter: Plant Line Value: WS
  misc_feature: MA Experiment 20000265 PARAMETER Experiment Name: At_Open_Flower_P Parameter: Tissue Value: Closed Flower vs. Whole Plant
  misc_feature: MA Experiment ID: 20000439 Result: Up-regulated in Transcription
  misc_feature: MA Experiment 20000439 PARAMETER Experiment Name: At_Roots__P Parameter: Age (day) Value: 14 vs. 21
  misc_feature: MA Experiment 20000439 PARAMETER Experiment Name: At_Roots__P Parameter: Organism Value: A. thaliana
  misc_feature: MA Experiment 20000439 PARAMETER Experiment Name: At_Roots__P Parameter: Tissue Value: Roots vs. Whole Plant
  misc_feature: MA Experiment ID: 20001557 Result: Up-regulated in Transcription
  misc_feature: MA Experiment 20001557 PARAMETER Experiment Name: At_Drought_Soil_Dry_P Parameter: Age (day) Value: 27
  misc_feature: MA Experiment 20001557 PARAMETER Experiment Name: At_Drought_Soil_Dry_P Parameter: Organism Value: A. thaliana
  misc_feature: MA Experiment 20001557 PARAMETER Experiment Name: At_Drought_Soil_Dry_P Parameter: Plant Line Value: WS
  misc_feature: MA Experiment 20001557 PARAMETER Experiment Name: At_Drought_Soil_Dry_P Parameter: Post Timepoint (hr) Value: 3
  misc_feature: MA Experiment 20001557 PARAMETER Experiment Name: At_Drought_Soil_Dry_P Parameter: Post-Treatment Value: Re-Water vs. No Drought
  misc_feature: MA Experiment 20001557 PARAMETER Experiment Name: At_Drought_Soil_Dry_P Parameter: Timepoint (day) Value: 13
  misc_feature: MA Experiment 20001557 PARAMETER Experiment Name: At_Drought_Soil_Dry_P Parameter: Treatment Value: Drought vs. No Drought
  misc_feature: MA Experiment ID: 20001560 Result: Up-regulated in Transcription
  misc_feature: MA Experiment 20001560 PARAMETER Experiment Name: At_Drought_Soil_Dry_P Parameter: Age (day) Value: 28
  misc_feature: MA Experiment 20001560 PARAMETER Experiment Name: At_Drought_Soil_Dry_P Parameter: Organism Value: A. thaliana
  misc_feature: MA Experiment 20001560 PARAMETER Experiment Name: At_Drought_Soil_Dry_P Parameter: Plant Line Value: WS
  misc_feature: MA Experiment 20001560 PARAMETER Experiment Name: At_Drought_Soil_Dry_P Parameter: Post Timepoint (hr) Value: None
  misc_feature: MA Experiment 20001560 PARAMETER Experiment Name: At_Drought_Soil_Dry_P Parameter: Post-Treatment Value: None
  misc_feature: MA Experiment 20001560 PARAMETER Experiment Name: At_Drought_Soil_Dry_P Parameter: Timepoint (day) Value: 14
  misc_feature: MA Experiment 20001560 PARAMETER Experiment Name: At_Drought_Soil_Dry_P Parameter: Treatment Value: Drought vs. No Drought
  misc_feature: Pfam Name: Phosducin Pfam Description: Phosducin
atggatccagatgcagtcaaatcgactctctcgaatctagcatttggaaatgtaatggcggctgctgcaagaaattatcaaaaggaagttcttgcaaatgagaaggcgcaaggatcaaatcctgttaatgaagaggttgatcttgatgaacttatggatgatccagagctagaaagattgcacgcagataggattgcagcactaaagagagaggttgagaagagagaatcgtttaaaagacaagggcatggtgaatatcgagaggtgagtgaaggagatttcttgggtgaagtcaccaggagtgagaaagtgatatgtcatttctaccataaggaattttaccggtgcaagattatggacaagcatctgaaaactcttgcacctagacatgtggacacaaagttcattaaagtggacgcagagaatgctcctttctttgtcacgaagcttgcaataaagactttgccttgcgttgtgcttttcagcaagggagttgcgatggataggctagttgggttccaggatctgggaaccaaggacgatttcacaacgaataaactagagaacgttcttcttaaaaagggaatgctcagcaagaagaagaaagaggaagatgatgaagacgccgaatatcaagagagcatacggaggtctgttaggtcttcagagaatctggactctgattctgactga

SEQ ID NO: 71172 - protein, 230 aa, Arabidopsis thaliana
  peptide (1)..(230): Ceres Seq. ID no. 3071020
  misc_feature: Pfam Name: Phosducin Pfam Description: Phosducin
  misc_feature (1)..(230): Homolog of NCBI NO: 30693386 NR Description: expressed protein [Arabidopsis thaliana]
  misc_feature (1)..(230): Homolog of NCBI NO: 18425069 NR Description: putative protein; protein id: At5g66410.1,
  misc_feature (1)..(230): Homolog of NCBI NO: 10177522 NR Description: contains similarity to ATP binding protein
  misc_feature (19)..(230): Homolog of NCBI NO: 7485705 NR Description: hypothetical protein F18B3.240 - Arabidopsis >gi|4835247|emb|CAB42925.1| putative tRNA synthetase [Arabidopsis
  misc_feature (29)..(230): Homolog of NCBI NO: 25286717 NR Description: ATP binding protein associated with cell [Mus musculus] >gi|12833213|dbj|BAB22438.1| unnamed protein [Mus musculus] >gi|12839124|dbj|BAB24440.1| unnamed protein
  misc_feature (29)..(230): Homolog of NCBI NO: 25282435 NR Description: ES cell-related protein; ATP binding protein
  misc_feature (20)..(230): Homolog of NCBI NO: 18104959 NR Description: ATP binding protein associated with cell
  misc_feature (20)..(230): Homolog of NCBI NO: 2342477 NR Description: ATP binding protein [Homo sapiens]
  misc_feature (19)..(230): Homolog of NCBI NO: 28277604 NR Description: Similar to ATP binding protein associated with
  misc_feature (20)..(188): Homolog of NCBI NO: 19683948 NR Description: Similar to ATP binding protein associated with
MDPDAVKSTLSNLAFGNVMAAAARNYQKEVLANEKAQGSNPVNEEVDLDELMDDPELERLHADRIAALKREVEKRESFKRQGHGEYREVSEGDFLGEVTRSEKVICHFYHKEFYRCKIMDKHLKTLAPRHVDTKFIKVDAENAPFFVTKLAIKTLPCVVLFSKGVAMDRLVGFQDLGTKDDFTTNKLENVLLKKGMLSKKKKEEDDEDAEYQESIRRSVRSSENLDSDSD

SEQ ID NO: 71173 - protein, 212 aa, Arabidopsis thaliana
  peptide (1)..(212): Ceres Seq. ID no. 3071021
  misc_feature: Pfam Name: Phosducin Pfam Description: Phosducin
  misc_feature (1)..(212): Homolog of NCBI NO: 30693386 NR Description: expressed protein [Arabidopsis thaliana]
  misc_feature (1)..(212): Homolog of NCBI NO: 18425069 NR Description: putative protein; protein id: At5g66410.1,
  misc_feature (1)..(212): Homolog of NCBI NO: 10177522 NR Description: contains similarity to ATP binding protein
  misc_feature (1)..(212): Homolog of NCBI NO: 7485705 NR Description: hypothetical protein F18B3.240 - Arabidopsis >gi|4835247|emb|CAB42925.1| putative tRNA synthetase [Arabidopsis
  misc_feature (11)..(212): Homolog of NCBI NO: 25286717 NR Description: ATP binding protein associated with cell [Mus musculus] >gi|12833213|dbj|BAB22438.1| unnamed protein [Mus musculus] >gi|12839124|dbj|BAB24440.1| unnamed protein
  misc_feature (11)..(212): Homolog of NCBI NO: 25282435 NR Description: ES cell-related protein; ATP binding protein
  misc_feature (2)..(212): Homolog of NCBI NO: 18104959 NR Description: ATP binding protein associated with cell
  misc_feature (2)..(212): Homolog of NCBI NO: 2342477 NR Description: ATP binding protein [Homo sapiens]
  misc_feature (1)..(212): Homolog of NCBI NO: 28277604 NR Description: Similar to ATP binding protein associated with
  misc_feature (2)..(170): Homolog of NCBI NO: 19683948 NR Description: Similar to ATP binding protein associated with
MAAAARNYQKEVLANEKAQGSNPVNEEVDLDELMDDPELERLHADRIAALKREVEKRESFKRQGHGEYREVSEGDFLGEVTRSEKVICHFYHKEFYRCKIMDKHLKTLAPRHVDTKFIKVDAENAPFFVTKLAIKTLPCVVLFSKGVAMDRLVGFQDLGTKDDFTTNKLENVLLKKGMLSKKKKEEDDEDAEYQESIRRSVRSSENLDSDSD

SEQ ID NO: 71174 - protein, 179 aa, Arabidopsis thaliana
  peptide (1)..(179): Ceres Seq. ID no. 3071022
  misc_feature: Pfam Name: Phosducin Pfam Description: Phosducin
  misc_feature (1)..(179): Homolog of NCBI NO: 30693386 NR Description: expressed protein [Arabidopsis thaliana]
  misc_feature (1)..(179): Homolog of NCBI NO: 18425069 NR Description: putative protein; protein id: At5g66410.1,
  misc_feature (1)..(179): Homolog of NCBI NO: 10177522 NR Description: contains similarity to ATP binding protein
  misc_feature (1)..(179): Homolog of NCBI NO: 7485705 NR Description: hypothetical protein F18B3.240 - Arabidopsis >gi|4835247|emb|CAB42925.1| putative tRNA synthetase [Arabidopsis
  misc_feature (1)..(179): Homolog of NCBI NO: 25286717 NR Description: ATP binding protein associated with cell [Mus musculus] >gi|12833213|dbj|BAB22438.1| unnamed protein [Mus musculus] >gi|12839124|dbj|BAB24440.1| unnamed protein
  misc_feature (1)..(179): Homolog of NCBI NO: 25282435 NR Description: ES cell-related protein; ATP binding protein
  misc_feature (1)..(179): Homolog of NCBI NO: 18104959 NR Description: ATP binding protein associated with cell
  misc_feature (1)..(179): Homolog of NCBI NO: 2342477 NR Description: ATP binding protein [Homo sapiens]
  misc_feature (1)..(179): Homolog of NCBI NO: 28277604 NR Description: Similar to ATP binding protein associated with
  misc_feature (1)..(137): Homolog of NCBI NO: 19683948 NR Description: Similar to ATP binding protein associated with
MDDPELERLHADRIAALKREVEKRESFKRQGHGEYREVSEGDFLGEVTRSEKVICHFYHKEFYRCKIMDKHLKTLAPRHVDTKFIKVDAENAPFFVTKLAIKTLPCVVLFSKGVAMDRLVGFQDLGTKDDFTTNKLENVLLKKGMLSKKKKEEDDEDAEYQESIRRSVRSSENLDSDSD

SEQ ID NO: 71175 - DNA, 282 bp, Arabidopsis thaliana
  misc_feature (1)..(282): Ceres Seq. ID no. 3071450
  misc_feature: MA Experiment ID: 20000307 Result: Up-regulated in Transcription
  misc_feature: MA Experiment 20000307 PARAMETER Experiment Name: At_Germinating_Seeds_Sub_P Parameter: Age (hr) Value: 24 vs. 0
  misc_feature: MA Experiment 20000307 PARAMETER Experiment Name: At_Germinating_Seeds_Sub_P Parameter: Organism Value: A. thaliana
  misc_feature: MA Experiment 20000307 PARAMETER Experiment Name: At_Germinating_Seeds_Sub_P Parameter: Plant Line Value: WS
  misc_feature: MA Experiment 20000307 PARAMETER Experiment Name: At_Germinating_Seeds_Sub_P Parameter: Tissue Value: Germinating Seeds
  misc_feature: MA Experiment ID: 20000327 Result: Down-regulated in Transcription
  misc_feature: MA Experiment 20000327 PARAMETER Experiment Name: At_42deg_Heat_Sub_P Parameter: Age (day) Value: 14
  misc_feature: MA Experiment 20000327 PARAMETER Experiment Name: At_42deg_Heat_Sub_P Parameter: Organism Value: A. thaliana
  misc_feature: MA Experiment 20000327 PARAMETER Experiment Name: At_42deg_Heat_Sub_P Parameter: Plant Line Value: WS
  misc_feature: MA Experiment 20000327 PARAMETER Experiment Name: At_42deg_Heat_Sub_P Parameter: Temperature (deg C) Value: 42 vs. 22
  misc_feature: MA Experiment 20000327 PARAMETER Experiment Name: At_42deg_Heat_Sub_P Parameter: Timepoint (hr) Value: 1
  misc_feature: MA Experiment 20000327 PARAMETER Experiment Name: At_42deg_Heat_Sub_P Parameter: Tissue Value: Aerial
atgggattctctggcttagctccgattcttcacaagctgataatcttttgggaccaacctgaagcccttcacacgacaggttatgagattttgatgggtttgctttatgggttaggagctctggtttatgcaactaggatcccagagagatggatgccgggtaaattcgatatagcaggacatagccatcagttgtttcatgttctggtagttgctggtgcgttcacgcactatagagctgggctagtgtatcttaagtggagagatattgaaggatgttga

SEQ ID NO: 71176 - protein, 93 aa, Arabidopsis thaliana
  peptide (1)..(93): Ceres Seq. ID no. 3071451
  misc_feature (1)..(82): Pfam Name: Uncharacterised protein family (Hly-III / UPF0073) Pfam Description: Uncharacterised protein family (Hly-III /
  misc_feature (1)..(93): Homolog of NCBI NO: 15235657 NR Description: expressed protein; protein id: At4g37680.1, by cDNA: 262351., supported by cDNA: gi_13430521, supported by
  misc_feature (1)..(93): Homolog of NCBI NO: 15226736 NR Description: unknown protein; protein id: At2g40710.1
  misc_feature (1)..(82): Homolog of NCBI NO: 15233813 NR Description: putative protein; protein id: At4g38320.1
  misc_feature (21)..(93): Homolog of NCBI NO: 15233780 NR Description: putative protein; protein id: At4g38290.1
  misc_feature (1)..(88): Homolog of NCBI NO: 18377749 NR Description: unknown protein [Arabidopsis thaliana]
  misc_feature (1)..(88): Homolog of NCBI NO: 30688829 NR Description: expressed protein [Arabidopsis thaliana]
  misc_feature (1)..(93): Homolog of NCBI NO: 15241302 NR Description: putative protein; protein id: At5g20270.1, by cDNA: 24749., supported by cDNA: gi_15982833 [Arabidopsis >gi|15982834|gb|AAL09764.1| AT5g20270/F5O24_160 [Arabidopsis
  misc_feature (1)..(88): Homolog of NCBI NO: 25407688 NR Description: hypothetical protein AT4g30850 [imported] - thaliana >gi|2980781|emb|CAA18208.1| putative protein thaliana] >gi|7269986|emb|CAB79803.1| putative protein
  misc_feature (2)..(78): Homolog of NCBI NO: 24649051 NR Description: CG5315-PB [Drosophila melanogaster]
  misc_feature (1)..(77): Homolog of NCBI NO: 13272399 NR Description: hypothetical protein [Arabidopsis thaliana]
MGFSGLAPILHKLIIFWDQPEALHTTGYEILMGLLYGLGALVYATRIPERWMPGKFDIAGHSHQLFHVLVVAGAFTHYRAGLVYLKWRDIEGC

SEQ ID NO: 71177 - protein, 62 aa, Arabidopsis thaliana; identical to SEQ ID NO: 69645
  peptide (1)..(62): Ceres Seq. ID no. 3071452
  misc_feature (1)..(51): Pfam Name: Uncharacterised protein family (Hly-III / UPF0073) Pfam Description: Uncharacterised protein family (Hly-III /
  misc_feature (1)..(62): Homolog of NCBI NO: 15235657 NR Description: expressed protein; protein id: At4g37680.1, by cDNA: 262351., supported by cDNA: gi_13430521, supported by
  misc_feature (1)..(62): Homolog of NCBI NO: 15226736 NR Description: unknown protein; protein id: At2g40710.1
  misc_feature (1)..(51): Homolog of NCBI NO: 15233813 NR Description: putative protein; protein id: At4g38320.1
  misc_feature (1)..(62): Homolog of NCBI NO: 15233780 NR Description: putative protein; protein id: At4g38290.1
  misc_feature (1)..(57): Homolog of NCBI NO: 18377749 NR Description: unknown protein [Arabidopsis thaliana]
  misc_feature (1)..(57): Homolog of NCBI NO: 30688829 NR Description: expressed protein [Arabidopsis thaliana]
  misc_feature (1)..(62): Homolog of NCBI NO: 15241302 NR Description: putative protein; protein id: At5g20270.1, by cDNA: 24749., supported by cDNA: gi_15982833 [Arabidopsis >gi|15982834|gb|AAL09764.1| AT5g20270/F5O24_160 [Arabidopsis
  misc_feature (1)..(57): Homolog of NCBI NO: 25407688 NR Description: hypothetical protein AT4g30850 [imported] - thaliana >gi|2980781|emb|CAA18208.1| putative protein thaliana] >gi|7269986|emb|CAB79803.1| putative protein
  misc_feature (1)..(47): Homolog of NCBI NO: 24649051 NR Description: CG5315-PB [Drosophila melanogaster]
  misc_feature (1)..(46): Homolog of NCBI NO: 13272399 NR Description: hypothetical protein [Arabidopsis thaliana]

SEQ ID NO: 71178 - DNA, 804 bp, Arabidopsis thaliana
  misc_feature (1)..(804): Ceres Seq. ID no. 3073080
  misc_feature: MA Experiment ID: 20000306 Result: Down-regulated in Transcription
  misc_feature: MA Experiment 20000306 PARAMETER Experiment Name: At_Germinating_Seeds_Sub_P Parameter: Age (hr) Value: 6 vs. 0
  misc_feature: MA Experiment 20000306 PARAMETER Experiment Name: At_Germinating_Seeds_Sub_P Parameter: Organism Value: A. thaliana
  misc_feature: MA Experiment 20000306 PARAMETER Experiment Name: At_Germinating_Seeds_Sub_P Parameter: Plant Line Value: WS
  misc_feature: MA Experiment 20000306 PARAMETER Experiment Name: At_Germinating_Seeds_Sub_P Parameter: Tissue Value: Germinating Seeds
  misc_feature: MA Experiment ID: 20000307 Result: Down-regulated in Transcription
  misc_feature: MA Experiment 20000307 PARAMETER Experiment Name: At_Germinating_Seeds_Sub_P Parameter: Age (hr) Value: 24 vs. 0
  misc_feature: MA Experiment 20000307 PARAMETER Experiment Name: At_Germinating_Seeds_Sub_P Parameter: Organism Value: A. thaliana
  misc_feature: MA Experiment 20000307 PARAMETER Experiment Name: At_Germinating_Seeds_Sub_P Parameter: Plant Line Value: WS
  misc_feature: MA Experiment 20000307 PARAMETER Experiment Name: At_Germinating_Seeds_Sub_P Parameter: Tissue Value: Germinating Seeds
atggataccaacgcaaaaacaattttcttcatggctatgtgtttcatctatctatctttccctaatatttcacacgctcattctgaagtcgacgacgaaactccatttacttacgaacaaaaaacggaaaagggaccagagggatggggcaaaataaatccgcactggaaagtttgtaacaccggaagatatcaatccccgatcgatcttactaacgaaagagtcagtcttattcatgatcaagcatggacaagacaatataaaccagctccggctgtaattacaaacagaggccatgacattatggtatcatggaaaggagatgctgggaagatgacaatacggaaaacggattttaatttggtgcaatgccattggcattcaccttctgagcataccgttaacggaactaggtacgacctagagcttcacatggttcacacgagtgcacgaggcagaactgcggttatcggagttctttacaaattaggcgaacctaatgaattcctcaccaagctactaaatggaataaaagcagtgggaaataaagagataaatctagggatgattgatccacgagagattaggtttcaaacaagaaaattctatagatacattggctctctcactgttcctccttgcactgaaggcgtcatttggactgtcgtcaaaagggtgaacacaatatcaatggagcaaattacagctcttaggcaagccgttgacgatggatttgagacaaattcaagaccggttcaagactcaaagggaagatcagtttggttctatgatccaaatgtttga

SEQ ID NO: 71179 - protein, 267 aa, Arabidopsis thaliana
  peptide (1)..(267): Ceres Seq. ID no. 3073081
  misc_feature (36)..(226): Pfam Name: Eukaryotic-type carbonic anhydrase Pfam Description: Eukaryotic-type carbonic anhydrase
  misc_feature (1)..(267): Homolog of NCBI NO: 15233471 NR Description: carbonic anhydrase -like protein; protein id:
  misc_feature (1)..(226): Homolog of NCBI NO: 15233474 NR Description: carbonic anhydrase - like protein; protein id: [Arabidopsis thaliana] >gi|7484834|pir||T10642 carbonic anhydrase
  misc_feature (112)..(243): Homolog of NCBI NO: 7484833 NR Description: carbonic anhydrase homolog T13K14.150 -
  misc_feature (8)..(267): Homolog of NCBI NO: 15223122 NR Description: storage protein, putative; protein id: [Arabidopsis thaliana] >gi|21689637|gb|AAM67440.1| putative
  misc_feature (30)..(265): Homolog of NCBI NO: 25291473 NR Description: probable carbonic anhydrase [imported] - thaliana >gi|4803960|gb|AAD29832.1| putative carbonic anhydrase
  misc_feature (15)..(260): Homolog of NCBI NO: 29468280 NR Description: nectarin III [Nicotiana langsdorffii x Nicotiana
  misc_feature (20)..(265): Homolog of NCBI NO: 15223097 NR Description: carbonic anhydrase, putative; protein id:
  misc_feature (11)..(261): Homolog of NCBI NO: 15237646 NR Description: carbonate dehydratase - like protein; protein id:
  misc_feature (8)..(267): Homolog of NCBI NO: 25407021 NR Description: protein T6D22.16 [imported] - Arabidopsis >gi|8778838|gb|AAF79837.1|AC026875_17 T6D22.16 [Arabidopsis
  misc_feature (30)..(228): Homolog of NCBI NO: 30683808 NR Description: carbonic anhydrase -related [Arabidopsis thaliana]
MDTNAKTIFFMAMCFIYLSFPNISHAHSEVDDETPFTYEQKTEKGPEGWGKINPHWKVCNTGRYQSPIDLTNERVSLIHDQAWTRQYKPAPAVITNRGHDIMVSWKGDAGKMTIRKTDFNLVQCHWHSPSEHTVNGTRYDLELHMVHTSARGRTAVIGVLYKLGEPNEFLTKLLNGIKAVGNKEINLGMIDPREIRFQTRKFYRYIGSLTVPPCTEGVIWTVVKRVNTISMEQITALRQAVDDGFETNSRPVQDSKGRSVWFYDPNV

SEQ ID NO: 71180 - protein, 257 aa, Arabidopsis thaliana
  peptide (1)..(257): Ceres Seq. ID no. 3073082
  misc_feature (26)..(216): Pfam Name: Eukaryotic-type carbonic anhydrase Pfam Description: Eukaryotic-type carbonic anhydrase
  misc_feature (1)..(257): Homolog of NCBI NO: 15233471 NR Description: carbonic anhydrase -like protein; protein id:
  misc_feature (1)..(216): Homolog of NCBI NO: 15233474 NR Description: carbonic anhydrase - like protein; protein id: [Arabidopsis thaliana] >gi|7484834|pir||T10642 carbonic anhydrase
  misc_feature (102)..(233): Homolog of NCBI NO: 7484833 NR Description: carbonic anhydrase homolog T13K14.150 -
  misc_feature (1)..(257): Homolog of NCBI NO: 15223122 NR Description: storage protein, putative; protein id: [Arabidopsis thaliana] >gi|21689637|gb|AAM67440.1| putative
  misc_feature (20)..(255): Homolog of NCBI NO: 25291473 NR Description: probable carbonic anhydrase [imported] - thaliana >gi|4803960|gb|AAD29832.1| putative carbonic anhydrase
  misc_feature (5)..(250): Homolog of NCBI NO: 29468280 NR Description: nectarin III [Nicotiana langsdorffii x Nicotiana
  misc_feature (10)..(255): Homolog of NCBI NO: 15223097 NR Description: carbonic anhydrase, putative; protein id:
  misc_feature (1)..(251): Homolog of NCBI NO: 15237646 NR Description: carbonate dehydratase - like protein; protein id:
  misc_feature (1)..(257): Homolog of NCBI NO: 25407021 NR Description: protein T6D22.16 [imported] - Arabidopsis >gi|8778838|gb|AAF79837.1|AC026875_17 T6D22.16 [Arabidopsis
  misc_feature (20)..(218): Homolog of NCBI NO: 30683808 NR Description: carbonic anhydrase -related [Arabidopsis thaliana]
MAMCFIYLSFPNISHAHSEVDDETPFTYEQKTEKGPEGWGKINPHWKVCNTGRYQSPIDLTNERVSLIHDQAWTRQYKPAPAVITNRGHDIMVSWKGDAGKMTIRKTDFNLVQCHWHSPSEHTVNGTRYDLELHMVHTSARGRTAVIGVLYKLGEPNEFLTKLLNGIKAVGNKEINLGMIDPREIRFQTRKFYRYIGSLTVPPCTEGVIWTVVKRVNTISMEQITALRQAVDDGFETNSRPVQDSKGRSVWFYDPNV

SEQ ID NO: 71181 - protein, 255 aa, Arabidopsis thaliana
  peptide (1)..(255): Ceres Seq. ID no. 3073083
  misc_feature (24)..(214): Pfam Name: Eukaryotic-type carbonic anhydrase Pfam Description: Eukaryotic-type carbonic anhydrase
  misc_feature (1)..(255): Homolog of NCBI NO: 15233471 NR Description: carbonic anhydrase -like protein; protein id:
  misc_feature (1)..(214): Homolog of NCBI NO: 15233474 NR Description: carbonic anhydrase - like protein; protein id: [Arabidopsis thaliana] >gi|7484834|pir||T10642 carbonic anhydrase
  misc_feature (100)..(231): Homolog of NCBI NO: 7484833 NR Description: carbonic anhydrase homolog T13K14.150 -
  misc_feature (1)..(255): Homolog of NCBI NO: 15223122 NR Description: storage protein, putative; protein id: [Arabidopsis thaliana] >gi|21689637|gb|AAM67440.1| putative
  misc_feature (18)..(253): Homolog of NCBI NO: 25291473 NR Description: probable carbonic anhydrase [imported] - thaliana >gi|4803960|gb|AAD29832.1| putative carbonic anhydrase
  misc_feature (3)..(248): Homolog of NCBI NO: 29468280 NR Description: nectarin III [Nicotiana langsdorffii x Nicotiana
  misc_feature (8)..(253): Homolog of NCBI NO: 15223097 NR Description: carbonic anhydrase, putative; protein id:
  misc_feature (1)..(249): Homolog of NCBI NO: 15237646 NR Description: carbonate dehydratase - like protein; protein id:
  misc_feature (1)..(255): Homolog of NCBI NO: 25407021 NR Description: protein T6D22.16 [imported] - Arabidopsis >gi|8778838|gb|AAF79837.1|AC026875_17 T6D22.16 [Arabidopsis
  misc_feature (18)..(216): Homolog of NCBI NO: 30683808 NR Description: carbonic anhydrase -related [Arabidopsis thaliana]
MCFIYLSFPNISHAHSEVDDETPFTYEQKTEKGPEGWGKINPHWKVCNTGRYQSPIDLTNERVSLIHDQAWTRQYKPAPAVITNRGHDIMVSWKGDAGKMTIRKTDFNLVQCHWHSPSEHTVNGTRYDLELHMVHTSARGRTAVIGVLYKLGEPNEFLTKLLNGIKAVGNKEINLGMIDPREIRFQTRKFYRYIGSLTVPPCTEGVIWTVVKRVNTISMEQITALRQAVDDGFETNSRPVQDSKGRSVWFYDPNV

SEQ ID NO: 71182 - DNA, 732 bp, Arabidopsis thaliana
  misc_feature (1)..(732): Ceres Seq. ID no. 3074320
  misc_feature: MA Experiment ID: 20000314 Result: Down-regulated in Transcription
  misc_feature: MA Experiment 20000314 PARAMETER Experiment Name: At_14day_Shoots-Roots_Sub_P Parameter: Age (day) Value: 14
  misc_feature: MA Experiment 20000314 PARAMETER Experiment Name: At_14day_Shoots-Roots_Sub_P Parameter: Organism Value: A. thaliana
  misc_feature: MA Experiment 20000314 PARAMETER Experiment Name: At_14day_Shoots-Roots_Sub_P Parameter: Plant Line Value: WS
  misc_feature: MA Experiment 20000314 PARAMETER Experiment Name: At_14day_Shoots-Roots_Sub_P Parameter: Tissue Value: Roots vs. Whole Plant
  misc_feature: MA Experiment ID: 20000315 Result: Down-regulated in Transcription
  misc_feature: MA Experiment 20000315 PARAMETER Experiment Name: At_14day_Shoots-Roots_Sub_P Parameter: Age (day) Value: 14
  misc_feature: MA Experiment 20000315 PARAMETER Experiment Name: At_14day_Shoots-Roots_Sub_P Parameter: Organism Value: A. thaliana
  misc_feature: MA Experiment 20000315 PARAMETER Experiment Name: At_14day_Shoots-Roots_Sub_P Parameter: Plant Line Value: WS
  misc_feature: MA Experiment 20000315 PARAMETER Experiment Name: At_14day_Shoots-Roots_Sub_P Parameter: Tissue Value: Shoots vs. Whole Plant
  misc_feature: MA Experiment ID: 20000327 Result: Down-regulated in Transcription
  misc_feature: MA Experiment 20000327 PARAMETER Experiment Name: At_42deg_Heat_Sub_P Parameter: Age (day) Value: 14
  misc_feature: MA Experiment 20000327 PARAMETER Experiment Name: At_42deg_Heat_Sub_P Parameter: Organism Value: A. thaliana
  misc_feature: MA Experiment 20000327 PARAMETER Experiment Name: At_42deg_Heat_Sub_P Parameter: Plant Line Value: WS
  misc_feature: MA Experiment 20000327 PARAMETER Experiment Name: At_42deg_Heat_Sub_P Parameter: Temperature (deg C) Value: 42 vs. 22
  misc_feature: MA Experiment 20000327 PARAMETER Experiment Name: At_42deg_Heat_Sub_P Parameter: Timepoint (hr) Value: 1
  misc_feature: MA Experiment 20000327 PARAMETER Experiment Name: At_42deg_Heat_Sub_P Parameter: Tissue Value: Aerial
  misc_feature: MA Experiment ID: 20000328 Result: Down-regulated in Transcription
  misc_feature: MA Experiment 20000328 PARAMETER Experiment Name: At_42deg_Heat_Sub_P Parameter: Age (day) Value: 14
  misc_feature: MA Experiment 20000328 PARAMETER Experiment Name: At_42deg_Heat_Sub_P Parameter: Organism Value: A. thaliana
  misc_feature: MA Experiment 20000328 PARAMETER Experiment Name: At_42deg_Heat_Sub_P Parameter: Plant Line Value: WS
  misc_feature: MA Experiment 20000328 PARAMETER Experiment Name: At_42deg_Heat_Sub_P Parameter: Temperature (deg C) Value: 42 vs. 22
  misc_feature: MA Experiment 20000328 PARAMETER Experiment Name: At_42deg_Heat_Sub_P Parameter: Timepoint (hr) Value: 6
  misc_feature: MA Experiment 20000328 PARAMETER Experiment Name: At_42deg_Heat_Sub_P Parameter: Tissue Value: Aerial
  misc_feature: MA Experiment ID: 20000332 Result: Up-regulated in Transcription
  misc_feature: MA Experiment 20000332 PARAMETER Experiment Name: At_4deg_Cold_Sub_P Parameter: Age (day) Value: 14
  misc_feature: MA Experiment 20000332 PARAMETER Experiment Name: At_4deg_Cold_Sub_P Parameter: Organism Value: A. thaliana
  misc_feature: MA Experiment 20000332 PARAMETER Experiment Name: At_4deg_Cold_Sub_P Parameter: Plant Line Value: WS
  misc_feature: MA Experiment 20000332 PARAMETER Experiment Name: At_4deg_Cold_Sub_P Parameter: Temperature (deg C) Value: 4 vs. 22
  misc_feature: MA Experiment 20000332 PARAMETER Experiment Name: At_4deg_Cold_Sub_P Parameter: Timepoint (hr) Value: 2
  misc_feature: MA Experiment 20000332 PARAMETER Experiment Name: At_4deg_Cold_Sub_P Parameter: Tissue Value: Aerial
  misc_feature: MA Experiment ID: 20000347 Result: Up-regulated in Transcription
  misc_feature: MA Experiment 20000347 PARAMETER Experiment Name: At_2mM_SA_Sub_P Parameter: Age (day) Value: 14
  misc_feature: MA Experiment 20000347 PARAMETER Experiment Name: At_2mM_SA_Sub_P Parameter: Organism Value: A. thaliana
  misc_feature: MA Experiment 20000347 PARAMETER Experiment Name: At_2mM_SA_Sub_P Parameter: Plant Line Value: WS
  misc_feature: MA Experiment 20000347 PARAMETER Experiment Name: At_2mM_SA_Sub_P Parameter: Timepoint (hr) Value: 6
  misc_feature: MA Experiment 20000347 PARAMETER Experiment Name: At_2mM_SA_Sub_P Parameter: Tissue Value: Aerial
  misc_feature: MA Experiment 20000347 PARAMETER Experiment Name: At_2mM_SA_Sub_P Parameter: Treatment Value: 2mM SA vs. No Treatment
  misc_feature: MA Experiment ID: 20000355 Result: Down-regulated in Transcription
  misc_feature: MA Experiment 20000355 PARAMETER Experiment Name: At_Siliques_Sub_P Parameter: Age (day) Value: 21
  misc_feature: MA Experiment 20000355 PARAMETER Experiment Name: At_Siliques_Sub_P Parameter: Organism Value: A. thaliana
  misc_feature: MA Experiment 20000355 PARAMETER Experiment Name: At_Siliques_Sub_P Parameter: Plant Line Value: WS
  misc_feature: MA Experiment 20000355 PARAMETER Experiment Name: At_Siliques_Sub_P Parameter: Tissue Value: Less Than 5mm Siliques vs. Whole Plant
  misc_feature: MA Experiment ID: 20000440 Result: Down-regulated in Transcription
  misc_feature: MA Experiment 20000440 PARAMETER Experiment Name: At_Closed-Flower__Sub_P Parameter: Tissue Value: Closed Flower vs. Whole Plant
atggcgaaaaggctgccattgattttcctccttacttcacattttttagtatcgggagtgttgtccatgagtatccttaccatagagaacaagtgcaatcacacagtttggccagttatcttctcatggaacgttgactcacaagtctccccaacaggctttgctctcagaagaggggaggctcgagccctacaggcgccatcttcatggtacggtcttatctcggctaggacgctatgctccatcgactcaacaggaacattctcttgcgccacaggagactgcgaatcgggtacgatcgagtgtcctggcaattacggttgggctccggtgacttatgtctactttagaatgaacagctacaccatcagtgttgagtacggttacaaccttccactaatggtggtcccttcacagcgtagccggacatgtatcagcgctggttgcgttgttgaactgaaaaagacttgtccaaaagatcttatgaaaatgtccagagaaaatctagtcgcctgtagtagcacgtgcatggagtttgatactccggaggcttgttgcacccgagacttcaagtcaaagcaaaactgcaagccgacagtgtacacgcagaactttgagcgagcttgcccactcgctcatatctacgcctatgatgataacaatagcaccgttacatgcctaaactctactgactacgtcatcacgttttgtccttcaaacaaaactaattag

SEQ ID NO: 71183 - protein, 243 aa, Arabidopsis thaliana
  peptide (1)..(243): Ceres Seq. ID no. 3074321
  misc_feature (30)..(236): Pfam Name: Thaumatin family Pfam Description: Thaumatin family
  misc_feature (16)..(239): Homolog of NCBI NO: 7488208 NR Description: probable serine/threonine-specific protein kinase
  misc_feature (16)..(243): Homolog of NCBI NO: 30684346 NR Description: receptor serine/threonine kinase-related protein
  misc_feature (23)..(243): Homolog of NCBI NO: 30684346 NR Description: receptor serine/threonine kinase-related protein
  misc_feature (5)..(240): Homolog of NCBI NO: 1235680 NR Description: receptor serine/threonine kinase PR5K
  misc_feature (5)..(240): Homolog of NCBI NO: 15240873 NR Description: receptor serine/threonine kinase PR5K; protein At5g38280.1, supported by cDNA: gi_1235679 [Arabidopsis thaliana]
  misc_feature (1)..(243): Homolog of NCBI NO: 15222875 NR Description: thaumatin, putative; protein id: At1g75800.1, by cDNA: gi_18377859, supported by cDNA: gi_20334825 [Arabidopsis
  misc_feature (1)..(242): Homolog of NCBI NO: 4105697 NR Description: thaumatin-like protein [Arabidopsis thaliana]
  misc_feature (9)..(243): Homolog of NCBI NO: 25296204 NR Description: hypothetical protein T20H2.19 [imported] - thaliana >gi|8778995|gb|AAF79910.1|AC022472_19 Contains to SCUTL1 mRNA from Vitis vinifera gb|AF195653 and is a member of
  misc_feature (27)..(243): Homolog of NCBI NO: 30686652 NR Description: thaumatin family [Arabidopsis thaliana] calreticulin, putative [Arabidopsis thaliana]
  misc_feature (4)..(242): Homolog of NCBI NO: 15223105 NR Description: receptor serine/threonine kinase PR5, putative; id: At1g70250.1 [Arabidopsis thaliana] >gi|25406045|pir||E96725
MAKRLPLIFLLTSHFLVSGVLSMSILTIENKCNHTVWPVIFSWNVDSQVSPTGFALRRGEARALQAPSSWYGLISARTLCSIDSTGTFSCATGDCESGTIECPGNYGWAPVTYVYFRMNSYTISVEYGYNLPLMVVPSQRSRTCISAGCVVELKKTCPKDLMKMSRENLVACSSTCMEFDTPEACCTRDFKSKQNCKPTVYTQNFERACPLAHIYAYDDNNSTVTCLNSTDYVITFCPSNKTN

SEQ ID NO: 71184 - protein, 221 aa, Arabidopsis thaliana
  peptide (1)..(221): Ceres Seq. ID no. 3074322
  misc_feature (8)..(214): Pfam Name: Thaumatin family Pfam Description: Thaumatin family
  misc_feature (1)..(221): Homolog of NCBI NO: 30684346 NR Description: receptor serine/threonine kinase-related protein
  misc_feature (1)..(218): Homolog of NCBI NO: 1235680 NR Description: receptor serine/threonine kinase PR5K
  misc_feature (1)..(218): Homolog of NCBI NO: 15240873 NR Description: receptor serine/threonine kinase PR5K; protein At5g38280.1, supported by cDNA: gi_1235679 [Arabidopsis thaliana]
  misc_feature (1)..(221): Homolog of NCBI NO: 15222875 NR Description: thaumatin, putative; protein id: At1g75800.1, by cDNA: gi_18377859, supported by cDNA: gi_20334825 [Arabidopsis
  misc_feature (1)..(217): Homolog of NCBI NO: 7488208 NR Description: probable serine/threonine-specific protein kinase
  misc_feature (1)..(221): Homolog of NCBI NO: 30684346 NR Description: receptor serine/threonine kinase-related protein
  misc_feature (1)..(220): Homolog of NCBI NO: 4105697 NR Description: thaumatin-like protein [Arabidopsis thaliana]
  misc_feature (1)..(221): Homolog of NCBI NO: 25296204 NR Description: hypothetical protein T20H2.19 [imported] - thaliana >gi|8778995|gb|AAF79910.1|AC022472_19 Contains to SCUTL1 mRNA from Vitis vinifera gb|AF195653 and is a member of
  misc_feature (5)..(221): Homolog of NCBI NO: 30686652 NR Description: thaumatin family [Arabidopsis thaliana] calreticulin, putative [Arabidopsis thaliana]
  misc_feature (1)..(220): Homolog of NCBI NO: 15223105 NR Description: receptor serine/threonine kinase PR5, putative; id: At1g70250.1 [Arabidopsis thaliana] >gi|25406045|pir||E96725
MSILTIENKCNHTVWPVIFSWNVDSQVSPTGFALRRGEARALQAPSSWYGLISARTLCSIDSTGTFSCATGDCESGTIECPGNYGWAPVTYVYFRMNSYTISVEYGYNLPLMVVPSQRSRTCISAGCVVELKKTCPKDLMKMSRENLVACSSTCMEFDTPEACCTRDFKSKQNCKPTVYTQNFERACPLAHIYAYDDNNSTVTCLNSTDYVITFCPSNKTN

SEQ ID NO: 71185 - protein, 126 aa, Arabidopsis thaliana
  peptide (1)..(126): Ceres Seq. ID no. 3074323
  misc_feature (1)..(119): Pfam Name: Thaumatin family Pfam Description: Thaumatin family
  misc_feature (1)..(122): Homolog of NCBI NO: 7488208 NR Description: probable serine/threonine-specific protein kinase
  misc_feature (1)..(126): Homolog of NCBI NO: 30684346 NR Description: receptor serine/threonine kinase-related protein
  misc_feature (1)..(126): Homolog of NCBI NO: 30684346 NR Description: receptor serine/threonine kinase-related protein
  misc_feature (1)..(123): Homolog of NCBI NO: 1235680 NR Description: receptor serine/threonine kinase PR5K
  misc_feature (1)..(123): Homolog of NCBI NO: 15240873 NR Description: receptor serine/threonine kinase PR5K; protein At5g38280.1, supported by cDNA: gi_1235679 [Arabidopsis thaliana]
  misc_feature (1)..(126): Homolog of NCBI NO: 15222875 NR Description: thaumatin, putative; protein id: At1g75800.1, by cDNA: gi_18377859, supported by cDNA: gi_20334825 [Arabidopsis
  misc_feature (1)..(125): Homolog of NCBI NO: 4105697 NR Description: thaumatin-like protein [Arabidopsis thaliana]
  misc_feature (1)..(126): Homolog of NCBI NO: 25296204 NR Description: hypothetical protein T20H2.19 [imported] - thaliana >gi|8778995|gb|AAF79910.1|AC022472_19 Contains to SCUTL1 mRNA from Vitis vinifera gb|AF195653 and is a member of
  misc_feature (1)..(126): Homolog of NCBI NO: 30686652 NR Description: thaumatin family [Arabidopsis thaliana] calreticulin, putative [Arabidopsis thaliana]
  misc_feature (1)..(125): Homolog of NCBI NO: 15223105 NR Description: receptor serine/threonine kinase PR5, putative; id: At1g70250.1 [Arabidopsis thaliana] >gi|25406045|pir||E96725
MNSYTISVEYGYNLPLMVVPSQRSRTCISAGCVVELKKTCPKDLMKMSRENLVACSSTCMEFDTPEACCTRDFKSKQNCKPTVYTQNFERACPLAHIYAYDDNNSTVTCLNSTDYVITFCPSNKTN

SEQ ID NO: 71186 - DNA, 864 bp, Arabidopsis thaliana
  misc_feature (1)..(864): Ceres Seq. ID no. 3074433
  misc_feature: MA Experiment ID: 20000328 Result: Up-regulated in Transcription
  misc_feature: MA Experiment 20000328 PARAMETER Experiment Name: At_42deg_Heat_Sub_P Parameter: Age (day) Value: 14
  misc_feature: MA Experiment 20000328 PARAMETER Experiment Name: At_42deg_Heat_Sub_P Parameter: Organism Value: A. thaliana
  misc_feature: MA Experiment 20000328 PARAMETER Experiment Name: At_42deg_Heat_Sub_P Parameter: Plant Line Value: WS
  misc_feature: MA Experiment 20000328 PARAMETER Experiment Name: At_42deg_Heat_Sub_P Parameter: Temperature (deg C) Value: 42 vs. 22
  misc_feature: MA Experiment 20000328 PARAMETER Experiment Name: At_42deg_Heat_Sub_P Parameter: Timepoint (hr) Value: 6
  misc_feature: MA Experiment 20000328 PARAMETER Experiment Name: At_42deg_Heat_Sub_P Parameter: Tissue Value: Aerial
  misc_feature: MA Experiment ID: 20000347 Result: Up-regulated in Transcription
  misc_feature: MA Experiment 20000347 PARAMETER Experiment Name: At_2mM_SA_Sub_P Parameter: Age (day) Value: 14
  misc_feature: MA Experiment 20000347 PARAMETER Experiment Name: At_2mM_SA_Sub_P Parameter: Organism Value: A. thaliana
  misc_feature: MA Experiment 20000347 PARAMETER Experiment Name: At_2mM_SA_Sub_P Parameter: Plant Line Value: WS
  misc_feature: MA Experiment 20000347 PARAMETER Experiment Name: At_2mM_SA_Sub_P Parameter: Timepoint (hr) Value: 6
  misc_feature: MA Experiment 20000347 PARAMETER Experiment Name: At_2mM_SA_Sub_P Parameter: Tissue Value: Aerial
  misc_feature: MA Experiment 20000347 PARAMETER Experiment Name: At_2mM_SA_Sub_P Parameter: Treatment Value: 2mM SA vs. No Treatment
  misc_feature: MA Experiment ID: 20000348 Result: Up-regulated in Transcription
  misc_feature: MA Experiment 20000348 PARAMETER Experiment Name: At_100uM_ABA_Sub_P Parameter: Age (day) Value: 14
  misc_feature: MA Experiment 20000348 PARAMETER Experiment Name: At_100uM_ABA_Sub_P Parameter: Organism Value: A. thaliana
  misc_feature: MA Experiment 20000348 PARAMETER Experiment Name: At_100uM_ABA_Sub_P Parameter: Plant Line Value: WS
  misc_feature: MA Experiment 20000348 PARAMETER Experiment Name: At_100uM_ABA_Sub_P Parameter: Timepoint (hr) Value: 1
  misc_feature: MA Experiment 20000348 PARAMETER Experiment Name: At_100uM_ABA_Sub_P Parameter: Tissue Value: Aerial
  misc_feature: MA Experiment 20000348 PARAMETER Experiment Name: At_100uM_ABA_Sub_P Parameter: Treatment Value: 100uM ABA vs. No Treatment
  misc_feature: MA Experiment ID: 20000349 Result: Up-regulated in Transcription
  misc_feature: MA Experiment 20000349 PARAMETER Experiment Name: At_100uM_ABA_Sub_P Parameter: Age (day) Value: 14
  misc_feature: MA Experiment 20000349 PARAMETER Experiment Name: At_100uM_ABA_Sub_P Parameter: Organism Value: A. thaliana
  misc_feature: MA Experiment 20000349 PARAMETER Experiment Name: At_100uM_ABA_Sub_P Parameter: Plant Line Value: WS
  misc_feature: MA Experiment 20000349 PARAMETER Experiment Name: At_100uM_ABA_Sub_P Parameter: Timepoint (hr) Value: 6
  misc_feature: MA Experiment 20000349 PARAMETER Experiment Name: At_100uM_ABA_Sub_P Parameter: Tissue Value: Aerial
  misc_feature: MA Experiment 20000349 PARAMETER Experiment Name: At_100uM_ABA_Sub_P Parameter: Treatment Value: 100uM ABA vs. No Treatment
atggtgactgtaaaccctagccaagctcattgtttgcctatgaaaatgagtctaccgggtttcaatactcttccccacacggcaacaacgataccggtttccatacggagcaataggacgatgtcgttttttgaggatccaacaaagaaggttagaaagccttacactatcaccaaatctagagagaactggacggagcaagaacacgacaagttccttgaagcccttcatctatttgaccgggattggaagaaaataaaggcctttgttggatcaaaaacagtgatacagatacgaagccacgcacagaagtactttctcaaagttcagaagaatgggactaaagaacatctcccacctcctcgaccaaagaggaaagccaatcacccatatccacaaaaagctcctaaatttactctttcttcttcaaacgcattatttcaacatgactacttatacaacactaattcacatccggtgattagcaccacccgtaagcatggattagtgcattgcgatgttagtataccaagttctgttatcaaagaggaatttggtgtctcagagaactgttgcagcactagtagtagtagagataagcagaggactagaatcgttacagagacaaatgaccaagaaagttgtggaaagccacatagagtggcgccaaatttcgctgaagtttacaattttataggaagtgtgtttgatcctaaaacaacaggtcatgtcaagagattaaaggaaatggatccaataaatcttgagacggttctcttactgatgaaaaatttatctgtaaacctgacgagtcccgagtttgatgaacaacggaagttgatatcatcttacaacgccagttag

SEQ ID NO: 71187 - protein, 287 aa, Arabidopsis thaliana
  peptide (1)..(287): Ceres Seq. ID no. 3074434
  misc_feature (61)..(106): Pfam Name: Myb-like DNA-binding domain Pfam Description: Myb-like DNA-binding domain
  misc_feature (1)..(287): Homolog of NCBI NO: 15223419 NR Description: myb family transcription factor; protein id:
  misc_feature (1)..(287): Homolog of NCBI NO: 25517982 NR Description: F22L4.6 protein - Arabidopsis thaliana
  misc_feature (16)..(286): Homolog of NCBI NO: 15234118 NR Description: myb family transcription factor; protein id:
  misc_feature (1)..(137): Homolog of NCBI NO: 2505876 NR Description: MYB-related protein [Arabidopsis thaliana]
  misc_feature (25)..(285): Homolog of NCBI NO: 30696221 NR Description: myb family transcription factor [Arabidopsis
  misc_feature (25)..(285): Homolog of NCBI NO: 30696225 NR Description: myb family transcription factor [Arabidopsis >gi|25082907|gb|AAN72013.1| putative protein [Arabidopsis
  misc_feature (25)..(286): Homolog of NCBI NO: 8953721 NR Description: contains similarity to MYB-related DNA-binding
  misc_feature (45)..(285): Homolog of NCBI NO: 30680926 NR Description: myb family transcription factor [Arabidopsis >gi|20268705|gb|AAM14056.1| unknown protein [Arabidopsis >gi|21689883|gb|AAM67502.1| unknown protein [Arabidopsis
  misc_feature (1)..(137): Homolog of NCBI NO: 11357907 NR Description: hypothetical protein F9G14.150 - Arabidopsis >gi|7413559|emb|CAB86038.1| putative protein [Arabidopsis
  misc_feature (223)..(283): Homolog of NCBI NO: 11357907 NR Description: hypothetical protein F9G14.150 - Arabidopsis >gi|7413559|emb|CAB86038.1| putative protein [Arabidopsis
MVTVNPSQAHCLPMKMSLPGFNTLPHTATTIPVSIRSNRTMSFFEDPTKKVRKPYTITKSRENWTEQEHDKFLEALHLFDRDWKKIKAFVGSKTVIQIRSHAQKYFLKVQKNGTKEHLPPPRPKRKANHPYPQKAPKFTLSSSNALFQHDYLYNTNSHPVISTTRKHGLVHCDVSIPSSVIKEEFGVSENCCSTSSSRDKQRTRIVTETNDQESCGKPHRVAPNFAEVYNFIGSVFDPKTTGHVKRLKEMDPINLETVLLLMKNLSVNLTSPEFDEQRKLISSYNAS

SEQ ID NO: 71188 - protein, 274 aa, Arabidopsis thaliana
  peptide (1)..(274): Ceres Seq. ID no. 3074435
  misc_feature (48)..(93): Pfam Name: Myb-like DNA-binding domain Pfam Description: Myb-like DNA-binding domain
  misc_feature (1)..(274): Homolog of NCBI NO: 15223419 NR Description: myb family transcription factor; protein id:
  misc_feature (1)..(274): Homolog of NCBI NO: 25517982 NR Description: F22L4.6 protein - Arabidopsis thaliana
  misc_feature (3)..(273): Homolog of NCBI NO: 15234118 NR Description: myb family transcription factor; protein id:
  misc_feature (1)..(124): Homolog of NCBI NO: 2505876 NR Description: MYB-related protein [Arabidopsis thaliana]
  misc_feature (12)..(272): Homolog of NCBI NO: 30696221 NR Description: myb family transcription factor [Arabidopsis
  misc_feature (12)..(272): Homolog of NCBI NO: 30696225 NR Description: myb family transcription factor [Arabidopsis >gi|25082907|gb|AAN72013.1| putative protein [Arabidopsis
  misc_feature (12)..(273): Homolog of NCBI NO: 8953721 NR Description: contains similarity to MYB-related DNA-binding
  misc_feature (32)..(272): Homolog of NCBI NO: 30680926 NR Description: myb family transcription factor [Arabidopsis >gi|20268705|gb|AAM14056.1| unknown protein [Arabidopsis >gi|21689883|gb|AAM67502.1| unknown protein [Arabidopsis
  misc_feature (1)..(124): Homolog of NCBI NO: 11357907 NR Description: hypothetical protein F9G14.150 - Arabidopsis >gi|7413559|emb|CAB86038.1| putative protein [Arabidopsis
  misc_feature (210)..(270): Homolog of NCBI NO: 11357907 NR Description: hypothetical protein F9G14.150 - Arabidopsis >gi|7413559|emb|CAB86038.1| putative protein [Arabidopsis
MKMSLPGFNTLPHTATTIPVSIRSNRTMSFFEDPTKKVRKPYTITKSRENWTEQEHDKFLEALHLFDRDWKKIKAFVGSKTVIQIRSHAQKYFLKVQKNGTKEHLPPPRPKRKANHPYPQKAPKFTLSSSNALFQHDYLYNTNSHPVISTTRKHGLVHCDVSIPSSVIKEEFGVSENCCSTSSSRDKQRTRIVTETNDQESCGKPHRVAPNFAEVYNFIGSVFDPKTTGHVKRLKEMDPINLETVLLLMKNLSVNLTSPEFDEQRKLISSYNAS

SEQ ID NO: 71189 - protein, 272 aa, Arabidopsis thaliana
  peptide (1)..(272): Ceres Seq. ID no. 3074436
  misc_feature (46)..(91): Pfam Name: Myb-like DNA-binding domain Pfam Description: Myb-like DNA-binding domain
  misc_feature (1)..(272): Homolog of NCBI NO: 15223419 NR Description: myb family transcription factor; protein id:
  misc_feature (1)..(272): Homolog of NCBI NO: 25517982 NR Description: F22L4.6 protein - Arabidopsis thaliana
  misc_feature (1)..(271): Homolog of NCBI NO: 15234118 NR Description: myb family transcription factor; protein id:
  misc_feature (1)..(122): Homolog of NCBI NO: 2505876 NR Description: MYB-related protein [Arabidopsis thaliana]
  misc_feature (10)..(270): Homolog of NCBI NO: 30696221 NR Description: myb family transcription factor [Arabidopsis
  misc_feature (10)..(270): Homolog of NCBI NO: 30696225 NR Description: myb family transcription factor [Arabidopsis >gi|25082907|gb|AAN72013.1| putative protein [Arabidopsis
  misc_feature (10)..(271): Homolog of NCBI NO: 8953721 NR Description: contains similarity to MYB-related DNA-binding
  misc_feature (30)..(270): Homolog of NCBI NO: 30680926 NR Description: myb family transcription factor [Arabidopsis >gi|20268705|gb|AAM14056.1| unknown protein [Arabidopsis >gi|21689883|gb|AAM67502.1| unknown protein [Arabidopsis
  misc_feature (1)..(122): Homolog of NCBI NO: 11357907 NR Description: hypothetical protein F9G14.150 - Arabidopsis >gi|7413559|emb|CAB86038.1| putative protein [Arabidopsis
  misc_feature (208)..(268): Homolog of NCBI NO: 11357907 NR Description: hypothetical protein F9G14.150 - Arabidopsis >gi|7413559|emb|CAB86038.1| putative protein [Arabidopsis
MSLPGFNTLPHTATTIPVSIRSNRTMSFFEDPTKKVRKPYTITKSRENWTEQEHDKFLEALHLFDRDWKKIKAFVGSKTVIQIRSHAQKYFLKVQKNGTKEHLPPPRPKRKANHPYPQKAPKFTLSSSNALFQHDYLYNTNSHPVISTTRKHGLVHCDVSIPSSVIKEEFGVSENCCSTSSSRDKQRTRIVTETNDQESCGKPHRVAPNFAEVYNFIGSVFDPKTTGHVKRLKEMDPINLETVLLLMKNLSVNLTSPEFDEQRKLISSYNAS

SEQ ID NO: 71190 - DNA, 2277 bp, Arabidopsis thaliana
  misc_feature (1)..(2277): Ceres Seq. ID no. 3075485
  misc_feature: MA Experiment ID: 20000179 Result: Down-regulated in Transcription
  misc_feature: MA Experiment 20000179 PARAMETER Experiment Name: At_Germinating_Seeds_P Parameter: Age (hr) Value: 6 vs. 0
  misc_feature: MA Experiment 20000179 PARAMETER Experiment Name: At_Germinating_Seeds_P Parameter: Tissue Value: Germinating Seeds
  misc_feature: MA Experiment ID: 20000180 Result: Down-regulated in Transcription
  misc_feature: MA Experiment 20000180 PARAMETER Experiment Name: At_Germinating_Seeds_P Parameter: Age (hr) Value: 24 vs. 0
  misc_feature: MA Experiment 20000180 PARAMETER Experiment Name: At_Germinating_Seeds_P Parameter: Tissue Value: Germinating Seeds
  misc_feature: MA Experiment ID: 20000437 Result: Up-regulated in Transcription
  misc_feature: MA Experiment 20000437 PARAMETER Experiment Name: At_Drought_P Parameter: Age (day) Value: 8
  misc_feature: MA Experiment 20000437 PARAMETER Experiment Name: At_Drought_P Parameter: Organism Value: A. thaliana
  misc_feature: MA Experiment 20000437 PARAMETER Experiment Name: At_Drought_P Parameter: Plant Line Value: WS
  misc_feature: MA Experiment 20000437 PARAMETER Experiment Name: At_Drought_P Parameter: Timepoint (hr) Value: 24
  misc_feature: MA Experiment 20000437 PARAMETER Experiment Name: At_Drought_P Parameter: Tissue Value: Whole Plant
  misc_feature: MA Experiment 20000437 PARAMETER Experiment Name: At_Drought_P Parameter: Treatment Value: Drought vs. No Drought
  misc_feature: MA Experiment ID: 20000495 Result: Up-regulated in Transcription
  misc_feature: MA Experiment 20000495 PARAMETER Experiment Name: At_Guard_Cells_P Parameter: Harvest Date Value: 8/2/2002
  misc_feature: MA Experiment 20000495 PARAMETER Experiment Name: At_Guard_Cells_P Parameter: Organism Value: A. thaliana
  misc_feature: MA Experiment 20000495 PARAMETER Experiment Name: At_Guard_Cells_P Parameter: Tissue Value: Guard Cells vs. Leaves
atggtaggaggaagaagattagggaagagaggaagccctttgttgagatggagtgtgaaacaagaaagcttcagccatggattctcaaaatctgacctccaagctctctcttccatttgcgacgctattatgcctcctgttccattagagagcttaaatcttgagatgaagttgaaggttttgcgcaacgatgcactcttatctttcttcaagtcttcttcttctgagtctcatgttcgaccagatgaggtggcagagctactggcgaccaaggcaataccattgacagttttagtggtgagaatagttttgagaatactcacattcagactggggacgttactgctttgcgggttagtctgtcttgacaagaagcattggccttttcttctcaagttctctgaaatgtccctggagaagagggaaaaggttcttcagagatggaacacacagtggtataacccactagcgagaatcggctttatgatgatcaaagccatcttcttgttctactacttcacatggacaaatgaaaattcagaaaacccagtatgggatgcaattaattatagcgtggaaattggtgaaaatgaggacatggaacaaaaggaaagacctctagatgaagggatcatcgagactgcaaaagaagatgagatgaccatcaagcaacgtatgatcaacaaaggcctcaaagtcacagaagacagagaaagggacacttacaagatcgagtgtgatgcagtggtagtgggttctggctgtggcggaggggttgcagctgcaattctagcaaagtcgggccttagggtggtagttatcgagaaggggaactactttgcccccagagactactcagctctcgagggcccttccatgtttgagctgtttgagtccaatagcttgatgatgactcatgatggcaggttccggttcatggcaggatcaacagtcggtggtggctctgtggtaaactgggcagcgtccttaaaaacacctgatgctatcatcgaagaatggtcagtacatcgagggatttcaatatattctagtgagaaatataaggcggcgatgggtattgtctgcaagaggttaggtgtcactgagaaaatcatcagagaagggtttcagaaccagattctgcggaaaggttgcgagaagcttggtttggatgtgacaatagtgccaaggaattcaacagagaaacattattgcggtagttgctcgtatggatgcccaaccggagagaagagagggacagattcaacctggctggttgatgcagttaacaacaatgctgtgatcctaacacagtgcaaggctgagaaactaatcttggcggataacgatgctaacaaaagagaggagagcggacgaagaaaaagatgtttgggagtcgcagcctctctatcccaccaaaccagaaagaagcttcagatcaatgccaaagtgacaattgtggcttgcggctcgcttaagacaccaggattgttggcttcaagcgggttgaagaattcaaacatcagtcgcggtctccatatccaccctatcatgatggcttggggctacttcccagaaaagaattcagaattggaaggagcggctcatgagggagagatcgtcacttcattgcattatgtgcatccaatggactccactacacctaacatcacactggagactcctgctataggaccaggtacgttcgcagctctgaccccgtgggtctctgggtcagacatgaaagaaagaatggccaaatacgcaagaacagctcatatttttgccatggtgagagatgaaggagttggagaggtgaaaggagacattgtcaaatacagattaaccaaagcggacgaagagaatctgacaattgggttaaagcaagcactgaggatcctagtagcagcaggagcagcggaggtaggcacatacaggagcgacgggcagagaatgaagtgtgatggaatcaaacagaaagatctagaggcatttttagataccgtaaacgcgccacctggagttgtgtccatgagtaagcattggactcaatcctttacagcgcatcaaataggatgttgccgtatgggtgccacagaaaaggaaggagccattgatggaaaaggagagagctgggaggcagaagatttgtatgtctgtgatgcaagtgttctgcctacagctcttggtgttaatcccatgatcaccgttcagtccactgcttactgcatatccaacagaatagccgagttaatgaagaagaggaagaaagactga

SEQ ID NO: 71191 - protein, 758 aa, Arabidopsis thaliana
  peptide (1)..(758): Ceres Seq. ID no. 3075486
  misc_feature (247)..(524): Pfam Name: GMC oxidoreductase Pfam Description: GMC oxidoreductase
  misc_feature (200)..(758): Homolog of NCBI NO: 15219612 NR Description: unknown protein; protein id: At1g03990.1
  misc_feature (6)..(757): Homolog of NCBI NO: 21554016 NR Description: unknown [Arabidopsis thaliana]
  misc_feature (6)..(757): Homolog of NCBI NO: 15235348 NR Description: putative protein; protein id: At4g28570.1, by cDNA: 19314., supported by cDNA: gi_14532705 [Arabidopsis
  misc_feature (6)..(757): Homolog of NCBI NO: 14532706 NR Description: unknown protein [Arabidopsis thaliana]
  misc_feature (31)..(752): Homolog of NCBI NO: 18403753 NR Description: expressed protein; protein id: At3g23410.1, by cDNA: gi_13605691 [Arabidopsis thaliana] contains similarity to long chain fatty alcohol
  misc_feature (86)..(752): Homolog of NCBI NO: 22798796 NR Description: alcohol oxidase [Arabidopsis thaliana]
  misc_feature (205)..(755): Homolog of NCBI NO: 37535318 NR Description: putative alcohol oxidase [Oryza sativa (japonica group)] >gi|16905154|gb|AAL31024.1| putative alcohol oxidase sativa] >gi|31432640|gb|AAP54248.1| putative alcohol oxidase
  misc_feature (10)..(140): Homolog of NCBI NO: 37535318 NR Description: putative alcohol oxidase [Oryza sativa (japonica group)] >gi|16905154|gb|AAL31024.1| putative alcohol oxidase sativa] >gi|31432640|gb|AAP54248.1| putative alcohol oxidase
  misc_feature (177)..(757): Homolog of NCBI NO: 16905151 NR Description: putative alcohol oxidase [Oryza sativa]
  misc_feature (177)..(757): Homolog of NCBI NO: 37535334 NR Description: putative oxidase [Oryza sativa (japonica
MVGGRRLGKRGSPLLRWSVKQESFSHGFSKSDLQALSSICDAIMPPVPLESLNLEMKLKVLRNDALLSFFKSSSSESHVRPDEVAELLATKAIPLTVLVVRIVLRILTFRLGTLLLCGLVCLDKKHWPFLLKFSEMSLEKREKVLQRWNTQWYNPLARIGFMMIKAIFLFYYFTWTNENSENPVWDAINYSVEIGENEDMEQKERPLDEGIIETAKEDEMTIKQRMINKGLKVTEDRERDTYKIECDAVVVGSGCGGGVAAAILAKSGLRVVVIEKGNYFAPRDYSALEGPSMFELFESNSLMMTHDGRFRFMAGSTVGGGSVVNWAASLKTPDAIIEEWSVHRGISIYSSEKYKAAMGIVCKRLGVTEKIIREGFQNQILRKGCEKLGLDVTIVPRNSTEKHYCGSCSYGCPTGEKRGTDSTWLVDAVNNNAVILTQCKAEKLILADNDANKREESGRRKRCLGVAASLSHQTRKKLQINAKVTIVACGSLKTPGLLASSGLKNSNISRGLHIHPIMMAWGYFPEKNSELEGAAHEGEIVTSLHYVHPMDSTTPNITLETPAIGPGTFAALTPWVSGSDMKERMAKYARTAHIFAMVRDEGVGEVKGDIVKYRLTKADEENLTIGLKQALRILVAAGAAEVGTYRSDGQRMKCDGIKQKDLEAFLDTVNAPPGVVSMSKHWTQSFTAHQIGCCRMGATEKEGAIDGKGESWEAEDLYVCDASVLPTALGVNPMITVQSTAYCISNRIAELMKKRKKD

SEQ ID NO: 71192 - protein, 715 aa, Arabidopsis thaliana
  peptide (1)..(715): Ceres Seq. ID no. 3075487
  misc_feature (204)..(481): Pfam Name: GMC oxidoreductase Pfam Description: GMC oxidoreductase
  misc_feature (157)..(715): Homolog of NCBI NO: 15219612 NR Description: unknown protein; protein id: At1g03990.1
  misc_feature (1)..(714): Homolog of NCBI NO: 21554016 NR Description: unknown [Arabidopsis thaliana]
  misc_feature (1)..(714): Homolog of NCBI NO: 15235348 NR Description: putative protein; protein id: At4g28570.1, by cDNA: 19314., supported by cDNA: gi_14532705 [Arabidopsis
  misc_feature (1)..(714): Homolog of NCBI NO: 14532706 NR Description: unknown protein [Arabidopsis thaliana]
  misc_feature (1)..(709): Homolog of NCBI NO: 18403753 NR Description: expressed protein; protein id: At3g23410.1, by cDNA: gi_13605691 [Arabidopsis thaliana] contains similarity to long chain fatty alcohol
  misc_feature (43)..(709): Homolog of NCBI NO: 22798796 NR Description: alcohol oxidase [Arabidopsis thaliana]
  misc_feature (162)..(712): Homolog of NCBI NO: 37535318 NR Description: putative alcohol oxidase [Oryza sativa (japonica group)] >gi|16905154|gb|AAL31024.1| putative alcohol oxidase sativa] >gi|31432640|gb|AAP54248.1| putative alcohol oxidase
  misc_feature (1)..(97): Homolog of NCBI NO: 37535318 NR Description: putative alcohol oxidase [Oryza sativa (japonica group)] >gi|16905154|gb|AAL31024.1| putative alcohol oxidase sativa] >gi|31432640|gb|AAP54248.1| putative alcohol oxidase
  misc_feature (134)..(714): Homolog of NCBI NO: 16905151 NR Description: putative alcohol oxidase [Oryza sativa]
  misc_feature (134)..(714): Homolog of NCBI NO: 37535334 NR Description: putative oxidase [Oryza sativa (japonica
MPPVPLESLNLEMKLKVLRNDALLSFFKSSSSESHVRPDEVAELLATKAIPLTVLVVRIVLRILTFRLGTLLLCGLVCLDKKHWPFLLKFSEMSLEKREKVLQRWNTQWYNPLARIGFMMIKAIFLFYYFTWTNENSENPVWDAINYSVEIGENEDMEQKERPLDEGIIETAKEDEMTIKQRMINKGLKVTEDRERDTYKIECDAVVVGSGCGGGVAAAILAKSGLRVVVIEKGNYFAPRDYSALEGPSMFELFESNSLMMTHDGRFRFMAGSTVGGGSVVNWAASLKTPDAIIEEWSVHRGISIYSSEKYKAAMGIVCKRLGVTEKIIREGFQNQILRKGCEKLGLDVTIVPRNSTEKHYCGSCSYGCPTGEKRGTDSTWLVDAVNNNAVILTQCKAEKLILADNDANKREESGRRKRCLGVAASLSHQTRKKLQINAKVTIVACGSLKTPGLLASSGLKNSNISRGLHIHPIMMAWGYFPEKNSELEGAAHEGEIVTSLHYVHPMDSTTPNITLETPAIGPGTFAALTPWVSGSDMKERMAKYARTAHIFAMVRDEGVGEVKGDIVKYRLTKADEENLTIGLKQALRILVAAGAAEVGTYRSDGQRMKCDGIKQKDLEAFLDTVNAPPGVVSMSKHWTQSFTAHQIGCCRMGATEKEGAIDGKGESWEAEDLYVCDASVLPTALGVNPMITVQSTAYCISNRIAELMKKRKKD

SEQ ID NO: 71193 - protein, 703 aa, Arabidopsis thaliana
  peptide (1)..(703): Ceres Seq. ID no. 3075488
  misc_feature (192)..(469): Pfam Name: GMC oxidoreductase Pfam Description: GMC oxidoreductase
  misc_feature (145)..(703): Homolog of NCBI NO: 15219612 NR Description: unknown protein; protein id: At1g03990.1
  misc_feature (1)..(702): Homolog of NCBI NO: 21554016 NR Description: unknown [Arabidopsis thaliana]
  misc_feature (1)..(702): Homolog of NCBI NO: 15235348 NR Description: putative protein; protein id: At4g28570.1, by cDNA: 19314., supported by cDNA: gi_14532705 [Arabidopsis
  misc_feature (1)..(702): Homolog of NCBI NO: 14532706 NR Description: unknown protein [Arabidopsis thaliana]
  misc_feature (1)..(697): Homolog of NCBI NO: 18403753 NR Description: expressed protein; protein id: At3g23410.1, by cDNA: gi_13605691 [Arabidopsis thaliana] contains similarity to long chain fatty alcohol
  misc_feature (31)..(697): Homolog of NCBI NO: 22798796 NR Description: alcohol oxidase [Arabidopsis thaliana]
  misc_feature (150)..(700): Homolog of NCBI NO: 37535318 NR Description: putative alcohol oxidase [Oryza sativa (japonica group)] >gi|16905154|gb|AAL31024.1| putative alcohol oxidase sativa] >gi|31432640|gb|AAP54248.1| putative alcohol oxidase
  misc_feature (1)..(85): Homolog of NCBI NO: 37535318 NR Description: putative alcohol oxidase [Oryza sativa (japonica group)] >gi|16905154|gb|AAL31024.1| putative alcohol oxidase sativa] >gi|31432640|gb|AAP54248.1| putative alcohol oxidase
  misc_feature (122)..(702): Homolog of NCBI NO: 16905151 NR Description: putative alcohol oxidase [Oryza sativa]
  misc_feature (122)..(702): Homolog of NCBI NO: 37535334 NR Description: putative oxidase [Oryza sativa (japonica
MKLKVLRNDALLSFFKSSSSESHVRPDEVAELLATKAIPLTVLVVRIVLRILTFRLGTLLLCGLVCLDKKHWPFLLKFSEMSLEKREKVLQRWNTQWYNPLARIGFMMIKAIFLFYYFTWTNENSENPVWDAINYSVEIGENEDMEQKERPLDEGIIETAKEDEMTIKQRMINKGLKVTEDRERDTYKIECDAVVVGSGCGGGVAAAILAKSGLRVVVIEKGNYFAPRDYSALEGPSMFELFESNSLMMTHDGRFRFMAGSTVGGGSVVNWAASLKTPDAIIEEWSVHRGISIYSSEKYKAAMGIVCKRLGVTEKIIREGFQNQILRKGCEKLGLDVTIVPRNSTEKHYCGSCSYGCPTGEKRGTDSTWLVDAVNNNAVILTQCKAEKLILADNDANKREESGRRKRCLGVAASLSHQTRKKLQINAKVTIVACGSLKTPGLLASSGLKNSNISRGLHIHPIMMAWGYFPEKNSELEGAAHEGEIVTSLHYVHPMDSTTPNITLETPAIGPGTFAALTPWVSGSDMKERMAKYARTAHIFAMVRDEGVGEVKGDIVKYRLTKADEENLTIGLKQALRILVAAGAAEVGTYRSDGQRMKCDGIKQKDLEAFLDTVNAPPGVVSMSKHWTQSFTAHQIGCCRMGATEKEGAIDGKGESWEAEDLYVCDASVLPTALGVNPMITVQSTAYCISNRIAELMKKRKKD

SEQ ID NO: 71194 - DNA, 318 bp, Arabidopsis thaliana
  misc_feature (1)..(318): Ceres Seq. ID no. 3075564
  misc_feature: MA Experiment ID: 20000355 Result: Up-regulated in Transcription
  misc_feature: MA Experiment 20000355 PARAMETER Experiment Name: At_Siliques_Sub_P Parameter: Age (day) Value: 21
  misc_feature: MA Experiment 20000355 PARAMETER Experiment Name: At_Siliques_Sub_P Parameter: Organism Value: A. thaliana
  misc_feature: MA Experiment 20000355 PARAMETER Experiment Name: At_Siliques_Sub_P Parameter: Plant Line Value: WS
  misc_feature: MA Experiment 20000355 PARAMETER Experiment Name: At_Siliques_Sub_P Parameter: Tissue Value: Less Than 5mm Siliques vs. Whole Plant
  misc_feature: MA Experiment ID: 20000440 Result: Up-regulated in Transcription
  misc_feature: MA Experiment 20000440 PARAMETER Experiment Name: At_Closed-Flower__Sub_P Parameter: Tissue Value: Closed Flower vs. Whole Plant
atgtcggctcattggacgtttaagacaaaggaattagaagatcaggtggagaatcaaaggagaattgatcaggagctgaagaagaaggtgctgaagttagaattttgcctacgcgaaacacgcatccaaactcgaaaacttcaaaagatgggagagcgaaacgatatggcaatacaagaagtactcaacgagcaattggctgcaaaaaaacagcatgaagctgatctttctagcaaccaaaacttgtgggacaaatcaggtttcaagattattgtctccatgtcgatgctgatattagttgccttttctaggcgttga

SEQ ID NO: 71195 - protein, 105 aa, Arabidopsis thaliana
  peptide (1)..(105): Ceres Seq. ID no. 3075565
  misc_feature (1)..(105): Homolog of NCBI NO: 22329439 NR Description: hypothetical protein; protein id: At1g09470.1
  misc_feature (1)..(50): Homolog of NCBI NO: 25402551 NR Description: hypothetical protein [imported] - Arabidopsis >gi|3482922|gb|AAC33207.1| Hypothetical protein [Arabidopsis
  misc_feature (1)..(95): Homolog of NCBI NO: 22329441 NR Description: similar to contains similarity to myosin heavy
  misc_feature (1)..(105): Homolog of NCBI NO: 18421042 NR Description: putative protein; protein id: At5g26770.1,
  misc_feature (1)..(105): Homolog of NCBI NO: 4097950 NR Description: plant IF-like protein [Arabidopsis thaliana]
  misc_feature (1)..(105): Homolog of NCBI NO: 18397379 NR Description: expressed protein; protein id: At3g05830.1, by cDNA: 110680., supported by cDNA: gi_4097949 [Arabidopsis >gi|6714396|gb|AAF26085.1|AC012393_11 hypothetical protein
  misc_feature (1)..(96): Homolog of NCBI NO: 7485248 NR Description: hypothetical protein A_IG002P16.20 - Arabidopsis >gi|2191168|gb|AAB61054.1| contains similarity to myosin heavy
  misc_feature (8)..(105): Homolog of NCBI NO: 34894370 NR Description: unnamed protein product [Oryza sativa (japonica group)] >gi|8468034|dbj|BAA96634.1| unnamed protein product
MSAHWTFKTKELEDQVENQRRIDQELKKKVLKLEFCLRETRIQTRKLQKMGERNDMAIQEVLNEQLAAKKQHEADLSSNQNLWDKSGFKIIVSMSMLILVAFSRR

SEQ ID NO: 71196 - protein, 56 aa, Arabidopsis thaliana
  peptide (1)..(56): Ceres Seq. ID no. 3075566
  misc_feature (1)..(56): Homolog of NCBI NO: 22329439 NR Description: hypothetical protein; protein id: At1g09470.1
  misc_feature (1)..(46): Homolog of NCBI NO: 22329441 NR Description: similar to contains similarity to myosin heavy
  misc_feature (1)..(56): Homolog of NCBI NO: 18421042 NR Description: putative protein; protein id: At5g26770.1,
  misc_feature (1)..(56): Homolog of NCBI NO: 4097950 NR Description: plant IF-like protein [Arabidopsis thaliana]
  misc_feature (1)..(56): Homolog of NCBI NO: 18397379 NR Description: expressed protein; protein id: At3g05830.1, by cDNA: 110680., supported by cDNA: gi_4097949 [Arabidopsis >gi|6714396|gb|AAF26085.1|AC012393_11 hypothetical protein
  misc_feature (1)..(47): Homolog of NCBI NO: 7485248 NR Description: hypothetical protein A_IG002P16.20 - Arabidopsis >gi|2191168|gb|AAB61054.1| contains similarity to myosin heavy
  misc_feature (1)..(56): Homolog of NCBI NO: 34894370 NR Description: unnamed protein product [Oryza sativa (japonica group)] >gi|8468034|dbj|BAA96634.1| unnamed protein product
MGERNDMAIQEVLNEQLAAKKQHEADLSSNQNLWDKSGFKIIVSMSMLILVAFSRR

SEQ ID NO: 71197 - DNA, 870 bp, Arabidopsis thaliana
  misc_feature (1)..(870): Ceres Seq. ID no. 3077477
  misc_feature: MA Experiment ID: 20000227 Result: Down-regulated in Transcription
  misc_feature: MA Experiment 20000227 PARAMETER Experiment Name: At_Root-Tips-vs-Tops_P Parameter: Tissue Value: Root Tips vs. Root Tops
  misc_feature: MA Experiment ID: 20000794 Result: Up-regulated in Transcription
  misc_feature: MA Experiment 20000794 PARAMETER Experiment Name: At_Petals_P Parameter: Age (day) Value: 23-25 days
  misc_feature: MA Experiment 20000794 PARAMETER Experiment Name: At_Petals_P Parameter: Plant Line Value: WS
  misc_feature: MA Experiment 20000794 PARAMETER Experiment Name: At_Petals_P Parameter: Tissue Value: Petals vs. Whole plant
  misc_feature: MA Experiment ID: 20001247 Result: Up-regulated in Transcription
  misc_feature: MA Experiment 20001247 PARAMETER Experiment Name: At_Far-red-induction_P Parameter: Age (day) Value: 7
  misc_feature: MA Experiment 20001247 PARAMETER Experiment Name: At_Far-red-induction_P Parameter: Light Value: Far-red vs. White
  misc_feature: MA Experiment 20001247 PARAMETER Experiment Name: At_Far-red-induction_P Parameter: Organism Value: A. thaliana
  misc_feature: MA Experiment 20001247 PARAMETER Experiment Name: At_Far-red-induction_P Parameter: Plant Line Value: Columbia
  misc_feature: MA Experiment 20001247 PARAMETER Experiment Name: At_Far-red-induction_P Parameter: Timepoint (hr) Value: 1
  misc_feature: MA Experiment 20001247 PARAMETER Experiment Name: At_Far-red-induction_P Parameter: Tissue Value: Whole Plant
  misc_feature: MA Experiment ID: 20001450 Result: Up-regulated in Transcription
  misc_feature: MA Experiment 20001450 PARAMETER Experiment Name: At_Far-red-induction_P Parameter: Age (day) Value: 7
  misc_feature: MA Experiment 20001450 PARAMETER Experiment Name: At_Far-red-induction_P Parameter: Light Value: Far-red vs. White
  misc_feature: MA Experiment 20001450 PARAMETER Experiment Name: At_Far-red-induction_P Parameter: Organism Value: A. thaliana
  misc_feature: MA Experiment 20001450 PARAMETER Experiment Name: At_Far-red-induction_P Parameter: Plant Line Value: Columbia
  misc_feature: MA Experiment 20001450 PARAMETER Experiment Name: At_Far-red-induction_P Parameter: Timepoint (hr) Value: 8
  misc_feature: MA Experiment 20001450 PARAMETER Experiment Name: At_Far-red-induction_P Parameter: Tissue Value: Whole Plant
  misc_feature: MA Experiment ID: 20001451 Result: Up-regulated in Transcription
  misc_feature: MA Experiment 20001451 PARAMETER Experiment Name: At_Far-red-induction_P Parameter: Age (day) Value: 7
  misc_feature: MA Experiment 20001451 PARAMETER Experiment Name: At_Far-red-induction_P Parameter: Light Value: Far-red vs. White
  misc_feature: MA Experiment 20001451 PARAMETER Experiment Name: At_Far-red-induction_P Parameter: Organism Value: A. thaliana
  misc_feature: MA Experiment 20001451 PARAMETER Experiment Name: At_Far-red-induction_P Parameter: Plant Line Value: Columbia
  misc_feature: MA Experiment 20001451 PARAMETER Experiment Name: At_Far-red-induction_P Parameter: Timepoint (hr) Value: 24
  misc_feature: MA Experiment 20001451 PARAMETER Experiment Name: At_Far-red-induction_P Parameter: Tissue Value: Whole Plant
  misc_feature: MA Experiment ID: 20001554 Result: Down-regulated in Transcription
  misc_feature: MA Experiment 20001554 PARAMETER Experiment Name: At_Drought_Soil_Dry_P Parameter: Age (day) Value: 21
  misc_feature: MA Experiment 20001554 PARAMETER Experiment Name: At_Drought_Soil_Dry_P Parameter: Organism Value: A. thaliana
  misc_feature: MA Experiment 20001554 PARAMETER Experiment Name: At_Drought_Soil_Dry_P Parameter: Plant Line Value: WS
  misc_feature: MA Experiment 20001554 PARAMETER Experiment Name: At_Drought_Soil_Dry_P Parameter: Post Timepoint (hr) Value: None
  misc_feature: MA Experiment 20001554 PARAMETER Experiment Name: At_Drought_Soil_Dry_P Parameter: Post-Treatment Value: None
  misc_feature: MA Experiment 20001554 PARAMETER Experiment Name: At_Drought_Soil_Dry_P Parameter: Timepoint (day) Value: 7
  misc_feature: MA Experiment 20001554 PARAMETER Experiment Name: At_Drought_Soil_Dry_P Parameter: Treatment Value: Drought vs. No Drought
  misc_feature: MA Experiment ID: 20001555 Result: Down-regulated in Transcription
  misc_feature: MA Experiment 20001555 PARAMETER Experiment Name: At_Drought_Soil_Dry_P Parameter: Age (day) Value: 24
  misc_feature: MA Experiment 20001555 PARAMETER Experiment Name: At_Drought_Soil_Dry_P Parameter: Organism Value: A. thaliana
  misc_feature: MA Experiment 20001555 PARAMETER Experiment Name: At_Drought_Soil_Dry_P Parameter: Plant Line Value: WS
  misc_feature: MA Experiment 20001555 PARAMETER Experiment Name: At_Drought_Soil_Dry_P Parameter: Post Timepoint (hr) Value: None
  misc_feature: MA Experiment 20001555 PARAMETER Experiment Name: At_Drought_Soil_Dry_P Parameter: Post-Treatment Value: None
  misc_feature: MA Experiment 20001555 PARAMETER Experiment Name: At_Drought_Soil_Dry_P Parameter: Timepoint (day) Value: 10
  misc_feature: MA Experiment 20001555 PARAMETER Experiment Name: At_Drought_Soil_Dry_P Parameter: Treatment Value: Drought vs. No Drought
  misc_feature: MA Experiment ID: 20001556 Result: Down-regulated in Transcription
  misc_feature: MA Experiment 20001556 PARAMETER Experiment Name: At_Drought_Soil_Dry_P Parameter: Age (day) Value: 26
  misc_feature: MA Experiment 20001556 PARAMETER Experiment Name: At_Drought_Soil_Dry_P Parameter: Organism Value: A. thaliana
  misc_feature: MA Experiment 20001556 PARAMETER Experiment Name: At_Drought_Soil_Dry_P Parameter: Plant Line Value: WS
  misc_feature: MA Experiment 20001556 PARAMETER Experiment Name: At_Drought_Soil_Dry_P Parameter: Post Timepoint (hr) Value: None
  misc_feature: MA Experiment 20001556 PARAMETER Experiment Name: At_Drought_Soil_Dry_P Parameter: Post-Treatment Value: None
  misc_feature: MA Experiment 20001556 PARAMETER Experiment Name: At_Drought_Soil_Dry_P Parameter: Timepoint (day) Value: 12
  misc_feature: MA Experiment 20001556 PARAMETER Experiment Name: At_Drought_Soil_Dry_P Parameter: Treatment Value: Drought vs. No Drought
  misc_feature: MA Experiment ID: 20001906 Result: Down-regulated in Transcription
  misc_feature: MA Experiment 20001906 PARAMETER Experiment Name: At_Drought_Reproduction_P Parameter: Age (day) Value: 35
  misc_feature: MA Experiment 20001906 PARAMETER Experiment Name: At_Drought_Reproduction_P Parameter: Organism Value: A. thaliana
  misc_feature: MA Experiment 20001906 PARAMETER Experiment Name: At_Drought_Reproduction_P Parameter: Plant Line Value: WS
  misc_feature: MA Experiment 20001906 PARAMETER Experiment Name: At_Drought_Reproduction_P Parameter: Timepoint (day) Value: 5
  misc_feature: MA Experiment 20001906 PARAMETER Experiment Name: At_Drought_Reproduction_P Parameter: Tissue Value: Siliques
  misc_feature: MA Experiment 20001906 PARAMETER Experiment Name: At_Drought_Reproduction_P Parameter: Treatment Value: Drought vs. No Drought
  misc_feature: MA Experiment ID: 20001911 Result: Down-regulated in Transcription
  misc_feature: MA Experiment 20001911 PARAMETER Experiment Name: At_Drought_Reproduction_P Parameter: Age (day) Value: 40
  misc_feature: MA Experiment 20001911 PARAMETER Experiment Name: At_Drought_Reproduction_P Parameter: Organism Value: A. thaliana
  misc_feature: MA Experiment 20001911 PARAMETER Experiment Name: At_Drought_Reproduction_P Parameter: Plant Line Value: WS
  misc_feature: MA Experiment 20001911 PARAMETER Experiment Name: At_Drought_Reproduction_P Parameter: Timepoint (day) Value: 10
  misc_feature: MA Experiment 20001911 PARAMETER Experiment Name: At_Drought_Reproduction_P Parameter: Tissue Value: Flowers
  misc_feature: MA Experiment 20001911 PARAMETER Experiment Name: At_Drought_Reproduction_P Parameter: Treatment Value: Drought vs. No Drought
aacccacaaattgatctcttctctcttctcttacaccatcttcttcattcaccatgggaagatctccttgttgtgaaaaagctcacacaaacaaaggagcttggactaaagaagaagatcaacgtctcgtagattatatccgtaatcacggtgaaggttgttggcgttctcttcctaaatccgctggattgttgcgttgtggtaaaagttgtagattgagatggattaattaccttcgtcctgatcttaaacgtggtaattttactgatgatgaagatcaaatcatcatcaaactccatagcttactcggtaacaaatggtcattgatagctggaagattaccaggaagaacagataacgaaataaagaattattggaacactcatattaagaggaagcttcttagtcacggtattgatccacaaactcatcgtcagattaacgaatccaaaacggtgtcgtctcaagttgttgttcctattcaaaacgatgccgttgagtattctttttccaatttagccgttaaaccgaagacggaaaattcctccgataacggagcttcgactagcggcacgacgacggacgaggatctccggcagaatggggagtgttattatagtgataattcaggacatataaagctgaatttggatttaactcttgggtttggatcctggtcgggtcggatagtcggagtcgggtcatcggctgattctaaaccgtggtgcgacccggtgatggaggcgcgtttgtcactgttgtaataatttgtcaaaaaaatcccaaaaaatgggttttgttacttcatttttttttttgcttgagtccttttggataaatatagaaattctttacttcagtttctttggt

SEQ ID NO: 71198 - protein, 236 aa, Arabidopsis thaliana; identical to SEQ ID NO: 20987
  peptide (1)..(236): Ceres Seq. ID no. 3077478
  misc_feature (14)..(61): Pfam Name: Myb-like DNA-binding domain Pfam Description: Myb-like DNA-binding domain
  misc_feature (1)..(217): Homolog of NCBI NO: 30693208 NR Description: myb family transcription factor [Arabidopsis >gi|6644278|gb|AAF20989.1|AF207991_1 putative transcription
  misc_feature (84)..(217): Homolog of NCBI NO: 25403442 NR Description: protein F15O4.43 [imported] - Arabidopsis >gi|8778359|gb|AAF79367.1|AC007887_26 F15O4.43 [Arabidopsis
  misc_feature (1)..(88): Homolog of NCBI NO: 25403442 NR Description: protein F15O4.43 [imported] - Arabidopsis >gi|8778359|gb|AAF79367.1|AC007887_26 F15O4.43 [Arabidopsis
  misc_feature (1)..(219): Homolog of NCBI NO: 82310 NR Description: myb-related protein 330 - garden snapdragon
  misc_feature (1)..(224): Homolog of NCBI NO: 30687964 NR Description: myb family transcription factor [Arabidopsis
  misc_feature (1)..(236): Homolog of NCBI NO: 15233894 NR Description: myb family transcription factor; protein id: supported by cDNA: 28019., supported by cDNA: gi_1020154
  misc_feature (1)..(182): Homolog of NCBI NO: 23476279 NR Description: myb-like transcription factor 1 [Gossypium
  misc_feature (1)..(179): Homolog of NCBI NO: 7438345 NR Description: myb-related protein A - upland cotton
  misc_feature (1)..(225): Homolog of NCBI NO: 11273985 NR Description: myb-related transcription factor MYB4 [imported] Arabidopsis thaliana >gi|3941412|gb|AAC83582.1| putative
  misc_feature (1)..(225): Homolog of NCBI NO: 15233968 NR Description: putative transcription factor (MYB4); protein id:

SEQ ID NO: 71199 - DNA, 798 bp, Arabidopsis thaliana
  misc_feature (1)..(798): Ceres Seq. ID no. 3081646
  misc_feature: MA Experiment ID: 20001558 Result: Down-regulated in Transcription
  misc_feature: MA Experiment 20001558 PARAMETER Experiment Name: At_Drought_Soil_Dry_P Parameter: Age (day) Value: 27
  misc_feature: MA Experiment 20001558 PARAMETER Experiment Name: At_Drought_Soil_Dry_P Parameter: Organism Value: A. thaliana
  misc_feature: MA Experiment 20001558 PARAMETER Experiment Name: At_Drought_Soil_Dry_P Parameter: Plant Line Value: WS
  misc_feature: MA Experiment 20001558 PARAMETER Experiment Name: At_Drought_Soil_Dry_P Parameter: Post Timepoint (hr) Value: 6
  misc_feature: MA Experiment 20001558 PARAMETER Experiment Name: At_Drought_Soil_Dry_P Parameter: Post-Treatment Value: Re-Water vs. No Drought
  misc_feature: MA Experiment 20001558 PARAMETER Experiment Name: At_Drought_Soil_Dry_P Parameter: Timepoint (day) Value: 13
  misc_feature: MA Experiment 20001558 PARAMETER Experiment Name: At_Drought_Soil_Dry_P Parameter: Treatment Value: Drought vs. No Drought
  misc_feature: MA Experiment ID: 20001911 Result: Up-regulated in Transcription
  misc_feature: MA Experiment 20001911 PARAMETER Experiment Name: At_Drought_Reproduction_P Parameter: Age (day) Value: 40
  misc_feature: MA Experiment 20001911 PARAMETER Experiment Name: At_Drought_Reproduction_P Parameter: Organism Value: A. thaliana
  misc_feature: MA Experiment 20001911 PARAMETER Experiment Name: At_Drought_Reproduction_P Parameter: Plant Line Value: WS
  misc_feature: MA Experiment 20001911 PARAMETER Experiment Name: At_Drought_Reproduction_P Parameter: Timepoint (day) Value: 10
  misc_feature: MA Experiment 20001911 PARAMETER Experiment Name: At_Drought_Reproduction_P Parameter: Tissue Value: Flowers
  misc_feature: MA Experiment 20001911 PARAMETER Experiment Name: At_Drought_Reproduction_P Parameter: Treatment Value: Drought vs. No Drought
atggctgcaacagtgctcggccatttcagtccaattacatcgtccctaaaaccaccgtcacgccaccggcgattcctacaccacaatttgtcccccaaaacaccccttcaatcttctcttatcaaattcggcgccgaaaactccgaacctcaacctccacggccgttgccggaaactgattgtcccgttccgccggagcagcagccaatcaacgagtatcaatctctctccacctctttccctttctcctgggcttcaggagatctaatcgagtactctaccagacttttcttaaccggcgcttctttcgcatttttcgtcgggttacccgtttcctggttcggatccatcggacccgaatatgaacctgttaagaggattctcgccgccagctctagcgggatcttcgttgtcacgcttgctgtcgtaaggatgtatcttggttgggcttatgtcggtaatcgtcttcttagcgccaccgtcgagtatgaagaaactggttggtacgatggtcaggtatgggtgaaaacaccagaagtcttggcacgagaccgtcttcttggatctttctcggtaaagccagttcttgcgagactgaaaaacacgctagttattctcggattatcgctcattcttgttataaaccttggtgattctccaattgcaacgtcttatagaacatacagggatcctagggacagatcctcgctgccaatcccaggagcgtacaatgatgaaaccgcaagaactttcgaaccagaagctttctgcggtgaaccatcttccgatcttctttga

SEQ ID NO: 71200 - protein, 265 aa, Arabidopsis thaliana
  peptide (1)..(265): Ceres Seq. ID no. 3081647
  misc_feature (1)..(265): Homolog of NCBI NO: 15239796 NR Description: putative protein; protein id: At5g11840.1
  misc_feature (57)..(227): Homolog of NCBI NO: 15240715 NR Description: putative protein; protein id: At5g67370.1, by cDNA: gi_13430429, supported by cDNA: gi_15293188 [Arabidopsis >gi|9758436|dbj|BAB09022.1| gb|AAC18972.1~gene_id:K8K14.9~similar
  misc_feature (57)..(216): Homolog of NCBI NO: 40736997 NR Description: expressed protein [Oryza sativa (japonica
  misc_feature (59)..(212): Homolog of NCBI NO: 11467354 NR Description: ycf36 [Cyanophora paradoxa] Hypothetical 18.6 kDa protein ycf36 >gi|7448726|pir||T06899
  misc_feature (57)..(207): Homolog of NCBI NO: 3184557 NR Description: unknown [Synechococcus sp. PCC 7002]
  misc_feature (60)..(211): Homolog of NCBI NO: 17231662 NR Description: hypothetical protein [Nostoc sp. PCC 7120]
  misc_feature (56)..(208): Homolog of NCBI NO: 11465739 NR Description: ORF36 [Porphyra purpurea] HYPOTHETICAL 19.2 KD PROTEIN YCF36 (ORF165)
  misc_feature (62)..(217): Homolog of NCBI NO: 23040962 NR Description: hypothetical protein [Trichodesmium erythraeum
  misc_feature (54)..(214): Homolog of NCBI NO: 16331827 NR Description: hypothetical protein [Synechocystis sp. PCC 6803]
  misc_feature (61)..(212): Homolog of NCBI NO: 22298607 NR Description: ORF_ID:tll1063~hypothetical protein
MAATVLGHFSPITSSLKPPSRHRRFLHHNLSPKTPLQSSLIKFGAENSEPQPPRPLPETDCPVPPEQQPINEYQSLSTSFPFSWASGDLIEYSTRLFLTGASFAFFVGLPVSWFGSIGPEYEPVKRILAASSSGIFVVTLAVVRMYLGWAYVGNRLLSATVEYEETGWYDGQVWVKTPEVLARDRLLGSFSVKPVLARLKNTLVILGLSLILVINLGDSPIATSYRTYRDPRDRSSLPIPGAYNDETARTFEPEAFCGEPSSDLL

SEQ ID NO: 71201 - DNA, 1491 bp, Arabidopsis thaliana
  misc_feature (1)..(1491): Ceres Seq. ID no. 3081676
  misc_feature: MA Experiment ID: 20000185 Result: Up-regulated in Transcription
  misc_feature: MA Experiment 20000185 PARAMETER Experiment Name: At_Roots__P Parameter: Age (day) Value: 7 vs. 21
  misc_feature: MA Experiment 20000185 PARAMETER Experiment Name: At_Roots__P Parameter: Organism Value: A. thaliana
  misc_feature: MA Experiment 20000185 PARAMETER Experiment Name: At_Roots__P Parameter: Tissue Value: Roots vs. Whole Plant
  misc_feature: MA Experiment ID: 20000227 Result: Down-regulated in Transcription
  misc_feature: MA Experiment 20000227 PARAMETER Experiment Name: At_Root-Tips-vs-Tops_P Parameter: Tissue Value: Root Tips vs. Root Tops
  misc_feature: MA Experiment ID: 20000267 Result: Up-regulated in Transcription
  misc_feature: MA Experiment 20000267 PARAMETER Experiment Name: At_Drought_P Parameter: Age (day) Value: 7
  misc_feature: MA Experiment 20000267 PARAMETER Experiment Name: At_Drought_P Parameter: Organism Value: A. thaliana
  misc_feature: MA Experiment 20000267 PARAMETER Experiment Name: At_Drought_P Parameter: Plant Line Value: WS
  misc_feature: MA Experiment 20000267 PARAMETER Experiment Name: At_Drought_P Parameter: Timepoint (hr) Value: 6
  misc_feature: MA Experiment 20000267 PARAMETER Experiment Name: At_Drought_P Parameter: Tissue Value: Whole Plant
  misc_feature: MA Experiment 20000267 PARAMETER Experiment Name: At_Drought_P Parameter: Treatment Value: Drought vs. No Drought
  misc_feature: MA Experiment ID: 20000573 Result: Down-regulated in Transcription
  misc_feature: MA Experiment 20000573 PARAMETER Experiment Name: At_100uM_ABA_Mutants__P Parameter: Organism Value: A. thaliana
  misc_feature: MA Experiment 20000573 PARAMETER Experiment Name: At_100uM_ABA_Mutants__P Parameter: Plant Line Value: CS22 vs. Ler wt
  misc_feature: MA Experiment 20000573 PARAMETER Experiment Name: At_100uM_ABA_Mutants__P Parameter: Timepoint (hr) Value: N/A
  misc_feature: MA Experiment 20000573 PARAMETER Experiment Name: At_100uM_ABA_Mutants__P Parameter: Tissue Value: Whole Plant
  misc_feature: MA Experiment 20000573 PARAMETER Experiment Name: At_100uM_ABA_Mutants__P Parameter: Treatment Value: None
  misc_feature: MA Experiment ID: 20000794 Result: Up-regulated in Transcription
  misc_feature: MA Experiment 20000794 PARAMETER Experiment Name: At_Petals_P Parameter: Age (day) Value: 23-25 days
  misc_feature: MA Experiment 20000794 PARAMETER Experiment Name: At_Petals_P Parameter: Plant Line Value: WS
  misc_feature: MA Experiment 20000794 PARAMETER Experiment Name: At_Petals_P Parameter: Tissue Value: Petals vs. Whole plant
  misc_feature: MA Experiment ID: 20001910 Result: Up-regulated in Transcription
  misc_feature: MA Experiment 20001910 PARAMETER Experiment Name: At_Drought_Reproduction_P Parameter: Age (day) Value: 37
  misc_feature: MA Experiment 20001910 PARAMETER Experiment Name: At_Drought_Reproduction_P Parameter: Organism Value: A. thaliana
  misc_feature: MA Experiment 20001910 PARAMETER Experiment Name: At_Drought_Reproduction_P Parameter: Plant Line Value: WS
  misc_feature: MA Experiment 20001910 PARAMETER Experiment Name: At_Drought_Reproduction_P Parameter: Timepoint (day) Value: 7
  misc_feature: MA Experiment 20001910 PARAMETER Experiment Name: At_Drought_Reproduction_P Parameter: Tissue Value: Flowers
  misc_feature: MA Experiment 20001910 PARAMETER Experiment Name: At_Drought_Reproduction_P Parameter: Treatment Value: Drought vs. No Drought
atggaactcaattgtgttcaatttcttcgaaacaagacgattcttgtcaccggagctaccggtttccttgcgaaggtttttgtggagaaaattctgagagtgcaaccaaatgtgaagaagctgtaccttttggtgagagcatctgacaatgaagctgccactaaacgcttacgcacagaggtatttgagaaagaactttttaaggtattgagacagaatcttggcgatgagaaattaaatacattgttgtacgaaaaagttgtttcggtcccgggtgatatagcgactgatcaattaggcataaatgactctcatcttagagaacgtatgcaaaaagaaatagatattgttgtcaatgttgcagccacaacaaactttgacgaaagatatgatgttgggcttgggatcaatacatttggagctctcaacgtccttaactttgccaaaaaatgtgttaaagttcaattgcttctccatgtctcaactgcttatgtttgtggagaaaagccaggtctcatacctgaaaaaccattcatcatggaagagattcgtaacgagaatggtcttcaattggatattaaccttgaaagggagcttatgaagcaaagattgaaagaactcaatgaacaagattgttccgaagaagacattactctttccatgaaagaactcggaatggaaagggccaagcttcatggatggcctaacacatatgttttcaccaaatcaatgggagaaatgcttcttggtaagcataaagaaaatctccccctcgtcatcatccgtcccacgatgatcactagtactctttcggaaccttttcctggttggatcgaaggcttgagaactgtcgacagcgtgattattgcatatggaaagggagtgctcaagtgttttcttgtcgatgttaactcggtctgcgatatgataccagtggatatggtggcaaacgcaatgatcacggctgcagccaaacacgctggaggttcaggggttcacatggtgtaccatgtcggctcatctcaccagaacccagtcacatttggagagattcatgagattgcggttcgttactttacgaaaaaccctttgcgaagtcgcaatggctcactcataaccgtctcaaaagtgaggttcataccaaccatggctttgttcagcctctacatgaccctacgttacaaactacctctccagttattaaaactagttgacataatatatccttggagaaacggagataaatatggagacaagaaccgcaaaatcgagttggtgatgagattggtagagctttatgagccttatgtactcttcaagggaatattcgacgatagaaatacaaagagtttatgcgcaaaccagaaggaagaggagatcaaaaatacagaaaaattgatgtttgatttcgacccaaaaggaattaattggggagattatctcacaaatatacacatttctggactcgtcacacacgtgcttaagaagtga

SEQ ID NO: 71202 - protein, 496 aa, Arabidopsis thaliana
  peptide (1)..(496): Ceres Seq. ID no. 3081677
  misc_feature (288)..(494): Pfam Name: Male sterility protein Pfam Description: Male sterility protein
  misc_feature (1)..(401): Homolog of NCBI NO: 15229991 NR Description: acyl CoA reductase -like protein; protein id:
  misc_feature (1)..(336): Homolog of NCBI NO: 15229993 NR Description: acyl CoA reductase -like protein; protein id:
  misc_feature (404)..(496): Homolog of NCBI NO: 15229993 NR Description: acyl CoA reductase -like protein; protein id:
  misc_feature (1)..(496): Homolog of NCBI NO: 15242260 NR Description: male sterility 2-like protein (emb|CAA68191.1); id: At5g22500.1, supported by cDNA: gi_14334737, supported by
  misc_feature (1)..(496): Homolog of NCBI NO: 11357157 NR Description: acyl CoA reductase-protein - Arabidopsis thaliana
  misc_feature (1)..(401): Homolog of NCBI NO: 30692171 NR Description: acyl CoA reductase - protein [Arabidopsis
  misc_feature (112)..(487): Homolog of NCBI NO: 15242233 NR Description: acyl CoA reductase-like protein; protein id:
  misc_feature (1)..(56): Homolog of NCBI NO: 15242233 NR Description: acyl CoA reductase-like protein; protein id:
  misc_feature (6)..(494): Homolog of NCBI NO: 5020215 NR Description: acyl CoA reductase [Simmondsia chinensis]
  misc_feature (1)..(493): Homolog of NCBI NO: 16323107 NR Description: AT4g33790/T16L1_280 [Arabidopsis thaliana]
MELNCVQFLRNKTILVTGATGFLAKVFVEKILRVQPNVKKLYLLVRASDNEAATKRLRTEVFEKELFKVLRQNLGDEKLNTLLYEKVVSVPGDIATDQLGINDSHLRERMQKEIDIVVNVAATTNFDERYDVGLGINTFGALNVLNFAKKCVKVQLLLHVSTAYVCGEKPGLIPEKPFIMEEIRNENGLQLDINLERELMKQRLKELNEQDCSEEDITLSMKELGMERAKLHGWPNTYVFTKSMGEMLLGKHKENLPLVIIRPTMITSTLSEPFPGWIEGLRTVDSVIIAYGKGVLKCFLVDVNSVCDMIPVDMVANAMITAAAKHAGGSGVHMVYHVGSSHQNPVTFGEIHEIAVRYFTKNPLRSRNGSLITVSKVRFIPTMALFSLYMTLRYKLPLQLLKLVDIIYPWRNGDKYGDKNRKIELVMRLVELYEPYVLFKGIFDDRNTKSLCANQKEEEIKNTEKLMFDFDPKGINWGDYLTNIHISGLVTHVLKK

SEQ ID NO: 71203 - protein, 387 aa, Arabidopsis thaliana
  peptide (1)..(387): Ceres Seq. ID no. 3081678
  misc_feature (179)..(385): Pfam Name: Male sterility protein Pfam Description: Male sterility protein
  misc_feature (1)..(292): Homolog of NCBI NO: 15229991 NR Description: acyl CoA reductase -like protein; protein id:
  misc_feature (1)..(227): Homolog of NCBI NO: 15229993 NR Description: acyl CoA reductase -like protein; protein id:
  misc_feature (295)..(387): Homolog of NCBI NO: 15229993 NR Description: acyl CoA reductase -like protein; protein id:
  misc_feature (1)..(387): Homolog of NCBI NO: 15242260 NR Description: male sterility 2-like protein (emb|CAA68191.1); id: At5g22500.1, supported by cDNA: gi_14334737, supported by
  misc_feature (1)..(387): Homolog of NCBI NO: 11357157 NR Description: acyl CoA reductase-protein - Arabidopsis thaliana
  misc_feature (1)..(292): Homolog of NCBI NO: 30692171 NR Description: acyl CoA reductase - protein [Arabidopsis
  misc_feature (3)..(378): Homolog of NCBI NO: 15242233 NR Description: acyl CoA reductase-like protein; protein id:
  misc_feature (1)..(385): Homolog of NCBI NO: 5020215 NR Description: acyl CoA reductase [Simmondsia chinensis]
  misc_feature (1)..(384): Homolog of NCBI NO: 16323107 NR Description: AT4g33790/T16L1_280 [Arabidopsis thaliana]
  misc_feature (1)..(384): Homolog of NCBI NO: 35215152 NR Description: putative fatty acyl coA reductase [Oryza sativa
MQKEIDIVVNVAATTNFDERYDVGLGINTFGALNVLNFAKKCVKVQLLLHVSTAYVCGEKPGLIPEKPFIMEEIRNENGLQLDINLERELMKQRLKELNEQDCSEEDITLSMKELGMERAKLHGWPNTYVFTKSMGEMLLGKHKENLPLVIIRPTMITSTLSEPFPGWIEGLRTVDSVIIAYGKGVLKCFLVDVNSVCDMIPVDMVANAMITAAAKHAGGSGVHMVYHVGSSHQNPVTFGEIHEIAVRYFTKNPLRSRNGSLITVSKVRFIPTMALFSLYMTLRYKLPLQLLKLVDIIYPWRNGDKYGDKNRKIELVMRLVELYEPYVLFKGIFDDRNTKSLCANQKEEEIKNTEKLMFDFDPKGINWGDYLTNIHISGLVTHVLKK

SEQ ID NO: 71204 - protein, 317 aa, Arabidopsis thaliana
  peptide (1)..(317): Ceres Seq. ID no. 3081679
  misc_feature (109)..(315): Pfam Name: Male sterility protein Pfam Description: Male sterility protein
  misc_feature (1)..(222): Homolog of NCBI NO: 15229991 NR Description: acyl CoA reductase -like protein; protein id:
  misc_feature (1)..(157): Homolog of NCBI NO: 15229993 NR Description: acyl CoA reductase -like protein; protein id:
  misc_feature (225)..(317): Homolog of NCBI NO: 15229993 NR Description: acyl CoA reductase -like protein; protein id:
  misc_feature (1)..(317): Homolog of NCBI NO: 15242260 NR Description: male sterility 2-like protein (emb|CAA68191.1); id: At5g22500.1, supported by cDNA: gi_14334737, supported by
  misc_feature (1)..(317): Homolog of NCBI NO: 11357157 NR Description: acyl CoA reductase-protein - Arabidopsis thaliana
  misc_feature (1)..(222): Homolog of NCBI NO: 30692171 NR Description: acyl CoA reductase - protein [Arabidopsis
  misc_feature (1)..(308): Homolog of NCBI NO: 15242233 NR Description: acyl CoA reductase-like protein; protein id:
  misc_feature (1)..(315): Homolog of NCBI NO: 5020215 NR Description: acyl CoA reductase [Simmondsia chinensis]
  misc_feature (1)..(314): Homolog of NCBI NO: 16323107 NR Description: AT4g33790/T16L1_280 [Arabidopsis thaliana]
  misc_feature (1)..(314): Homolog of NCBI NO: 35215152 NR Description: putative fatty acyl coA reductase [Oryza sativa
MEEIRNENGLQLDINLERELMKQRLKELNEQDCSEEDITLSMKELGMERAKLHGWPNTYVFTKSMGEMLLGKHKENLPLVIIRPTMITSTLSEPFPGWIEGLRTVDSVIIAYGKGVLKCFLVDVNSVCDMIPVDMVANAMITAAAKHAGGSGVHMVYHVGSSHQNPVTFGEIHEIAVRYFTKNPLRSRNGSLITVSKVRFIPTMALFSLYMTLRYKLPLQLLKLVDIIYPWRNGDKYGDKNRKIELVMRLVELYEPYVLFKGIFDDRNTKSLCANQKEEEIKNTEKLMFDFDPKGINWGDYLTNIHISGLVTHVLKK

SEQ ID NO: 71205 - DNA, 978 bp, Arabidopsis thaliana
  misc_feature (1)..(978): Ceres Seq. ID no. 3081688
  misc_feature: MA Experiment ID: 20000439 Result: Up-regulated in Transcription
  misc_feature: MA Experiment 20000439 PARAMETER Experiment Name: At_Roots__P Parameter: Age (day) Value: 14 vs. 21
  misc_feature: MA Experiment 20000439 PARAMETER Experiment Name: At_Roots__P Parameter: Organism Value: A. thaliana
  misc_feature: MA Experiment 20000439 PARAMETER Experiment Name: At_Roots__P Parameter: Tissue Value: Roots vs. Whole Plant
atggaggaacatcttcaaggaagaatcaaacttcacgatggtagatacttggcctacaaggaaagaggtgtccccaaggatgatgcaaagttcacgatcgttcttgttcatggatttggtagctccaaggatatgaacttcaatgtctcacaagagcttgtgaatgaaattggtatatactttgtgctatatgatcgagctggttacggagagagcgacccgaatcctaaacgttcgttgaagagtgaagcctacgatgttcaggaactggcggatggtttagagatcggatccaggttttatttgattggaatttcaatgggttcctacactgtttggagctgccttaaacatattcctcaaaggttagcaggagtggcaatggtggctccggtggtgaatttccggtggccgtctattccaaagagtctgatgccaaaagactacagaagagaagtggcgaaatggtctgtttggatagctaactattttccgggacttttgcaatggttggtgactcagaacatgttctctacaacttccatgctagagaaaaaccctgtctacttcaacgaccaagacattgaagtccttaagcacatcaaaggcttcccaatgctcactaaggagaagttacgggagcgcggcgtcttcgggacgctgagaagcgattttttggtagcattcggcgactgggacttcgatccggcagacctacctgacccgtctctgtctggaccggaaaagggctcttcttctgttcacatatggcaaggctacgaagacaaagtgatgccatttcagctgcaaagatgtttgtgccgcaagctaccatggattaggtaccatgaggtccctaaaggaggccacctgatcgtgcactacgacggcatatgtgatgcgattttgaaatcacttcttttaggagaagatctcccaatgtacaaaccaaaagctgtgatcactgagccagcttag

SEQ ID NO: 71206 - protein, 325 aa, Arabidopsis thaliana
  peptide (1)..(325): Ceres Seq. ID no. 3081689
  misc_feature (59)..(311): Pfam Name: alpha/beta hydrolase fold Pfam Description: alpha/beta hydrolase fold
  misc_feature (128)..(325): Homolog of NCBI NO: 15229984 NR Description: putative protein; protein id: At3g44510.1
  misc_feature (122)..(316): Homolog of NCBI NO: 15223177 NR Description: unknown protein; protein id: At1g08310.1
  misc_feature (8)..(123): Homolog of NCBI NO: 15223177 NR Description: unknown protein; protein id: At1g08310.1
  misc_feature (122)..(311): Homolog of NCBI NO: 25407040 NR Description: protein T23G18.18 [imported] - Arabidopsis >gi|6579201|gb|AAF18244.1|AC011438_6 T23G18.18 [Arabidopsis
  misc_feature (8)..(123): Homolog of NCBI NO: 25407040 NR Description: protein T23G18.18 [imported] - Arabidopsis >gi|6579201|gb|AAF18244.1|AC011438_6 T23G18.18 [Arabidopsis
  misc_feature (8)..(308): Homolog of NCBI NO: 15242253 NR Description: putative protein; protein id: At5g22460.1, by cDNA: gi_15292740, supported by cDNA: gi_20465594 [Arabidopsis
  misc_feature (8)..(311): Homolog of NCBI NO: 34908462 NR Description: P0683F02.22 [Oryza sativa (japonica
  misc_feature (8)..(311): Homolog of NCBI NO: 15228377 NR Description: putative protein; protein id: At3g48410.1, by cDNA: gi_17529095 [Arabidopsis thaliana]
  misc_feature (8)..(305): Homolog of NCBI NO: 30678800 NR Description: esterase/lipase/thioesterase family [Arabidopsis
  misc_feature (8)..(313): Homolog of NCBI NO: 38346334 NR Description: OSJNBa0073L04.5 [Oryza sativa (japonica
MEEHLQGRIKLHDGRYLAYKERGVPKDDAKFTIVLVHGFGSSKDMNFNVSQELVNEIGIYFVLYDRAGYGESDPNPKRSLKSEAYDVQELADGLEIGSRFYLIGISMGSYTVWSCLKHIPQRLAGVAMVAPVVNFRWPSIPKSLMPKDYRREVAKWSVWIANYFPGLLQWLVTQNMFSTTSMLEKNPVYFNDQDIEVLKHIKGFPMLTKEKLRERGVFGTLRSDFLVAFGDWDFDPADLPDPSLSGPEKGSSSVHIWQGYEDKVMPFQLQRCLCRKLPWIRYHEVPKGGHLIVHYDGICDAILKSLLLGEDLPMYKPKAVITEPA

SEQ ID NO: 71207 - protein, 281 aa, Arabidopsis thaliana
  peptide (1)..(281): Ceres Seq. ID no. 3081690
  misc_feature (15)..(267): Pfam Name: alpha/beta hydrolase fold Pfam Description: alpha/beta hydrolase fold
  misc_feature (84)..(281): Homolog of NCBI NO: 15229984 NR Description: putative protein; protein id: At3g44510.1
  misc_feature (78)..(272): Homolog of NCBI NO: 15223177 NR Description: unknown protein; protein id: At1g08310.1
  misc_feature (1)..(79): Homolog of NCBI NO: 15223177 NR Description: unknown protein; protein id: At1g08310.1
  misc_feature (78)..(267): Homolog of NCBI NO: 25407040 NR Description: protein T23G18.18 [imported] - Arabidopsis >gi|6579201|gb|AAF18244.1|AC011438_6 T23G18.18 [Arabidopsis
  misc_feature (1)..(79): Homolog of NCBI NO: 25407040 NR Description: protein T23G18.18 [imported] - Arabidopsis >gi|6579201|gb|AAF18244.1|AC011438_6 T23G18.18 [Arabidopsis
  misc_feature (1)..(264): Homolog of NCBI NO: 15242253 NR Description: putative protein; protein id: At5g22460.1, by cDNA: gi_15292740, supported by cDNA: gi_20465594 [Arabidopsis
  misc_feature (1)..(267): Homolog of NCBI NO: 34908462 NR Description: P0683F02.22 [Oryza sativa (japonica
  misc_feature (1)..(267): Homolog of NCBI NO: 15228377 NR Description: putative protein; protein id: At3g48410.1, by cDNA: gi_17529095 [Arabidopsis thaliana]
  misc_feature (1)..(261): Homolog of NCBI NO: 30678800 NR Description: esterase/lipase/thioesterase family [Arabidopsis
  misc_feature (1)..(269): Homolog of NCBI NO: 38346334 NR Description: OSJNBa0073L04.5 [Oryza sativa (japonica
MNFNVSQELVNEIGIYFVLYDRAGYGESDPNPKRSLKSEAYDVQELADGLEIGSRFYLIGISMGSYTVWSCLKHIPQRLAGVAMVAPVVNFRWPSIPKSLMPKDYRREVAKWSVWIANYFPGLLQWLVTQNMFSTTSMLEKNPVYFNDQDIEVLKHIKGFPMLTKEKLRERGVFGTLRSDFLVAFGDWDFDPADLPDPSLSGPEKGSSSVHIWQGYEDKVMPFQLQRCLCRKLPWIRYHEVPKGGHLIVHYDGICDAILKSLLLGEDLPMYKPKAVITEPA

SEQ ID NO: 71208 - protein, 219 aa, Arabidopsis thaliana
  peptide (1)..(219): Ceres Seq. ID no. 3081691
  misc_feature (1)..(205): Pfam Name: alpha/beta hydrolase fold Pfam Description: alpha/beta hydrolase fold
  misc_feature (22)..(219): Homolog of NCBI NO: 15229984 NR Description: putative protein; protein id: At3g44510.1
  misc_feature (16)..(210): Homolog of NCBI NO: 15223177 NR Description: unknown protein; protein id: At1g08310.1
  misc_feature (1)..(17): Homolog of NCBI NO: 15223177 NR Description: unknown protein; protein id: At1g08310.1
  misc_feature (16)..(205): Homolog of NCBI NO: 25407040 NR Description: protein T23G18.18 [imported] - Arabidopsis >gi|6579201|gb|AAF18244.1|AC011438_6 T23G18.18 [Arabidopsis
  misc_feature (1)..(17): Homolog of NCBI NO: 25407040 NR Description: protein T23G18.18 [imported] - Arabidopsis >gi|6579201|gb|AAF18244.1|AC011438_6 T23G18.18 [Arabidopsis
  misc_feature (1)..(202): Homolog of NCBI NO: 15242253 NR Description: putative protein; protein id: At5g22460.1, by cDNA: gi_15292740, supported by cDNA: gi_20465594 [Arabidopsis
  misc_feature (1)..(205): Homolog of NCBI NO: 34908462 NR Description: P0683F02.22 [Oryza sativa (japonica
  misc_feature (1)..(205): Homolog of NCBI NO: 15228377 NR Description: putative protein; protein id: At3g48410.1, by cDNA: gi_17529095 [Arabidopsis thaliana]
  misc_feature (1)..(199): Homolog of NCBI NO: 30678800 NR Description: esterase/lipase/thioesterase family [Arabidopsis
  misc_feature (1)..(207): Homolog of NCBI NO: 38346334 NR Description: OSJNBa0073L04.5 [Oryza sativa (japonica
MGSYTVWSCLKHIPQRLAGVAMVAPVVNFRWPSIPKSLMPKDYRREVAKWSVWIANYFPGLLQWLVTQNMFSTTSMLEKNPVYFNDQDIEVLKHIKGFPMLTKEKLRERGVFGTLRSDFLVAFGDWDFDPADLPDPSLSGPEKGSSSVHIWQGYEDKVMPFQLQRCLCRKLPWIRYHEVPKGGHLIVHYDGICDAILKSLLLGEDLPMYKPKAVITEPA

SEQ ID NO: 71209 - DNA, 2031 bp, Arabidopsis thaliana
  misc_feature (1)..(2031): Ceres Seq. ID no. 3081922
  misc_feature: MA Experiment ID: 20000171 Result: Down-regulated in Transcription
  misc_feature: MA Experiment 20000171 PARAMETER Experiment Name: At_42deg_Heat_P Parameter: Age (day) Value: 14
  misc_feature: MA Experiment 20000171 PARAMETER Experiment Name: At_42deg_Heat_P Parameter: Organism Value: A. thaliana
  misc_feature: MA Experiment 20000171 PARAMETER Experiment Name: At_42deg_Heat_P Parameter: Plant Line Value: WS
  misc_feature: MA Experiment 20000171 PARAMETER Experiment Name: At_42deg_Heat_P Parameter: Temperature (deg C) Value: 42 vs. 22
  misc_feature: MA Experiment 20000171 PARAMETER Experiment Name: At_42deg_Heat_P Parameter: Timepoint (hr) Value: 1
  misc_feature: MA Experiment 20000171 PARAMETER Experiment Name: At_42deg_Heat_P Parameter: Tissue Value: Aerial
  misc_feature: MA Experiment ID: 20000173 Result: Down-regulated in Transcription
  misc_feature: MA Experiment 20000173 PARAMETER Experiment Name: At_42deg_Heat_P Parameter: Age (day) Value: 14
  misc_feature: MA Experiment 20000173 PARAMETER Experiment Name: At_42deg_Heat_P Parameter: Organism Value: A. thaliana
  misc_feature: MA Experiment 20000173 PARAMETER Experiment Name: At_42deg_Heat_P Parameter: Plant Line Value: WS
  misc_feature: MA Experiment 20000173 PARAMETER Experiment Name: At_42deg_Heat_P Parameter: Temperature (deg C) Value: 42 vs. 22
  misc_feature: MA Experiment 20000173 PARAMETER Experiment Name: At_42deg_Heat_P Parameter: Timepoint (hr) Value: 6
  misc_feature: MA Experiment 20000173 PARAMETER Experiment Name: At_42deg_Heat_P Parameter: Tissue Value: Aerial
  misc_feature: MA Experiment ID: 20000182 Result: Up-regulated in Transcription
  misc_feature: MA Experiment 20000182 PARAMETER Experiment Name: At_2mM_SA_P Parameter: Age (day) Value: 14
  misc_feature: MA Experiment 20000182 PARAMETER Experiment Name: At_2mM_SA_P Parameter: Organism Value: A. thaliana
  misc_feature: MA Experiment 20000182 PARAMETER Experiment Name: At_2mM_SA_P Parameter: Plant Line Value: WS
  misc_feature: MA Experiment 20000182 PARAMETER Experiment Name: At_2mM_SA_P Parameter: Timepoint (hr) Value: 6
  misc_feature: MA Experiment 20000182 PARAMETER Experiment Name: At_2mM_SA_P Parameter: Tissue Value: Aerial
  misc_feature: MA Experiment 20000182 PARAMETER Experiment Name: At_2mM_SA_P Parameter: Treatment Value: 2mM SA vs. No Treatment
  misc_feature: MA Experiment ID: 20000185 Result: Down-regulated in Transcription
  misc_feature: MA Experiment 20000185 PARAMETER Experiment Name: At_Roots__P Parameter: Age (day) Value: 7 vs. 21
  misc_feature: MA Experiment 20000185 PARAMETER Experiment Name: At_Roots__P Parameter: Organism Value: A. thaliana
  misc_feature: MA Experiment 20000185 PARAMETER Experiment Name: At_Roots__P Parameter: Tissue Value: Roots vs. Whole Plant
  misc_feature: MA Experiment ID: 20000234 Result: Down-regulated in Transcription
  misc_feature: MA Experiment 20000234 PARAMETER Experiment Name: At_Siliques_P Parameter: Age (day) Value: 21
  misc_feature: MA Experiment 20000234 PARAMETER Experiment Name: At_Siliques_P Parameter: Organism Value: A. thaliana
  misc_feature: MA Experiment 20000234 PARAMETER Experiment Name: At_Siliques_P Parameter: Plant Line Value: WS
  misc_feature: MA Experiment 20000234 PARAMETER Experiment Name: At_Siliques_P Parameter: Tissue Value: Less Than 5mm Siliques vs. Whole Plant
  misc_feature: MA Experiment ID: 20000235 Result: Down-regulated in Transcription
  misc_feature: MA Experiment 20000235 PARAMETER Experiment Name: At_Siliques_P Parameter: Age (day) Value: 21
  misc_feature: MA Experiment 20000235 PARAMETER Experiment Name: At_Siliques_P Parameter: Organism Value: A. thaliana
  misc_feature: MA Experiment 20000235 PARAMETER Experiment Name: At_Siliques_P Parameter: Plant Line Value: WS
  misc_feature: MA Experiment 20000235 PARAMETER Experiment Name: At_Siliques_P Parameter: Tissue Value: 5-10mm Siliques vs. Whole Plant
  misc_feature: MA Experiment ID: 20000264 Result: Down-regulated in Transcription
  misc_feature: MA Experiment 20000264 PARAMETER Experiment Name: At_Open_Flower_P Parameter: Age (day) Value: 21
  misc_feature: MA Experiment 20000264 PARAMETER Experiment Name: At_Open_Flower_P Parameter: Plant Line Value: WS
  misc_feature: MA Experiment 20000264 PARAMETER Experiment Name: At_Open_Flower_P Parameter: Tissue Value: Open Flower vs. Whole Plant
  misc_feature: MA Experiment ID: 20000265 Result: Down-regulated in Transcription
  misc_feature: MA Experiment 20000265 PARAMETER Experiment Name: At_Open_Flower_P Parameter: Age (day) Value: 21
  misc_feature: MA Experiment 20000265 PARAMETER Experiment Name: At_Open_Flower_P Parameter: Plant Line Value: WS
  misc_feature: MA Experiment 20000265 PARAMETER Experiment Name: At_Open_Flower_P Parameter: Tissue Value: Closed Flower vs. Whole Plant
  misc_feature: MA Experiment ID: 20000286 Result: Down-regulated in Transcription
  misc_feature: MA Experiment 20000286 PARAMETER Experiment Name: At_Open_Flower_P Parameter: Age (day) Value: 21
  misc_feature: MA Experiment 20000286 PARAMETER Experiment Name: At_Open_Flower_P Parameter: Plant Line Value: WS
  misc_feature: MA Experiment 20000286 PARAMETER Experiment Name: At_Open_Flower_P Parameter: Tissue Value: Half Open vs. Whole Plant
  misc_feature: MA Experiment ID: 20000438 Result: Down-regulated in Transcription
  misc_feature: MA Experiment 20000438 PARAMETER Experiment Name: At_Shoots__P Parameter: Age (day) Value: 14
  misc_feature: MA Experiment 20000438 PARAMETER Experiment Name: At_Shoots__P Parameter: Tissue Value: Shoots vs. Whole Plant
  misc_feature: MA Experiment ID: 20000439 Result: Down-regulated in Transcription
  misc_feature: MA Experiment 20000439 PARAMETER Experiment Name: At_Roots__P Parameter: Age (day) Value: 14 vs. 21
  misc_feature: MA Experiment 20000439 PARAMETER Experiment Name: At_Roots__P Parameter: Organism Value: A. thaliana
  misc_feature: MA Experiment 20000439 PARAMETER Experiment Name: At_Roots__P Parameter: Tissue Value: Roots vs. Whole Plant
  misc_feature: MA Experiment ID: 20000527 Result: Down-regulated in Transcription
  misc_feature: MA Experiment 20000527 PARAMETER Experiment Name: At_10percent_PEG_P Parameter: Age (day) Value: 20
  misc_feature: MA Experiment 20000527 PARAMETER Experiment Name: At_10percent_PEG_P Parameter: Organism Value: A. thaliana
  misc_feature: MA Experiment 20000527 PARAMETER Experiment Name: At_10percent_PEG_P Parameter: Plant Line Value: WS
  misc_feature: MA Experiment 20000527 PARAMETER Experiment Name: At_10percent_PEG_P Parameter: Timepoint (day) Value: 20
  misc_feature: MA Experiment 20000527 PARAMETER Experiment Name: At_10percent_PEG_P Parameter: Tissue Value: Whole Plant
  misc_feature: MA Experiment 20000527 PARAMETER Experiment Name: At_10percent_PEG_P Parameter: Treatment Value: 10percent PEG vs. No Treatment
  misc_feature: MA Experiment ID: 20000574 Result: Down-regulated in Transcription
  misc_feature: MA Experiment 20000574 PARAMETER Experiment Name: At_100uM_ABA_Mutants__P Parameter: Organism Value: A. thaliana
  misc_feature: MA Experiment 20000574 PARAMETER Experiment Name: At_100uM_ABA_Mutants__P Parameter: Plant Line Value: CS23 vs. Ler wt
  misc_feature: MA Experiment 20000574 PARAMETER Experiment Name: At_100uM_ABA_Mutants__P Parameter: Timepoint (hr) Value: N/A
  misc_feature: MA Experiment 20000574 PARAMETER Experiment Name: At_100uM_ABA_Mutants__P Parameter: Tissue Value: Whole Plant
  misc_feature: MA Experiment 20000574 PARAMETER Experiment Name: At_100uM_ABA_Mutants__P Parameter: Treatment Value: None
  misc_feature: MA Experiment ID: 20000606 Result: Up-regulated in Transcription
  misc_feature: MA Experiment 20000606 PARAMETER Experiment Name: At_CS8548_Mutant_P Parameter: Age (day) Value: 14
  misc_feature: MA Experiment 20000606 PARAMETER Experiment Name: At_CS8548_Mutant_P Parameter: Plant Line Value: CS8548 vs. wt
  misc_feature: MA Experiment 20000606 PARAMETER Experiment Name: At_CS8548_Mutant_P Parameter: Tissue Value: Whole Plant
  misc_feature: MA Experiment ID: 20000794 Result: Down-regulated in Transcription
  misc_feature: MA Experiment 20000794 PARAMETER Experiment Name: At_Petals_P Parameter: Age (day) Value: 23-25 days
  misc_feature: MA Experiment 20000794 PARAMETER Experiment Name: At_Petals_P Parameter: Plant Line Value: WS
  misc_feature: MA Experiment 20000794 PARAMETER Experiment Name: At_Petals_P Parameter: Tissue Value: Petals vs. Whole plant
  misc_feature: MA Experiment ID: 20001247 Result: Up-regulated in Transcription
  misc_feature: MA Experiment 20001247 PARAMETER Experiment Name: At_Far-red-induction_P Parameter: Age (day) Value: 7
  misc_feature: MA Experiment 20001247 PARAMETER Experiment Name: At_Far-red-induction_P Parameter: Light Value: Far-red vs. White
  misc_feature: MA Experiment 20001247 PARAMETER Experiment Name: At_Far-red-induction_P Parameter: Organism Value: A. thaliana
  misc_feature: MA Experiment 20001247 PARAMETER Experiment Name: At_Far-red-induction_P Parameter: Plant Line Value: Columbia
  misc_feature: MA Experiment 20001247 PARAMETER Experiment Name: At_Far-red-induction_P Parameter: Timepoint (hr) Value: 1
  misc_feature: MA Experiment 20001247 PARAMETER Experiment Name: At_Far-red-induction_P Parameter: Tissue Value: Whole Plant
  misc_feature: MA Experiment ID: 20001504 Result: Up-regulated in Transcription
  misc_feature: MA Experiment 20001504 PARAMETER Experiment Name: At_Far-red-enriched_P Parameter: Age (day) Value: 10
  misc_feature: MA Experiment 20001504 PARAMETER Experiment Name: At_Far-red-enriched_P Parameter: Light Value: Far-red enriched vs. White
  misc_feature: MA Experiment 20001504 PARAMETER Experiment Name: At_Far-red-enriched_P Parameter: Organism Value: A. thaliana
  misc_feature: MA Experiment 20001504 PARAMETER Experiment Name: At_Far-red-enriched_P Parameter: Plant Line Value: Columbia
  misc_feature: MA Experiment 20001504 PARAMETER Experiment Name: At_Far-red-enriched_P Parameter: Timepoint (day) Value: 6
  misc_feature: MA Experiment 20001504 PARAMETER Experiment Name: At_Far-red-enriched_P Parameter: Tissue Value: Whole Plant
  misc_feature: MA Experiment ID: 20001554 Result: Down-regulated in Transcription
  misc_feature: MA Experiment 20001554 PARAMETER Experiment Name: At_Drought_Soil_Dry_P Parameter: Age (day) Value: 21
  misc_feature: MA Experiment 20001554 PARAMETER Experiment Name: At_Drought_Soil_Dry_P Parameter: Organism Value: A. thaliana
  misc_feature: MA Experiment 20001554 PARAMETER Experiment Name: At_Drought_Soil_Dry_P Parameter: Plant Line Value: WS
  misc_feature: MA Experiment 20001554 PARAMETER Experiment Name: At_Drought_Soil_Dry_P Parameter: Post Timepoint (hr) Value: None
  misc_feature: MA Experiment 20001554 PARAMETER Experiment Name: At_Drought_Soil_Dry_P Parameter: Post-Treatment Value: None
  misc_feature: MA Experiment 20001554 PARAMETER Experiment Name: At_Drought_Soil_Dry_P Parameter: Timepoint (day) Value: 7
  misc_feature: MA Experiment 20001554 PARAMETER Experiment Name: At_Drought_Soil_Dry_P Parameter: Treatment Value: Drought vs. No Drought
  misc_feature: MA Experiment ID: 20001555 Result: Down-regulated in Transcription
  misc_feature: MA Experiment 20001555 PARAMETER Experiment Name: At_Drought_Soil_Dry_P Parameter: Age (day) Value: 24
  misc_feature: MA Experiment 20001555 PARAMETER Experiment Name: At_Drought_Soil_Dry_P Parameter: Organism Value: A. thaliana
  misc_feature: MA Experiment 20001555 PARAMETER Experiment Name: At_Drought_Soil_Dry_P Parameter: Plant Line Value: WS
  misc_feature: MA Experiment 20001555 PARAMETER Experiment Name: At_Drought_Soil_Dry_P Parameter: Post Timepoint (hr) Value: None
  misc_feature: MA Experiment 20001555 PARAMETER Experiment Name: At_Drought_Soil_Dry_P Parameter: Post-Treatment Value: None
  misc_feature: MA Experiment 20001555 PARAMETER Experiment Name: At_Drought_Soil_Dry_P Parameter: Timepoint (day) Value: 10
  misc_feature: MA Experiment 20001555 PARAMETER Experiment Name: At_Drought_Soil_Dry_P Parameter: Treatment Value: Drought vs. No Drought
  misc_feature: MA Experiment ID: 20001556 Result: Down-regulated in Transcription
  misc_feature: MA Experiment 20001556 PARAMETER Experiment Name: At_Drought_Soil_Dry_P Parameter: Age (day) Value: 26
  misc_feature: MA Experiment 20001556 PARAMETER Experiment Name: At_Drought_Soil_Dry_P Parameter: Organism Value: A. thaliana
  misc_feature: MA Experiment 20001556 PARAMETER Experiment Name: At_Drought_Soil_Dry_P Parameter: Plant Line Value: WS
  misc_feature: MA Experiment 20001556 PARAMETER Experiment Name: At_Drought_Soil_Dry_P Parameter: Post Timepoint (hr) Value: None
  misc_feature: MA Experiment 20001556 PARAMETER Experiment Name: At_Drought_Soil_Dry_P Parameter: Post-Treatment Value: None
  misc_feature: MA Experiment 20001556 PARAMETER Experiment Name: At_Drought_Soil_Dry_P Parameter: Timepoint (day) Value: 12
  misc_feature: MA Experiment 20001556 PARAMETER Experiment Name: At_Drought_Soil_Dry_P Parameter: Treatment Value: Drought vs. No Drought
  misc_feature: MA Experiment ID: 20001557 Result: Down-regulated in Transcription
  misc_feature: MA Experiment 20001557 PARAMETER Experiment Name: At_Drought_Soil_Dry_P Parameter: Age (day) Value: 27
  misc_feature: MA Experiment 20001557 PARAMETER Experiment Name: At_Drought_Soil_Dry_P Parameter: Organism Value: A. thaliana
  misc_feature: MA Experiment 20001557 PARAMETER Experiment Name: At_Drought_Soil_Dry_P Parameter: Plant Line Value: WS
  misc_feature: MA Experiment 20001557 PARAMETER Experiment Name: At_Drought_Soil_Dry_P Parameter: Post Timepoint (hr) Value: 3
  misc_feature: MA Experiment 20001557 PARAMETER Experiment Name: At_Drought_Soil_Dry_P Parameter: Post-Treatment Value: Re-Water vs. No Drought
  misc_feature: MA Experiment 20001557 PARAMETER Experiment Name: At_Drought_Soil_Dry_P Parameter: Timepoint (day) Value: 13
  misc_feature: MA Experiment 20001557 PARAMETER Experiment Name: At_Drought_Soil_Dry_P Parameter: Treatment Value: Drought vs. No Drought
  misc_feature: MA Experiment ID: 20001558 Result: Down-regulated in Transcription
  misc_feature: MA Experiment 20001558 PARAMETER Experiment Name: At_Drought_Soil_Dry_P Parameter: Age (day) Value: 27
  misc_feature: MA Experiment 20001558 PARAMETER Experiment Name: At_Drought_Soil_Dry_P Parameter: Organism Value: A. thaliana
  misc_feature: MA Experiment 20001558 PARAMETER Experiment Name: At_Drought_Soil_Dry_P Parameter: Plant Line Value: WS
  misc_feature: MA Experiment 20001558 PARAMETER Experiment Name: At_Drought_Soil_Dry_P Parameter: Post Timepoint (hr) Value: 6
  misc_feature: MA Experiment 20001558 PARAMETER Experiment Name: At_Drought_Soil_Dry_P Parameter: Post-Treatment Value: Re-Water vs. No Drought
  misc_feature: MA Experiment 20001558 PARAMETER Experiment Name: At_Drought_Soil_Dry_P Parameter: Timepoint (day) Value: 13
  misc_feature: MA Experiment 20001558 PARAMETER Experiment Name: At_Drought_Soil_Dry_P Parameter: Treatment Value: Drought vs. No Drought
  misc_feature: MA Experiment ID: 20001559 Result: Down-regulated in Transcription
  misc_feature: MA Experiment 20001559 PARAMETER Experiment Name: At_Drought_Soil_Dry_P Parameter: Age (day) Value: 28
  misc_feature: MA Experiment 20001559 PARAMETER Experiment Name: At_Drought_Soil_Dry_P Parameter: Organism Value: A. thaliana
  misc_feature: MA Experiment 20001559 PARAMETER Experiment Name: At_Drought_Soil_Dry_P Parameter: Plant Line Value: WS
  misc_feature: MA Experiment 20001559 PARAMETER Experiment Name: At_Drought_Soil_Dry_P Parameter: Post Timepoint (hr) Value: 29
  misc_feature: MA Experiment 20001559 PARAMETER Experiment Name: At_Drought_Soil_Dry_P Parameter: Post-Treatment Value: Re-Water vs. No Drought
  misc_feature: MA Experiment 20001559 PARAMETER Experiment Name: At_Drought_Soil_Dry_P Parameter: Timepoint (day) Value: 14
  misc_feature: MA Experiment 20001559 PARAMETER Experiment Name: At_Drought_Soil_Dry_P Parameter: Treatment Value: Drought vs. No Drought
  misc_feature: MA Experiment ID: 20001560 Result: Down-regulated in Transcription
  misc_feature: MA Experiment 20001560 PARAMETER Experiment Name: At_Drought_Soil_Dry_P Parameter: Age (day) Value: 28
  misc_feature: MA Experiment 20001560 PARAMETER Experiment Name: At_Drought_Soil_Dry_P Parameter: Organism Value: A. thaliana
  misc_feature: MA Experiment 20001560 PARAMETER Experiment Name: At_Drought_Soil_Dry_P Parameter: Plant Line Value: WS
  misc_feature: MA Experiment 20001560 PARAMETER Experiment Name: At_Drought_Soil_Dry_P Parameter: Post Timepoint (hr) Value: None
  misc_feature: MA Experiment 20001560 PARAMETER Experiment Name: At_Drought_Soil_Dry_P Parameter: Post-Treatment Value: None
  misc_feature: MA Experiment 20001560 PARAMETER Experiment Name: At_Drought_Soil_Dry_P Parameter: Timepoint (day) Value: 14
  misc_feature: MA Experiment 20001560 PARAMETER Experiment Name: At_Drought_Soil_Dry_P Parameter: Treatment Value: Drought vs. No Drought
  misc_feature: MA Experiment ID: 20001904 Result: Down-regulated in Transcription
  misc_feature: MA Experiment 20001904 PARAMETER Experiment Name: At_Drought_Reproduction_P Parameter: Age (day) Value: 37
  misc_feature: MA Experiment 20001904 PARAMETER Experiment Name: At_Drought_Reproduction_P Parameter: Organism Value: A. thaliana
  misc_feature: MA Experiment 20001904 PARAMETER Experiment Name: At_Drought_Reproduction_P Parameter: Plant Line Value: WS
  misc_feature: MA Experiment 20001904 PARAMETER Experiment Name: At_Drought_Reproduction_P Parameter: Timepoint (day) Value: 7
  misc_feature: MA Experiment 20001904 PARAMETER Experiment Name: At_Drought_Reproduction_P Parameter: Tissue Value: Rosettes
  misc_feature: MA Experiment 20001904 PARAMETER Experiment Name: At_Drought_Reproduction_P Parameter: Treatment Value: Drought vs. No Drought
  misc_feature: MA Experiment ID: 20001905 Result: Down-regulated in Transcription
  misc_feature: MA Experiment 20001905 PARAMETER Experiment Name: At_Drought_Reproduction_P Parameter: Age (day) Value: 40
  misc_feature: MA Experiment 20001905 PARAMETER Experiment Name: At_Drought_Reproduction_P Parameter: Organism Value: A. thaliana
  misc_feature: MA Experiment 20001905 PARAMETER Experiment Name: At_Drought_Reproduction_P Parameter: Plant Line Value: WS
  misc_feature: MA Experiment 20001905 PARAMETER Experiment Name: At_Drought_Reproduction_P Parameter: Timepoint (day) Value: 10
  misc_feature: MA Experiment 20001905 PARAMETER Experiment Name: At_Drought_Reproduction_P Parameter: Tissue Value: Rosettes
  misc_feature: MA Experiment 20001905 PARAMETER Experiment Name: At_Drought_Reproduction_P Parameter: Treatment Value: Drought vs. No Drought
atgtctttcttctggctttttccttttctccttcatctttcatttgccgattccttatctcctctttcagctccagttcaaaattttattcacctaaaccattcttgtccaagtagtatattaacgtattcaagaaacagcacttacttcaccaatctcaaaacacttttgtcctctctctcttcccggaacgcttcatactctaccggattccaaactgccacggcgggacaagctcccgaccgtgtcaccggacttttcctttgtcgcggagacgtctcacaagaagtttgccgtaactgcgtcgccttttccgtcaaggagactttatattggtgtccgtataacaaagaagtcgtgctttattacgatgagtgtatgcttagatactctcaccgaaatattctctcgaccgttacatacgatggaagtgctatcttgttgaacggcgctaatatttcatcaagtaatcaaaatcaagtagatgagtttagggatttggtgtcgtccacgttgaacctagctgccgttgaagcagcgaatagttctaaaaaattttatacgagaaaggtcatcacaccccagcctttgtacttgttagttcagtgcacacctgatcttacaagacaagactgtttacgttgcctacaaaaatccatcaagggaatgtctctttacagaattggaggaagatttttttaccctagttgtaattcaaggtacgagaattactcgttctacaatgaaaccgccactagatcatcatcaccaccgtctcttccgcctcgctctactcctcaacagcagctgaagttagctcccccaccgctgatttcagaacgtggaaaaggccggaactcctctgtaatcatcgttgttgttgttccaatcattgctctcctgcttctgttcgtagctttctttagtctccgggctaagaaaacaaggacgaattatgagagggaaccacttaccgaagaaagtgatgatattaccactgcgggctcacttcagtttgattttaaagcaattgaggcagcaacaaataagttttgtgagactaacaaacttggtcaaggtggtttcggcgaagtttacaagggtatatttcctagtggagtacaagttgcagtgaagaggttatccaagacatcaggacaaggtgaaagagagttcgcaaacgaagttattgttgtggcaaagcttcaacatagaaatttggtaagattgctagggttttgtttggaaagagatgagaggatacttgtctatgagtttgttcccaacaaaagtctcgactacttcatttttgactctaccatgcaaagcctgctggactggactagacggtacaaaatcattggaggaattgctagagggattctttatcttcatcaagattcacgactcacaatcatacatcgtgatctcaaagcaggtaatatcctccttggtgatgatatgaatgcaaaaatcgccgactttggaatggcgagaattttcggaatggaccaaacggaagccaatactaggagaatagttggaacatatggctatatgtctcccgagtatgcgatgtatggccaattctccatgaaatcagatgtgtatagcttcggggtcttggttctcgaaattataagtgggaaaaagaacagcaatgtctatcaaatggatggtactagtgctggcaatttggttacatatacttggagactatggagcaatgggtcaccgttagagctagtggatccatcctttcgtgataactatcgaataaatgaagtttcgagatgcatccatatcgctttactatgtgttcaagaagaagctgaagatcgtccaaccatgtcagctattgtccagatgctcactactagctcaattgctctcgcagttcctcaacgacctggttttttcttccggagtagtaaacatgaacaagtaggattagtggatcgtctatctatcaatacgtccgctctttgttcagtcgatgatgcttccattactaatgtaactcctcgttga

SEQ ID NO: 71210 - protein, 676 aa, Arabidopsis thaliana
  peptide (1)..(676): Ceres Seq. ID no. 3081923
  misc_feature (351)..(624): Pfam Name: Protein kinase domain Pfam Description: Protein kinase domain
  misc_feature (277)..(676): Homolog of NCBI NO: 15236453 NR Description: serine/threonine kinase - like protein; protein At4g23310.1 [Arabidopsis thaliana] >gi|7488242|pir||T04848
  misc_feature (31)..(279): Homolog of NCBI NO: 15236453 NR Description: serine/threonine kinase - like protein; protein At4g23310.1 [Arabidopsis thaliana] >gi|7488242|pir||T04848
  misc_feature (19)..(676): Homolog of NCBI NO: 15236447 NR Description: serine /threonine kinase - like protein; protein At4g23280.1 [Arabidopsis thaliana] >gi|7488190|pir||T04845
  misc_feature (1)..(676): Homolog of NCBI NO: 30686059 NR Description: protein kinase - like protein [Arabidopsis >gi|23296342|gb|AAN13047.1| putative protein kinase [Arabidopsis
  misc_feature (1)..(676): Homolog of NCBI NO: 18416074 NR Description: protein kinase - like protein; protein id:
  misc_feature (1)..(676): Homolog of NCBI NO: 30686087 NR Description: serine/threonine kinase -related protein
  misc_feature (1)..(676): Homolog of NCBI NO: 24417476 NR Description: unknown [Arabidopsis thaliana]
  misc_feature (1)..(676): Homolog of NCBI NO: 13506745 NR Description: receptor-like protein kinase 4 [Arabidopsis
  misc_feature (117)..(676): Homolog of NCBI NO: 7488192 NR Description: probable serine/threonine-specific protein kinase
  misc_feature (1)..(114): Homolog of NCBI NO: 7488192 NR Description: probable serine/threonine-specific protein kinase
MSFFWLFPFLLHLSFADSLSPLSAPVQNFIHLNHSCPSSILTYSRNSTYFTNLKTLLSSLSSRNASYSTGFQTATAGQAPDRVTGLFLCRGDVSQEVCRNCVAFSVKETLYWCPYNKEVVLYYDECMLRYSHRNILSTVTYDGSAILLNGANISSSNQNQVDEFRDLVSSTLNLAAVEAANSSKKFYTRKVITPQPLYLLVQCTPDLTRQDCLRCLQKSIKGMSLYRIGGRFFYPSCNSRYENYSFYNETATRSSSPPSLPPRSTPQQQLKLAPPPLISERGKGRNSSVIIVVVVPIIALLLLFVAFFSLRAKKTRTNYEREPLTEESDDITTAGSLQFDFKAIEAATNKFCETNKLGQGGFGEVYKGIFPSGVQVAVKRLSKTSGQGEREFANEVIVVAKLQHRNLVRLLGFCLERDERILVYEFVPNKSLDYFIFDSTMQSLLDWTRRYKIIGGIARGILYLHQDSRLTIIHRDLKAGNILLGDDMNAKIADFGMARIFGMDQTEANTRRIVGTYGYMSPEYAMYGQFSMKSDVYSFGVLVLEIISGKKNSNVYQMDGTSAGNLVTYTWRLWSNGSPLELVDPSFRDNYRINEVSRCIHIALLCVQEEAEDRPTMSAIVQMLTTSSIALAVPQRPGFFFRSSKHEQVGLVDRLSINTSALCSVDDASITNVTPR

SEQ ID NO: 71211 - protein, 550 aa, Arabidopsis thaliana
  peptide (1)..(550): Ceres Seq. ID no. 3081924
  misc_feature (225)..(498): Pfam Name: Protein kinase domain Pfam Description: Protein kinase domain
  misc_feature (151)..(550): Homolog of NCBI NO: 15236453 NR Description: serine/threonine kinase - like protein; protein At4g23310.1 [Arabidopsis thaliana] >gi|7488242|pir||T04848
  misc_feature (1)..(153): Homolog of NCBI NO: 15236453 NR Description: serine/threonine kinase - like protein; protein At4g23310.1 [Arabidopsis thaliana] >gi|7488242|pir||T04848
  misc_feature (1)..(550): Homolog of NCBI NO: 15236447 NR Description: serine /threonine kinase - like protein; protein At4g23280.1 [Arabidopsis thaliana] >gi|7488190|pir||T04845
  misc_feature (1)..(550): Homolog of NCBI NO: 30686059 NR Description: protein kinase - like protein [Arabidopsis >gi|23296342|gb|AAN13047.1| putative protein kinase [Arabidopsis
  misc_feature (1)..(550): Homolog of NCBI NO: 18416074 NR Description: protein kinase - like protein; protein id:
  misc_feature (1)..(550): Homolog of NCBI NO: 30686087 NR Description: serine/threonine kinase -related protein
  misc_feature (1)..(550): Homolog of NCBI NO: 24417476 NR Description: unknown [Arabidopsis thaliana]
  misc_feature (1)..(550): Homolog of NCBI NO: 13506745 NR Description: receptor-like protein kinase 4 [Arabidopsis
  misc_feature (1)..(550): Homolog of NCBI NO: 7488192 NR Description: probable serine/threonine-specific protein kinase
  misc_feature (1)..(550): Homolog of NCBI NO: 30686066 NR Description: serine threonine kinase - like protein
MLRYSHRNILSTVTYDGSAILLNGANISSSNQNQVDEFRDLVSSTLNLAAVEAANSSKKFYTRKVITPQPLYLLVQCTPDLTRQDCLRCLQKSIKGMSLYRIGGRFFYPSCNSRYENYSFYNETATRSSSPPSLPPRSTPQQQLKLAPPPLISERGKGRNSSVIIVVVVPIIALLLLFVAFFSLRAKKTRTNYEREPLTEESDDITTAGSLQFDFKAIEAATNKFCETNKLGQGGFGEVYKGIFPSGVQVAVKRLSKTSGQGEREFANEVIVVAKLQHRNLVRLLGFCLERDERILVYEFVPNKSLDYFIFDSTMQSLLDWTRRYKIIGGIARGILYLHQDSRLTIIHRDLKAGNILLGDDMNAKIADFGMARIFGMDQTEANTRRIVGTYGYMSPEYAMYGQFSMKSDVYSFGVLVLEIISGKKNSNVYQMDGTSAGNLVTYTWRLWSNGSPLELVDPSFRDNYRINEVSRCIHIALLCVQEEAEDRPTMSAIVQMLTTSSIALAVPQRPGFFFRSSKHEQVGLVDRLSINTSALCSVDDASITNVTPR

SEQ ID NO: 71212 - protein, 454 aa, Arabidopsis thaliana
  peptide (1)..(454): Ceres Seq. ID no. 3081925
  misc_feature (129)..(402): Pfam Name: Protein kinase domain Pfam Description: Protein kinase domain
  misc_feature (55)..(454): Homolog of NCBI NO: 15236453 NR Description: serine/threonine kinase - like protein; protein At4g23310.1 [Arabidopsis thaliana] >gi|7488242|pir||T04848
  misc_feature (1)..(57): Homolog of NCBI NO: 15236453 NR Description: serine/threonine kinase - like protein; protein At4g23310.1 [Arabidopsis thaliana] >gi|7488242|pir||T04848
  misc_feature (1)..(454): Homolog of NCBI NO: 15236447 NR Description: serine /threonine kinase - like protein; protein At4g23280.1 [Arabidopsis thaliana] >gi|7488190|pir||T04845
  misc_feature (1)..(454): Homolog of NCBI NO: 30686059 NR Description: protein kinase - like protein [Arabidopsis >gi|23296342|gb|AAN13047.1| putative protein kinase [Arabidopsis
  misc_feature (1)..(454): Homolog of NCBI NO: 18416074 NR Description: protein kinase - like protein; protein id:
  misc_feature (1)..(454): Homolog of NCBI NO: 30686087 NR Description: serine/threonine kinase -related protein
  misc_feature (1)..(454): Homolog of NCBI NO: 24417476 NR Description: unknown [Arabidopsis thaliana]
  misc_feature (1)..(454): Homolog of NCBI NO: 13506745 NR Description: receptor-like protein kinase 4 [Arabidopsis
  misc_feature (1)..(454): Homolog of NCBI NO: 7488192 NR Description: probable serine/threonine-specific protein kinase
  misc_feature (1)..(454): Homolog of NCBI NO: 30686066 NR Description: serine threonine kinase - like protein
MSLYRIGGRFFYPSCNSRYENYSFYNETATRSSSPPSLPPRSTPQQQLKLAPPPLISERGKGRNSSVIIVVVVPIIALLLLFVAFFSLRAKKTRTNYEREPLTEESDDITTAGSLQFDFKAIEAATNKFCETNKLGQGGFGEVYKGIFPSGVQVAVKRLSKTSGQGEREFANEVIVVAKLQHRNLVRLLGFCLERDERILVYEFVPNKSLDYFIFDSTMQSLLDWTRRYKIIGGIARGILYLHQDSRLTIIHRDLKAGNILLGDDMNAKIADFGMARIFGMDQTEANTRRIVGTYGYMSPEYAMYGQFSMKSDVYSFGVLVLEIISGKKNSNVYQMDGTSAGNLVTYTWRLWSNGSPLELVDPSFRDNYRINEVSRCIHIALLCVQEEAEDRPTMSAIVQMLTTSSIALAVPQRPGFFFRSSKHEQVGLVDRLSINTSALCSVDDASITNVTPR

SEQ ID NO: 71213 - DNA, 2739 bp, Arabidopsis thaliana
  misc_feature (1)..(2739): Ceres Seq. ID no. 3081939
  misc_feature: MA Experiment ID: 20000440 Result: Up-regulated in Transcription
  misc_feature: MA Experiment 20000440 PARAMETER Experiment Name: At_Closed-Flower__Sub_P Parameter: Tissue Value: Closed Flower vs. Whole Plant
atgaaaaacaacaaaaaggttgggaccgaagattcaacgaaatggatgctagagagcgtcgagatagatccaaaaggcgatagttctgtgaaacaacccgaaagcacaatcaatagcaataatcctgagagtagtggtgctggtggtgggatcttgaagaatgtgtctaagaatctcgccgtgggatcaataatcaggtccatgagcgtaaacaaatggagaaagagcggtaatctcgggtccccgagcacgaggaagagtggaaacctggggcctccactccctgtgtcccaagtaaaaagaccggggccacaaagagtcgagaggactacatctagcgcggctagaggactacaaagtctccggttccttgatcggaccgtcacgggaagagaacgagattcgtggagatcaatcgaaaaccggttcaatcaatttgctgttgacgggaggcttcccaaggataaattcggcgtttgcattggaatgggagatacattggagtttgcggcaaaagtatacgaagcattgggtaggagaagacaaataaaaacagaaaatgggattgacaaggaacaactcaagcttttttgggaagacatgatcaagaaggatctcgactgtcgcctccaaatcttcttcgacatgtgtgataaggacggagacgggaagttaacagaagaggaggttaaagaagtcatagtcttaagtgcatccgcgaacaggctcgtgaatctgaagaagaatgctgcgtcttatgcttctttgatcatggaagagctcgaccccaatgagcagggttacattgagatgtggcaactcgaggtgctactaacaggaattgtatcaaacgccgactcacataaggtcgtgaggaaatcgcaacagctaacgcgagccatgatcccaaaacgttacagaacaccgactagtaaatacgttgtagtgaccgcagagctaatgtacgagcactggaagaagatttgggtcgtcacattgtggctcgcagtaaacgtcgtcctcttcatgtggaaatacgaagagttcaccacaagccctctttacaacatcactggacgctgcctttgcgccgctaaaggaacggcagaaatactaaaactcaacatggctttgattttggtccctgttttaagaagaaccctaacgttcctcagatcgactttcttgaaccacttgatcccattcgacgataacatcaacttccataagttgatagccgtggcgatagcagttatttccttgcttcacacggcattacacatgctatgcaactaccctaggctaagttcttgcccctacaatttctactccgactatgcggggaatctcttgggagccaagcaaccgacctatttaggcctaatgctgaccccggtttcggtcacaggagttctaatgatcatcttcatgggtatctcattcacccttgctatgcattacttcagaagaaacatagtgaaattgcctataccatttaaccgtcttgctggatttaattcgttttggtatgctcatcatttgctggttattgcctacgctcttcttatcatccatggttacattcttatcatcgagaaaccttggtaccaaaagacgacgtggatgtacgtggccataccaatggtgttgtacgcgagcgagaggcttttctcacgagttcaagaacacaaccatcgtgtccacattatcaaagctattgtatattcaggcaatgttcttgcactctatatgaccaaacctcaagggttcaagtacaaaagtggcatgtacatgtttgtcaagtgccctgatatctccaaattcgaatggcatccattctccatcacttctgcacccggagatgaatatttgagcgttcacataagagcattaggagattggacttctgaacttaggaacagatttgcagagacatgtgagcctcatcaaaaatcgaaacctagtccaaatgatcttattaggatggaaacaagagcgagaggtgcaaatcctcatgttgaagaatcccaagccttatttccaagaatatttatcaaaggaccatatggggctccggcacaaagctatcagaagtttgatatccttttgttgattgggctagggatcggggcaaccccatttataagtatcctaaaagatatgttgaataatctcaaacctggtattccaaaaaccgggcaaaagtatgaaggaagtgtaggaggtgagagcttaggaggatcaagtgtatatggaggatcgagtgtaaatggaggaggtagtgtaaatggaggaggtagtgtaagtggaggaggtagaaagtttccacaaagagcatatttttattgggtgacaagagaacaagcttctttcgaatggttcaaaggagttatggatgatattgcagtgtatgacaaaaccaatgtgatagagatgcataactacttaacaagtatgtacgaagcaggagatgcgagatctgctctaattgctatggtccagaaacttcaacatgccaaaaatggtgttgacattgtttccgagagccgaatacgaacccatttcgcaagacctaattggaggaaggttttttctgaattgtcaaacaagcacgagacttctcgcataggtgtgttctactgtggaagtccaacgcttgttcgaccgctaaaatcactttgtcaggagttcagtctcgagtcgtccacccgctttacttttcacaaagagaatttctga

SEQ ID NO: 71214 - protein, 912 aa, Arabidopsis thaliana
  peptide (1)..(912): Ceres Seq. ID no. 3081940
  misc_feature (358)..(554): Pfam Name: Ferric reductase like transmembrane component Pfam Description: Ferric reductase like transmembrane component
  misc_feature (39)..(725): Homolog of NCBI NO: 18407959 NR Description: cytochrome b245 beta chain homolog RbohAp108, protein id: At1g64060.1, supported by cDNA: gi_2654867, supported
  misc_feature (674)..(912): Homolog of NCBI NO: 18407959 NR Description: cytochrome b245 beta chain homolog RbohAp108, protein id: At1g64060.1, supported by cDNA: gi_2654867, supported
  misc_feature (39)..(725): Homolog of NCBI NO: 3242456 NR Description: Atrboh F [Arabidopsis thaliana]
  misc_feature (31)..(746): Homolog of NCBI NO: 34908046 NR Description: putative respiratory burst oxidase protein [Oryza
  misc_feature (87)..(725): Homolog of NCBI NO: 28268678 NR Description: respiratory burst oxidase homolog [Nicotiana
  misc_feature (674)..(912): Homolog of NCBI NO: 28268678 NR Description: respiratory burst oxidase homolog [Nicotiana
  misc_feature (761)..(912): Homolog of NCBI NO: 34908046 NR Description: putative respiratory burst oxidase protein [Oryza
  misc_feature (674)..(912): Homolog of NCBI NO: 3242456 NR Description: Atrboh F [Arabidopsis thaliana]
  misc_feature (87)..(725): Homolog of NCBI NO: 17384016 NR Description: NADPH oxidase [Nicotiana tabacum]
  misc_feature (674)..(912): Homolog of NCBI NO: 17384016 NR Description: NADPH oxidase [Nicotiana tabacum]
MKNNKKVGTEDSTKWMLESVEIDPKGDSSVKQPESTINSNNPESSGAGGGILKNVSKNLAVGSIIRSMSVNKWRKSGNLGSPSTRKSGNLGPPLPVSQVKRPGPQRVERTTSSAARGLQSLRFLDRTVTGRERDSWRSIENRFNQFAVDGRLPKDKFGVCIGMGDTLEFAAKVYEALGRRRQIKTENGIDKEQLKLFWEDMIKKDLDCRLQIFFDMCDKDGDGKLTEEEVKEVIVLSASANRLVNLKKNAASYASLIMEELDPNEQGYIEMWQLEVLLTGIVSNADSHKVVRKSQQLTRAMIPKRYRTPTSKYVVVTAELMYEHWKKIWVVTLWLAVNVVLFMWKYEEFTTSPLYNITGRCLCAAKGTAEILKLNMALILVPVLRRTLTFLRSTFLNHLIPFDDNINFHKLIAVAIAVISLLHTALHMLCNYPRLSSCPYNFYSDYAGNLLGAKQPTYLGLMLTPVSVTGVLMIIFMGISFTLAMHYFRRNIVKLPIPFNRLAGFNSFWYAHHLLVIAYALLIIHGYILIIEKPWYQKTTWMYVAIPMVLYASERLFSRVQEHNHRVHIIKAIVYSGNVLALYMTKPQGFKYKSGMYMFVKCPDISKFEWHPFSITSAPGDEYLSVHIRALGDWTSELRNRFAETCEPHQKSKPSPNDLIRMETRARGANPHVEESQALFPRIFIKGPYGAPAQSYQKFDILLLIGLGIGATPFISILKDMLNNLKPGIPKTGQKYEGSVGGESLGGSSVYGGSSVNGGGSVNGGGSVSGGGRKFPQRAYFYWVTREQASFEWFKGVMDDIAVYDKTNVIEMHNYLTSMYEAGDARSALIAMVQKLQHAKNGVDIVSESRIRTHFARPNWRKVFSELSNKHETSRIGVFYCGSPTLVRPLKSLCQEFSLESSTRFTFHKENF

SEQ ID NO: 71215 - protein, 897 aa, Arabidopsis thaliana
  peptide (1)..(897): Ceres Seq. ID no. 3081941
  misc_feature (343)..(539): Pfam Name: Ferric reductase like transmembrane component Pfam Description: Ferric reductase like transmembrane component
  misc_feature (16)..(731): Homolog of NCBI NO: 34908046 NR Description: putative respiratory burst oxidase protein [Oryza
  misc_feature (746)..(897): Homolog of NCBI NO: 34908046 NR Description: putative respiratory burst oxidase protein [Oryza
  misc_feature (72)..(710): Homolog of NCBI NO: 28268678 NR Description: respiratory burst oxidase homolog [Nicotiana
  misc_feature (659)..(897): Homolog of NCBI NO: 28268678 NR Description: respiratory burst oxidase homolog [Nicotiana
  misc_feature (24)..(710): Homolog of NCBI NO: 18407959 NR Description: cytochrome b245 beta chain homolog RbohAp108, protein id: At1g64060.1, supported by cDNA: gi_2654867, supported
  misc_feature (659)..(897): Homolog of NCBI NO: 18407959 NR Description: cytochrome b245 beta chain homolog RbohAp108, protein id: At1g64060.1, supported by cDNA: gi_2654867, supported
  misc_feature (24)..(710): Homolog of NCBI NO: 3242456 NR Description: Atrboh F [Arabidopsis thaliana]
  misc_feature (659)..(897): Homolog of NCBI NO: 3242456 NR Description: Atrboh F [Arabidopsis thaliana]
  misc_feature (72)..(710): Homolog of NCBI NO: 17384016 NR Description: NADPH oxidase [Nicotiana tabacum]
  misc_feature (659)..(897): Homolog of NCBI NO: 17384016 NR Description: NADPH oxidase [Nicotiana tabacum]
MLESVEIDPKGDSSVKQPESTINSNNPESSGAGGGILKNVSKNLAVGSIIRSMSVNKWRKSGNLGSPSTRKSGNLGPPLPVSQVKRPGPQRVERTTSSAARGLQSLRFLDRTVTGRERDSWRSIENRFNQFAVDGRLPKDKFGVCIGMGDTLEFAAKVYEALGRRRQIKTENGIDKEQLKLFWEDMIKKDLDCRLQIFFDMCDKDGDGKLTEEEVKEVIVLSASANRLVNLKKNAASYASLIMEELDPNEQGYIEMWQLEVLLTGIVSNADSHKVVRKSQQLTRAMIPKRYRTPTSKYVVVTAELMYEHWKKIWVVTLWLAVNVVLFMWKYEEFTTSPLYNITGRCLCAAKGTAEILKLNMALILVPVLRRTLTFLRSTFLNHLIPFDDNINFHKLIAVAIAVISLLHTALHMLCNYPRLSSCPYNFYSDYAGNLLGAKQPTYLGLMLTPVSVTGVLMIIFMGISFTLAMHYFRRNIVKLPIPFNRLAGFNSFWYAHHLLVIAYALLIIHGYILIIEKPWYQKTTWMYVAIPMVLYASERLFSRVQEHNHRVHIIKAIVYSGNVLALYMTKPQGFKYKSGMYMFVKCPDISKFEWHPFSITSAPGDEYLSVHIRALGDWTSELRNRFAETCEPHQKSKPSPNDLIRMETRARGANPHVEESQALFPRIFIKGPYGAPAQSYQKFDILLLIGLGIGATPFISILKDMLNNLKPGIPKTGQKYEGSVGGESLGGSSVYGGSSVNGGGSVNGGGSVSGGGRKFPQRAYFYWVTREQASFEWFKGVMDDIAVYDKTNVIEMHNYLTSMYEAGDARSALIAMVQKLQHAKNGVDIVSESRIRTHFARPNWRKVFSELSNKHETSRIGVFYCGSPTLVRPLKSLCQEFSLESSTRFTFHKENF

SEQ ID NO: 71216 - protein, 845 aa, Arabidopsis thaliana
  peptide (1)..(845): Ceres Seq. ID no. 3081942
  misc_feature (291)..(487): Pfam Name: Ferric reductase like transmembrane component Pfam Description: Ferric reductase like transmembrane component
  misc_feature (1)..(679): Homolog of NCBI NO: 34908046 NR Description: putative respiratory burst oxidase protein [Oryza
  misc_feature (694)..(845): Homolog of NCBI NO: 34908046 NR Description: putative respiratory burst oxidase protein [Oryza
  misc_feature (20)..(658): Homolog of NCBI NO: 28268678 NR Description: respiratory burst oxidase homolog [Nicotiana
  misc_feature (607)..(845): Homolog of NCBI NO: 28268678 NR Description: respiratory burst oxidase homolog [Nicotiana
  misc_feature (1)..(658): Homolog of NCBI NO: 18407959 NR Description: cytochrome b245 beta chain homolog RbohAp108, protein id: At1g64060.1, supported by cDNA: gi_2654867, supported
  misc_feature (607)..(845): Homolog of NCBI NO: 18407959 NR Description: cytochrome b245 beta chain homolog RbohAp108, protein id: At1g64060.1, supported by cDNA: gi_2654867, supported
  misc_feature (1)..(658): Homolog of NCBI NO: 3242456 NR Description: Atrboh F [Arabidopsis thaliana]
  misc_feature (607)..(845): Homolog of NCBI NO: 3242456 NR Description: Atrboh F [Arabidopsis thaliana]
  misc_feature (20)..(658): Homolog of NCBI NO: 17384016 NR Description: NADPH oxidase [Nicotiana tabacum]
  misc_feature (607)..(845): Homolog of NCBI NO: 17384016 NR Description: NADPH oxidase [Nicotiana tabacum]
MSVNKWRKSGNLGSPSTRKSGNLGPPLPVSQVKRPGPQRVERTTSSAARGLQSLRFLDRTVTGRERDSWRSIENRFNQFAVDGRLPKDKFGVCIGMGDTLEFAAKVYEALGRRRQIKTENGIDKEQLKLFWEDMIKKDLDCRLQIFFDMCDKDGDGKLTEEEVKEVIVLSASANRLVNLKKNAASYASLIMEELDPNEQGYIEMWQLEVLLTGIVSNADSHKVVRKSQQLTRAMIPKRYRTPTSKYVVVTAELMYEHWKKIWVVTLWLAVNVVLFMWKYEEFTTSPLYNITGRCLCAAKGTAEILKLNMALILVPVLRRTLTFLRSTFLNHLIPFDDNINFHKLIAVAIAVISLLHTALHMLCNYPRLSSCPYNFYSDYAGNLLGAKQPTYLGLMLTPVSVTGVLMIIFMGISFTLAMHYFRRNIVKLPIPFNRLAGFNSFWYAHHLLVIAYALLIIHGYILIIEKPWYQKTTWMYVAIPMVLYASERLFSRVQEHNHRVHIIKAIVYSGNVLALYMTKPQGFKYKSGMYMFVKCPDISKFEWHPFSITSAPGDEYLSVHIRALGDWTSELRNRFAETCEPHQKSKPSPNDLIRMETRARGANPHVEESQALFPRIFIKGPYGAPAQSYQKFDILLLIGLGIGATPFISILKDMLNNLKPGIPKTGQKYEGSVGGESLGGSSVYGGSSVNGGGSVNGGGSVSGGGRKFPQRAYFYWVTREQASFEWFKGVMDDIAVYDKTNVIEMHNYLTSMYEAGDARSALIAMVQKLQHAKNGVDIVSESRIRTHFARPNWRKVFSELSNKHETSRIGVFYCGSPTLVRPLKSLCQEFSLESSTRFTFHKENF

SEQ ID NO: 71217 - DNA, 2781 bp, Arabidopsis thaliana
  misc_feature (1)..(2781): Ceres Seq. ID no. 3082085
  misc_feature: MA Experiment ID: 20000185 Result: Up-regulated in Transcription
  misc_feature: MA Experiment 20000185 PARAMETER Experiment Name: At_Roots__P Parameter: Age (day) Value: 7 vs. 21
  misc_feature: MA Experiment 20000185 PARAMETER Experiment Name: At_Roots__P Parameter: Organism Value: A. thaliana
  misc_feature: MA Experiment 20000185 PARAMETER Experiment Name: At_Roots__P Parameter: Tissue Value: Roots vs. Whole Plant
  misc_feature: MA Experiment ID: 20000439 Result: Up-regulated in Transcription
  misc_feature: MA Experiment 20000439 PARAMETER Experiment Name: At_Roots__P Parameter: Age (day) Value: 14 vs. 21
  misc_feature: MA Experiment 20000439 PARAMETER Experiment Name: At_Roots__P Parameter: Organism Value: A. thaliana
  misc_feature: MA Experiment 20000439 PARAMETER Experiment Name: At_Roots__P Parameter: Tissue Value: Roots vs. Whole Plant
  misc_feature: MA Experiment ID: 20000496 Result: Down-regulated in Transcription
  misc_feature: MA Experiment 20000496 PARAMETER Experiment Name: At_Guard_Cells_P Parameter: Harvest Date Value: 7/19/2002
  misc_feature: MA Experiment 20000496 PARAMETER Experiment Name: At_Guard_Cells_P Parameter: Organism Value: Canola
  misc_feature: MA Experiment 20000496 PARAMETER Experiment Name: At_Guard_Cells_P Parameter: Tissue Value: Guard Cells vs. Leaves
  misc_feature: MA Experiment ID: 20000527 Result: Down-regulated in Transcription
  misc_feature: MA Experiment 20000527 PARAMETER Experiment Name: At_10percent_PEG_P Parameter: Age (day) Value: 20
  misc_feature: MA Experiment 20000527 PARAMETER Experiment Name: At_10percent_PEG_P Parameter: Organism Value: A. thaliana
  misc_feature: MA Experiment 20000527 PARAMETER Experiment Name: At_10percent_PEG_P Parameter: Plant Line Value: WS
  misc_feature: MA Experiment 20000527 PARAMETER Experiment Name: At_10percent_PEG_P Parameter: Timepoint (day) Value: 20
  misc_feature: MA Experiment 20000527 PARAMETER Experiment Name: At_10percent_PEG_P Parameter: Tissue Value: Whole Plant
  misc_feature: MA Experiment 20000527 PARAMETER Experiment Name: At_10percent_PEG_P Parameter: Treatment Value: 10percent PEG vs. No Treatment
  misc_feature: MA Experiment ID: 20001451 Result: Up-regulated in Transcription
  misc_feature: MA Experiment 20001451 PARAMETER Experiment Name: At_Far-red-induction_P Parameter: Age (day) Value: 7
  misc_feature: MA Experiment 20001451 PARAMETER Experiment Name: At_Far-red-induction_P Parameter: Light Value: Far-red vs. White
  misc_feature: MA Experiment 20001451 PARAMETER Experiment Name: At_Far-red-induction_P Parameter: Organism Value: A. thaliana
  misc_feature: MA Experiment 20001451 PARAMETER Experiment Name: At_Far-red-induction_P Parameter: Plant Line Value: Columbia
  misc_feature: MA Experiment 20001451 PARAMETER Experiment Name: At_Far-red-induction_P Parameter: Timepoint (hr) Value: 24
  misc_feature: MA Experiment 20001451 PARAMETER Experiment Name: At_Far-red-induction_P Parameter: Tissue Value: Whole Plant
  misc_feature: MA Experiment ID: 20001558 Result: Down-regulated in Transcription
  misc_feature: MA Experiment 20001558 PARAMETER Experiment Name: At_Drought_Soil_Dry_P Parameter: Age (day) Value: 27
  misc_feature: MA Experiment 20001558 PARAMETER Experiment Name: At_Drought_Soil_Dry_P Parameter: Organism Value: A. thaliana
  misc_feature: MA Experiment 20001558 PARAMETER Experiment Name: At_Drought_Soil_Dry_P Parameter: Plant Line Value: WS
  misc_feature: MA Experiment 20001558 PARAMETER Experiment Name: At_Drought_Soil_Dry_P Parameter: Post Timepoint (hr) Value: 6
  misc_feature: MA Experiment 20001558 PARAMETER Experiment Name: At_Drought_Soil_Dry_P Parameter: Post-Treatment Value: Re-Water vs. No Drought
  misc_feature: MA Experiment 20001558 PARAMETER Experiment Name: At_Drought_Soil_Dry_P Parameter: Timepoint (day) Value: 13
  misc_feature: MA Experiment 20001558 PARAMETER Experiment Name: At_Drought_Soil_Dry_P Parameter: Treatment Value: Drought vs. No Drought
  misc_feature: MA Experiment ID: 20001560 Result: Down-regulated in Transcription
  misc_feature: MA Experiment 20001560 PARAMETER Experiment Name: At_Drought_Soil_Dry_P Parameter: Age (day) Value: 28
  misc_feature: MA Experiment 20001560 PARAMETER Experiment Name: At_Drought_Soil_Dry_P Parameter: Organism Value: A. thaliana
  misc_feature: MA Experiment 20001560 PARAMETER Experiment Name: At_Drought_Soil_Dry_P Parameter: Plant Line Value: WS
  misc_feature: MA Experiment 20001560 PARAMETER Experiment Name: At_Drought_Soil_Dry_P Parameter: Post Timepoint (hr) Value: None
  misc_feature: MA Experiment 20001560 PARAMETER Experiment Name: At_Drought_Soil_Dry_P Parameter: Post-Treatment Value: None
  misc_feature: MA Experiment 20001560 PARAMETER Experiment Name: At_Drought_Soil_Dry_P Parameter: Timepoint (day) Value: 14
  misc_feature: MA Experiment 20001560 PARAMETER Experiment Name: At_Drought_Soil_Dry_P Parameter: Treatment Value: Drought vs. No Drought
atgggttcatttgccggaaagtgtgaaatagttgaagaaaaagaagaccgtcaaaactcgattggttactcagcgaaatcaaccactattccacattctagatcaagcattgtcgacgacaaggatctggagcgaccggtactgaaattaggttacagaggttcactagaagatgacataaaccaacttttcgagtctataagcattcgaacatcaggaatgattccttcttaccaagttggtgcaactagtagcagtagaaacaacactcctttacaacggaatgctttgaagagtcccgcgaatcccgcaggacctcgatcgcctagcaagagaaatgcggaaccagcgacgttaaaacaagctttgagagatttatgcgtcactaaggcatcggaaaccgcagctaccaaacggattcctaagagtactagtactggaggctcagtttatggttcggttttggttgaaccgggaagtggagctagcgaagaagggaaagcggttcttgtcgagttactcggcgaggatcaaagcagttcatcggatagtatatcgcagcagcttcgtcttctgaagatacattcttctagccaaaactctcagacatcaaagcggtattgcgatgagatgacaatacttaaaaaacacaagaacctgtctcttgacgaccaagaaatgagtatcgagaacaagaacttcggttcatcatcgcccggatcaggaaacaacaagaccgtggttggactgaaatcagttagaaaagtgaggttgttgtatgccaatacaccgagttccaccatagttaacgggaagagagtggctaagttaaccagaaccattccaagaggaggaggagctaaacctgcactaaggaacaaaggttccatgaagaagaaggctacaaatgtgtatgatgaagtagatggcttctatgatcccattgcaaaggaacttctctgccatagatgccatttctctttgaagaacactgcagctaaggaagatccctctaaagattcacttgtagaaccacatgagatctgtgctaaagatgaattggcttctgatttctccagctcaagctatgagagctcgcatgagatcagtgctagtgcagagaccaaacttgataagataagaagctctctggatttgatgaattcagagacctctcacgtttctttaacatctgcattccgtaataagaacatcaaagatgtttctgaatacggcaacaatgagatcatggaggaagattctctatctggcaaagaagttgatcagaaagattctgtctttatgtcggaacagagcgtggagattggttctttcagtgagaaatctgttgtgatgaatccagatagtcctccaaacaaactcagtttaggcggagcagccattgaagatgtcaacgaaaactcagaaatcataaacaaaggcgacggatacaacagttcaaccacgagtatcagcgaggaagaagtacaacaacagagtaataatataatgacaaggtctagctttggaaacagacctcatatgtctaaggatgtgagatgggaagctattcagcatataagggcacaacacgggcttggttcattgggtcttaggcatttcaatcttctgaagaagctcggctgcggagatattggaacggtttatctcgctgagctcacgggaacaaactgtttgtttgctataaaagtgatggataatgaattcttggagagaaggaacaagatgtctagggctcaaactgagaaagatattctcaaaatgcttgatcacccgtttcttccaacgttatacgctcacttcacttcggataacttatcttgtttggtcatggaatgttgtccgggaggtgatttacatgtcttaaggcagaagcagcccggaaggtggtttcccgagccagcagctaggttctatgtcgcggaggtgcttcttgcattggagtatttgcatatgctcggggtaatataccgagatttgaagcccgagaacattttggtacgtgatgatggacatatcatggtgacagattttgatctctctttgaggtgtaccgtgagcccaacgcttctaaactcatcatctccactccatgcggatgcaatgagactctcttcgggtagccgcactggatctaactgcatcgagccatcgtgtttccgccctaaactctcccgcggatcagggcccaagaaaaaaggcaaacaacaccgcatgatgatgaaaaaactcaagaaatctgacctaatcgcgcggttcaaatcattgccacagctcgtggcagaaccaacagatgcgagatcaaactcttttgttggaacacacgagtatctcgcgcccgagatcattaaaggagaaggtcacggtgctgcggttgactggtggacatttgggatctttctatatgagcttctttacgggaaaactccattcaaaggagctactaatgaggagactatagctaatgtggtgcttcagagcttgaagtttcctgataaccctaatgtgagtttccaagctaaggatcttataagaggtttgttggtcaaggaacctgagaaccggttagggacagagaaaggagcagcggagataaaacggcatgcgttcttcgaaggcttgaactgggcgttgatccggtgtgcgatcccgcctgagcttccggatttctatgactatggagttcctaatcaagaagggaaaagcaattacttagattgcaaggcagttggggaacatcttgagtttgagttattctag

SEQ ID NO: 71218 - protein, 926 aa, Arabidopsis thaliana
  peptide (1)..(926): Ceres Seq. ID no. 3082086
  misc_feature (541)..(878): Pfam Name: Protein kinase domain Pfam Description: Protein kinase domain
  misc_feature (364)..(926): Homolog of NCBI NO: 15227639 NR Description: putative protein kinase; protein id: At2g36350.1
  misc_feature (1)..(205): Homolog of NCBI NO: 15227639 NR Description: putative protein kinase; protein id: At2g36350.1
  misc_feature (369)..(926): Homolog of NCBI NO: 30693719 NR Description: protein kinase (KIPK) [Arabidopsis thaliana]
  misc_feature (1)..(173): Homolog of NCBI NO: 30693719 NR Description: protein kinase (KIPK) [Arabidopsis thaliana]
  misc_feature (369)..(926): Homolog of NCBI NO: 7716430 NR Description: protein kinase KIPK [Arabidopsis thaliana]
  misc_feature (409)..(926): Homolog of NCBI NO: 15236802 NR Description: putative protein kinase; protein id: At4g26610.1, by cDNA: gi_17380933, supported by cDNA: gi_20258942 [Arabidopsis >gi|7488161|pir||T08927 probable protein kinase T15N24.60
  misc_feature (430)..(926): Homolog of NCBI NO: 7446383 NR Description: probable protein kinase PK1 - potato
  misc_feature (512)..(926): Homolog of NCBI NO: 320622 NR Description: probable protein kinase - maize (fragment)
  misc_feature (424)..(926): Homolog of NCBI NO: 125568 NR Description: Protein kinase PVPK-1 >gi|100013|pir||A30311
  misc_feature (460)..(895): Homolog of NCBI NO: 15238798 NR Description: protein kinase (EC 2.7.1.37) 5 (pir||JN0505); id: At5g47750.1, supported by cDNA: gi_15809918, supported by gi_17064849, supported by cDNA: gi_20259909 [Arabidopsis
MGSFAGKCEIVEEKEDRQNSIGYSAKSTTIPHSRSSIVDDKDLERPVLKLGYRGSLEDDINQLFESISIRTSGMIPSYQVGATSSSRNNTPLQRNALKSPANPAGPRSPSKRNAEPATLKQALRDLCVTKASETAATKRIPKSTSTGGSVYGSVLVEPGSGASEEGKAVLVELLGEDQSSSSDSISQQLRLLKIHSSSQNSQTSKRYCDEMTILKKHKNLSLDDQEMSIENKNFGSSSPGSGNNKTVVGLKSVRKVRLLYANTPSSTIVNGKRVAKLTRTIPRGGGAKPALRNKGSMKKKATNVYDEVDGFYDPIAKELLCHRCHFSLKNTAAKEDPSKDSLVEPHEICAKDELASDFSSSSYESSHEISASAETKLDKIRSSLDLMNSETSHVSLTSAFRNKNIKDVSEYGNNEIMEEDSLSGKEVDQKDSVFMSEQSVEIGSFSEKSVVMNPDSPPNKLSLGGAAIEDVNENSEIINKGDGYNSSTTSISEEEVQQQSNNIMTRSSFGNRPHMSKDVRWEAIQHIRAQHGLGSLGLRHFNLLKKLGCGDIGTVYLAELTGTNCLFAIKVMDNEFLERRNKMSRAQTEKDILKMLDHPFLPTLYAHFTSDNLSCLVMECCPGGDLHVLRQKQPGRWFPEPAARFYVAEVLLALEYLHMLGVIYRDLKPENILVRDDGHIMVTDFDLSLRCTVSPTLLNSSSPLHADAMRLSSGSRTGSNCIEPSCFRPKLSRGSGPKKKGKQHRMMMKKLKKSDLIARFKSLPQLVAEPTDARSNSFVGTHEYLAPEIIKGEGHGAAVDWWTFGIFLYELLYGKTPFKGATNEETIANVVLQSLKFPDNPNVSFQAKDLIRGLLVKEPENRLGTEKGAAEIKRHAFFEGLNWALIRCAIPPELPDFYDYGVPNQEGKSNYLDCKAVGEHLEFELF

SEQ ID NO: 71219 - protein, 853 aa, Arabidopsis thaliana
  peptide (1)..(853): Ceres Seq. ID no. 3082087
  misc_feature (468)..(805): Pfam Name: Protein kinase domain Pfam Description: Protein kinase domain
  misc_feature (291)..(853): Homolog of NCBI NO: 15227639 NR Description: putative protein kinase; protein id: At2g36350.1
  misc_feature (1)..(132): Homolog of NCBI NO: 15227639 NR Description: putative protein kinase; protein id: At2g36350.1
  misc_feature (296)..(853): Homolog of NCBI NO: 30693719 NR Description: protein kinase (KIPK) [Arabidopsis thaliana]
  misc_feature (1)..(100): Homolog of NCBI NO: 30693719 NR Description: protein kinase (KIPK) [Arabidopsis thaliana]
  misc_feature (296)..(853): Homolog of NCBI NO: 7716430 NR Description: protein kinase KIPK [Arabidopsis thaliana]
  misc_feature (336)..(853): Homolog of NCBI NO: 15236802 NR Description: putative protein kinase; protein id: At4g26610.1, by cDNA: gi_17380933, supported by cDNA: gi_20258942 [Arabidopsis >gi|7488161|pir||T08927 probable protein kinase T15N24.60
  misc_feature (357)..(853): Homolog of NCBI NO: 7446383 NR Description: probable protein kinase PK1 - potato
  misc_feature (439)..(853): Homolog of NCBI NO: 320622 NR Description: probable protein kinase - maize (fragment)
  misc_feature (351)..(853): Homolog of NCBI NO: 125568 NR Description: Protein kinase PVPK-1 >gi|100013|pir||A30311
  misc_feature (387)..(822): Homolog of NCBI NO: 15238798 NR Description: protein kinase (EC 2.7.1.37) 5 (pir||JN0505); id: At5g47750.1, supported by cDNA: gi_15809918, supported by gi_17064849, supported by cDNA: gi_20259909 [Arabidopsis
MIPSYQVGATSSSRNNTPLQRNALKSPANPAGPRSPSKRNAEPATLKQALRDLCVTKASETAATKRIPKSTSTGGSVYGSVLVEPGSGASEEGKAVLVELLGEDQSSSSDSISQQLRLLKIHSSSQNSQTSKRYCDEMTILKKHKNLSLDDQEMSIENKNFGSSSPGSGNNKTVVGLKSVRKVRLLYANTPSSTIVNGKRVAKLTRTIPRGGGAKPALRNKGSMKKKATNVYDEVDGFYDPIAKELLCHRCHFSLKNTAAKEDPSKDSLVEPHEICAKDELASDFSSSSYESSHEISASAETKLDKIRSSLDLMNSETSHVSLTSAFRNKNIKDVSEYGNNEIMEEDSLSGKEVDQKDSVFMSEQSVEIGSFSEKSVVMNPDSPPNKLSLGGAAIEDVNENSEIINKGDGYNSSTTSISEEEVQQQSNNIMTRSSFGNRPHMSKDVRWEAIQHIRAQHGLGSLGLRHFNLLKKLGCGDIGTVYLAELTGTNCLFAIKVMDNEFLERRNKMSRAQTEKDILKMLDHPFLPTLYAHFTSDNLSCLVMECCPGGDLHVLRQKQPGRWFPEPAARFYVAEVLLALEYLHMLGVIYRDLKPENILVRDDGHIMVTDFDLSLRCTVSPTLLNSSSPLHADAMRLSSGSRTGSNCIEPSCFRPKLSRGSGPKKKGKQHRMMMKKLKKSDLIARFKSLPQLVAEPTDARSNSFVGTHEYLAPEIIKGEGHGAAVDWWTFGIFLYELLYGKTPFKGATNEETIANVVLQSLKFPDNPNVSFQAKDLIRGLLVKEPENRLGTEKGAAEIKRHAFFEGLNWALIRCAIPPELPDFYDYGVPNQEGKSNYLDCKAVGEHLEFELF

SEQ ID NO: 71220 - protein, 716 aa, Arabidopsis thaliana
  peptide (1)..(716): Ceres Seq. ID no. 3082088
  misc_feature (331)..(668): Pfam Name: Protein kinase domain Pfam Description: Protein kinase domain
  misc_feature (154)..(716): Homolog of NCBI NO: 15227639 NR Description: putative protein kinase; protein id: At2g36350.1
  misc_feature (159)..(716): Homolog of NCBI NO: 30693719 NR Description: protein kinase (KIPK) [Arabidopsis thaliana]
  misc_feature (159)..(716): Homolog of NCBI NO: 7716430 NR Description: protein kinase KIPK [Arabidopsis thaliana]
  misc_feature (199)..(716): Homolog of NCBI NO: 15236802 NR Description: putative protein kinase; protein id: At4g26610.1, by cDNA: gi_17380933, supported by cDNA: gi_20258942 [Arabidopsis >gi|7488161|pir||T08927 probable protein kinase T15N24.60
  misc_feature (220)..(716): Homolog of NCBI NO: 7446383 NR Description: probable protein kinase PK1 - potato
  misc_feature (302)..(716): Homolog of NCBI NO: 320622 NR Description: probable protein kinase - maize (fragment)
  misc_feature (214)..(716): Homolog of NCBI NO: 125568 NR Description: Protein kinase PVPK-1 >gi|100013|pir||A30311
  misc_feature (250)..(685): Homolog of NCBI NO: 15238798 NR Description: protein kinase (EC 2.7.1.37) 5 (pir||JN0505); id: At5g47750.1, supported by cDNA: gi_15809918, supported by gi_17064849, supported by cDNA: gi_20259909 [Arabidopsis
  misc_feature (270)..(716): Homolog of NCBI NO: 38346163 NR Description: OSJNBa0079A21.10 [Oryza sativa (japonica
  misc_feature (250)..(685): Homolog of NCBI NO: 17064850 NR Description: protein kinase 5 [Arabidopsis thaliana]
MTILKKHKNLSLDDQEMSIENKNFGSSSPGSGNNKTVVGLKSVRKVRLLYANTPSSTIVNGKRVAKLTRTIPRGGGAKPALRNKGSMKKKATNVYDEVDGFYDPIAKELLCHRCHFSLKNTAAKEDPSKDSLVEPHEICAKDELASDFSSSSYESSHEISASAETKLDKIRSSLDLMNSETSHVSLTSAFRNKNIKDVSEYGNNEIMEEDSLSGKEVDQKDSVFMSEQSVEIGSFSEKSVVMNPDSPPNKLSLGGAAIEDVNENSEIINKGDGYNSSTTSISEEEVQQQSNNIMTRSSFGNRPHMSKDVRWEAIQHIRAQHGLGSLGLRHFNLLKKLGCGDIGTVYLAELTGTNCLFAIKVMDNEFLERRNKMSRAQTEKDILKMLDHPFLPTLYAHFTSDNLSCLVMECCPGGDLHVLRQKQPGRWFPEPAARFYVAEVLLALEYLHMLGVIYRDLKPENILVRDDGHIMVTDFDLSLRCTVSPTLLNSSSPLHADAMRLSSGSRTGSNCIEPSCFRPKLSRGSGPKKKGKQHRMMMKKLKKSDLIARFKSLPQLVAEPTDARSNSFVGTHEYLAPEIIKGEGHGAAVDWWTFGIFLYELLYGKTPFKGATNEETIANVVLQSLKFPDNPNVSFQAKDLIRGLLVKEPENRLGTEKGAAEIKRHAFFEGLNWALIRCAIPPELPDFYDYGVPNQEGKSNYLDCKAVGEHLEFELF

SEQ ID NO: 71221 - DNA, 1740 bp, Arabidopsis thaliana
  misc_feature (1)..(1740): Ceres Seq. ID no. 3082487
  misc_feature: MA Experiment ID: 20000171 Result: Down-regulated in Transcription
  misc_feature: MA Experiment 20000171 PARAMETER Experiment Name: At_42deg_Heat_P Parameter: Age (day) Value: 14
  misc_feature: MA Experiment 20000171 PARAMETER Experiment Name: At_42deg_Heat_P Parameter: Organism Value: A. thaliana
  misc_feature: MA Experiment 20000171 PARAMETER Experiment Name: At_42deg_Heat_P Parameter: Plant Line Value: WS
  misc_feature: MA Experiment 20000171 PARAMETER Experiment Name: At_42deg_Heat_P Parameter: Temperature (deg C) Value: 42 vs. 22
  misc_feature: MA Experiment 20000171 PARAMETER Experiment Name: At_42deg_Heat_P Parameter: Timepoint (hr) Value: 1
  misc_feature: MA Experiment 20000171 PARAMETER Experiment Name: At_42deg_Heat_P Parameter: Tissue Value: Aerial
  misc_feature: MA Experiment ID: 20000173 Result: Down-regulated in Transcription
  misc_feature: MA Experiment 20000173 PARAMETER Experiment Name: At_42deg_Heat_P Parameter: Age (day) Value: 14
  misc_feature: MA Experiment 20000173 PARAMETER Experiment Name: At_42deg_Heat_P Parameter: Organism Value: A. thaliana
  misc_feature: MA Experiment 20000173 PARAMETER Experiment Name: At_42deg_Heat_P Parameter: Plant Line Value: WS
  misc_feature: MA Experiment 20000173 PARAMETER Experiment Name: At_42deg_Heat_P Parameter: Temperature (deg C) Value: 42 vs. 22
  misc_feature: MA Experiment 20000173 PARAMETER Experiment Name: At_42deg_Heat_P Parameter: Timepoint (hr) Value: 6
  misc_feature: MA Experiment 20000173 PARAMETER Experiment Name: At_42deg_Heat_P Parameter: Tissue Value: Aerial
  misc_feature: MA Experiment ID: 20000180 Result: Up-regulated in Transcription
  misc_feature: MA Experiment 20000180 PARAMETER Experiment Name: At_Germinating_Seeds_P Parameter: Age (hr) Value: 24 vs. 0
  misc_feature: MA Experiment 20000180 PARAMETER Experiment Name: At_Germinating_Seeds_P Parameter: Tissue Value: Germinating Seeds
  misc_feature: MA Experiment ID: 20000234 Result: Up-regulated in Transcription
  misc_feature: MA Experiment 20000234 PARAMETER Experiment Name: At_Siliques_P Parameter: Age (day) Value: 21
  misc_feature: MA Experiment 20000234 PARAMETER Experiment Name: At_Siliques_P Parameter: Organism Value: A. thaliana
  misc_feature: MA Experiment 20000234 PARAMETER Experiment Name: At_Siliques_P Parameter: Plant Line Value: WS
  misc_feature: MA Experiment 20000234 PARAMETER Experiment Name: At_Siliques_P Parameter: Tissue Value: Less Than 5mm Siliques vs. Whole Plant
  misc_feature: MA Experiment ID: 20000264 Result: Up-regulated in Transcription
  misc_feature: MA Experiment 20000264 PARAMETER Experiment Name: At_Open_Flower_P Parameter: Age (day) Value: 21
  misc_feature: MA Experiment 20000264 PARAMETER Experiment Name: At_Open_Flower_P Parameter: Plant Line Value: WS
  misc_feature: MA Experiment 20000264 PARAMETER Experiment Name: At_Open_Flower_P Parameter: Tissue Value: Open Flower vs. Whole Plant
  misc_feature: MA Experiment ID: 20000265 Result: Up-regulated in Transcription
  misc_feature: MA Experiment 20000265 PARAMETER Experiment Name: At_Open_Flower_P Parameter: Age (day) Value: 21
  misc_feature: MA Experiment 20000265 PARAMETER Experiment Name: At_Open_Flower_P Parameter: Plant Line Value: WS
  misc_feature: MA Experiment 20000265 PARAMETER Experiment Name: At_Open_Flower_P Parameter: Tissue Value: Closed Flower vs. Whole Plant
  misc_feature: MA Experiment ID: 20000286 Result: Up-regulated in Transcription
  misc_feature: MA Experiment 20000286 PARAMETER Experiment Name: At_Open_Flower_P Parameter: Age (day) Value: 21
  misc_feature: MA Experiment 20000286 PARAMETER Experiment Name: At_Open_Flower_P Parameter: Plant Line Value: WS
  misc_feature: MA Experiment 20000286 PARAMETER Experiment Name: At_Open_Flower_P Parameter: Tissue Value: Half Open vs. Whole Plant
  misc_feature: MA Experiment ID: 20000436 Result: Down-regulated in Transcription
  misc_feature: MA Experiment 20000436 PARAMETER Experiment Name: At_Drought_P Parameter: Age (day) Value: 7
  misc_feature: MA Experiment 20000436 PARAMETER Experiment Name: At_Drought_P Parameter: Organism Value: A. thaliana
  misc_feature: MA Experiment 20000436 PARAMETER Experiment Name: At_Drought_P Parameter: Plant Line Value: WS
  misc_feature: MA Experiment 20000436 PARAMETER Experiment Name: At_Drought_P Parameter: Timepoint (hr) Value: 12
  misc_feature: MA Experiment 20000436 PARAMETER Experiment Name: At_Drought_P Parameter: Tissue Value: Whole Plant
  misc_feature: MA Experiment 20000436 PARAMETER Experiment Name: At_Drought_P Parameter: Treatment Value: Drought vs. No Drought
  misc_feature: MA Experiment ID: 20000437 Result: Down-regulated in Transcription
  misc_feature: MA Experiment 20000437 PARAMETER Experiment Name: At_Drought_P Parameter: Age (day) Value: 8
  misc_feature: MA Experiment 20000437 PARAMETER Experiment Name: At_Drought_P Parameter: Organism Value: A. thaliana
  misc_feature: MA Experiment 20000437 PARAMETER Experiment Name: At_Drought_P Parameter: Plant Line Value: WS
  misc_feature: MA Experiment 20000437 PARAMETER Experiment Name: At_Drought_P Parameter: Timepoint (hr) Value: 24
  misc_feature: MA Experiment 20000437 PARAMETER Experiment Name: At_Drought_P Parameter: Tissue Value: Whole Plant
  misc_feature: MA Experiment 20000437 PARAMETER Experiment Name: At_Drought_P Parameter: Treatment Value: Drought vs. No Drought
  misc_feature: MA Experiment ID: 20000438 Result: Up-regulated in Transcription
  misc_feature: MA Experiment 20000438 PARAMETER Experiment Name: At_Shoots__P Parameter: Age (day) Value: 14
  misc_feature: MA Experiment 20000438 PARAMETER Experiment Name: At_Shoots__P Parameter: Tissue Value: Shoots vs. Whole Plant
  misc_feature: MA Experiment ID: 20000495 Result: Up-regulated in Transcription
  misc_feature: MA Experiment 20000495 PARAMETER Experiment Name: At_Guard_Cells_P Parameter: Harvest Date Value: 8/2/2002
  misc_feature: MA Experiment 20000495 PARAMETER Experiment Name: At_Guard_Cells_P Parameter: Organism Value: A. thaliana
  misc_feature: MA Experiment 20000495 PARAMETER Experiment Name: At_Guard_Cells_P Parameter: Tissue Value: Guard Cells vs. Leaves
  misc_feature: MA Experiment ID: 20000496 Result: Up-regulated in Transcription
  misc_feature: MA Experiment 20000496 PARAMETER Experiment Name: At_Guard_Cells_P Parameter: Harvest Date Value: 7/19/2002
  misc_feature: MA Experiment 20000496 PARAMETER Experiment Name: At_Guard_Cells_P Parameter: Organism Value: Canola
  misc_feature: MA Experiment 20000496 PARAMETER Experiment Name: At_Guard_Cells_P Parameter: Tissue Value: Guard Cells vs. Leaves
  misc_feature: MA Experiment ID: 20001450 Result: Down-regulated in Transcription
  misc_feature: MA Experiment 20001450 PARAMETER Experiment Name: At_Far-red-induction_P Parameter: Age (day) Value: 7
  misc_feature: MA Experiment 20001450 PARAMETER Experiment Name: At_Far-red-induction_P Parameter: Light Value: Far-red vs. White
  misc_feature: MA Experiment 20001450 PARAMETER Experiment Name: At_Far-red-induction_P Parameter: Organism Value: A. thaliana
  misc_feature: MA Experiment 20001450 PARAMETER Experiment Name: At_Far-red-induction_P Parameter: Plant Line Value: Columbia
  misc_feature: MA Experiment 20001450 PARAMETER Experiment Name: At_Far-red-induction_P Parameter: Timepoint (hr) Value: 8
  misc_feature: MA Experiment 20001450 PARAMETER Experiment Name: At_Far-red-induction_P Parameter: Tissue Value: Whole Plant
  misc_feature: MA Experiment ID: 20001560 Result: Up-regulated in Transcription
  misc_feature: MA Experiment 20001560 PARAMETER Experiment Name: At_Drought_Soil_Dry_P Parameter: Age (day) Value: 28
  misc_feature: MA Experiment 20001560 PARAMETER Experiment Name: At_Drought_Soil_Dry_P Parameter: Organism Value: A. thaliana
  misc_feature: MA Experiment 20001560 PARAMETER Experiment Name: At_Drought_Soil_Dry_P Parameter: Plant Line Value: WS
  misc_feature: MA Experiment 20001560 PARAMETER Experiment Name: At_Drought_Soil_Dry_P Parameter: Post Timepoint (hr) Value: None
  misc_feature: MA Experiment 20001560 PARAMETER Experiment Name: At_Drought_Soil_Dry_P Parameter: Post-Treatment Value: None
  misc_feature: MA Experiment 20001560 PARAMETER Experiment Name: At_Drought_Soil_Dry_P Parameter: Timepoint (day) Value: 14
  misc_feature: MA Experiment 20001560 PARAMETER Experiment Name: At_Drought_Soil_Dry_P Parameter: Treatment Value: Drought vs. No Drought
  misc_feature: MA Experiment ID: 20001911 Result: Down-regulated in Transcription
  misc_feature: MA Experiment 20001911 PARAMETER Experiment Name: At_Drought_Reproduction_P Parameter: Age (day) Value: 40
  misc_feature: MA Experiment 20001911 PARAMETER Experiment Name: At_Drought_Reproduction_P Parameter: Organism Value: A. thaliana
  misc_feature: MA Experiment 20001911 PARAMETER Experiment Name: At_Drought_Reproduction_P Parameter: Plant Line Value: WS
  misc_feature: MA Experiment 20001911 PARAMETER Experiment Name: At_Drought_Reproduction_P Parameter: Timepoint (day) Value: 10
  misc_feature: MA Experiment 20001911 PARAMETER Experiment Name: At_Drought_Reproduction_P Parameter: Tissue Value: Flowers
  misc_feature: MA Experiment 20001911 PARAMETER Experiment Name: At_Drought_Reproduction_P Parameter: Treatment Value: Drought vs. No Drought
atggaggataatagctgtatcgggtttgagggatcgaaaagatttggtgagactagtaaacgtatcattggtttgattgactcagtgactgagtcaacgactgattcaagtcttagcagctcaagttctggtgttggatcgagctccgggaggtcttctgtagctgagagatctgtttcatcacctccgacgaaatcgcagattcttggatggccgttaggacaaggttcatggaggaagagttctggtaaaatgaagaagaaaactccgacaaagatcgatgattttgggtttaagagagttggaacagagacttcagagattgagttgttgaaagagagaatggcgaagttgttgcttggtgaagacatgtctggttctggtgaaggagtttgtcctgctttggctatttctaatgccattaccaatctctatgctgcaatattgggacaacaatggaggctagagccaatccctagtgagaaaaaattaatgtggagaagagaaatcgaagttcttctttctgttagtgatcacattgttgaattggtaccttcctttcagaatttccccaatggaaacaagattgaggtgatgaactgcagaccaagatcagatctctttacttgtcttcctgctcttaggaagctagacaatatgcttattgaaatattagatagttttggagaaacagagttctggtacgttgatcaagggattgtagctgcggaatctgcaaggtctaactctttccgtgaagacggagacaaatggtggcttccgctgccgcgtgtgccatccgatggacttaccgaacaaactaggaagaaactggatcatactcgcgaattcaccaaccaaatcttgaaagcttgtatgtcaatcaacagcattgctttagctgaaatggaagttccacaatcataccttgaagcccttccaaagaacggaagatcttgtcttggagattttctatatagaaacatcacatcggataacttctctgcggatcacttgctagaatcaatagatctttcatctgagcttgcggttgtagaaatggcgaaccgagtagaagcatcaatgtacgtttggaggagaagagctcactcgaggcatctgatatctctgtatcgatccacaagtacaagatgggggatgatagtgaaggagatgatgatgcatcaaaccgatggtgacaaaagggaaatatttgcggagagagcagaaagcttattgatccgtctcaagcaacgtttcccgggacttagacaaacagctttagacacaagcaagatccaatacaacaaggatgtaggaaagtctatacttgagagctactcaagggtattagagagtttagcgtatagcattggtgtacgcatagaggaagtgttgttcatggatgacatcagcaaagatgatggtgatggtgatgatgattcttgttcagacaagttgagattgttgtctaaagaagcagctagtggtggttcaggctctctaagggagaaactttctgctccatcgctgttctctgtgtcattctcaggcacgtcaactccgtacagaactctatctttctctgcatcgactccaagttattcaccaatgccgttgataagccccatcaacggaggaagaggaggagaaagagctccgtttctctctgggaggaacattagagaacgttgcgggtttggtccaaagaaagcattggccaattatctccggggttga

SEQ ID NO: 71222 - protein, 579 aa, Arabidopsis thaliana
  peptide (1)..(579): Ceres Seq. ID no. 3082488
  misc_feature (6)..(476): Pfam Name: Domain of unknown function (DUF315) Pfam Description: Domain of unknown function (DUF315)
  misc_feature (1)..(579): Homolog of NCBI NO: 15228166 NR Description: putative protein; protein id: At3g55660.1
  misc_feature (107)..(577): Homolog of NCBI NO: 15239292 NR Description: putative protein; protein id: At5g05940.1 thaliana] >gi|10177567|dbj|BAB10799.1|
  misc_feature (100)..(477): Homolog of NCBI NO: 15241663 NR Description: putative protein; protein id: At5g02010.1
  misc_feature (31)..(536): Homolog of NCBI NO: 34908302 NR Description: P0005H10.23 [Oryza sativa (japonica
  misc_feature (99)..(548): Homolog of NCBI NO: 15233845 NR Description: putative protein; protein id: At4g38430.1, by cDNA: gi_15810308, supported by cDNA: gi_15912194 [Arabidopsis >gi|18421309|ref|NP_568515.1| Expressed protein [Arabidopsis
  misc_feature (99)..(548): Homolog of NCBI NO: 15810309 NR Description: unknown protein [Arabidopsis thaliana]
  misc_feature (107)..(469): Homolog of NCBI NO: 15236138 NR Description: putative protein; protein id: At4g00460.1
  misc_feature (26)..(469): Homolog of NCBI NO: 37536670 NR Description: hypothetical protein [Oryza sativa (japonica group)] >gi|10140653|gb|AAG13489.1| hypothetical protein [Oryza
  misc_feature (2)..(469): Homolog of NCBI NO: 15223455 NR Description: hypothetical protein; protein id: At1g01700.1
  misc_feature (104)..(469): Homolog of NCBI NO: 33146611 NR Description: hypothetical protein [Oryza sativa (japonica
MEDNSCIGFEGSKRFGETSKRIIGLIDSVTESTTDSSLSSSSSGVGSSSGRSSVAERSVSSPPTKSQILGWPLGQGSWRKSSGKMKKKTPTKIDDFGFKRVGTETSEIELLKERMAKLLLGEDMSGSGEGVCPALAISNAITNLYAAILGQQWRLEPIPSEKKLMWRREIEVLLSVSDHIVELVPSFQNFPNGNKIEVMNCRPRSDLFTCLPALRKLDNMLIEILDSFGETEFWYVDQGIVAAESARSNSFREDGDKWWLPLPRVPSDGLTEQTRKKLDHTREFTNQILKACMSINSIALAEMEVPQSYLEALPKNGRSCLGDFLYRNITSDNFSADHLLESIDLSSELAVVEMANRVEASMYVWRRRAHSRHLISLYRSTSTRWGMIVKEMMMHQTDGDKREIFAERAESLLIRLKQRFPGLRQTALDTSKIQYNKDVGKSILESYSRVLESLAYSIGVRIEEVLFMDDISKDDGDGDDDSCSDKLRLLSKEAASGGSGSLREKLSAPSLFSVSFSGTSTPYRTLSFSASTPSYSPMPLISPINGGRGGERAPFLSGRNIRERCGFGPKKALANYLRG

SEQ ID NO: 71223 - protein, 495 aa, Arabidopsis thaliana
  peptide (1)..(495): Ceres Seq. ID no. 3082489
  misc_feature (1)..(392): Pfam Name: Domain of unknown function (DUF315) Pfam Description: Domain of unknown function (DUF315)
  misc_feature (1)..(495): Homolog of NCBI NO: 15228166 NR Description: putative protein; protein id: At3g55660.1
  misc_feature (23)..(493): Homolog of NCBI NO: 15239292 NR Description: putative protein; protein id: At5g05940.1 thaliana] >gi|10177567|dbj|BAB10799.1|
  misc_feature (16)..(393): Homolog of NCBI NO: 15241663 NR Description: putative protein; protein id: At5g02010.1
  misc_feature (1)..(452): Homolog of NCBI NO: 34908302 NR Description: P0005H10.23 [Oryza sativa (japonica
  misc_feature (15)..(464): Homolog of NCBI NO: 15233845 NR Description: putative protein; protein id: At4g38430.1, by cDNA: gi_15810308, supported by cDNA: gi_15912194 [Arabidopsis >gi|18421309|ref|NP_568515.1| Expressed protein [Arabidopsis
  misc_feature (15)..(464): Homolog of NCBI NO: 15810309 NR Description: unknown protein [Arabidopsis thaliana]
  misc_feature (23)..(385): Homolog of NCBI NO: 15236138 NR Description: putative protein; protein id: At4g00460.1
  misc_feature (1)..(385): Homolog of NCBI NO: 37536670 NR Description: hypothetical protein [Oryza sativa (japonica group)] >gi|10140653|gb|AAG13489.1| hypothetical protein [Oryza
  misc_feature (1)..(385): Homolog of NCBI NO: 15223455 NR Description: hypothetical protein; protein id: At1g01700.1
  misc_feature (20)..(385): Homolog of NCBI NO: 33146611 NR Description: hypothetical protein [Oryza sativa (japonica
MKKKTPTKIDDFGFKRVGTETSEIELLKERMAKLLLGEDMSGSGEGVCPALAISNAITNLYAAILGQQWRLEPIPSEKKLMWRREIEVLLSVSDHIVELVPSFQNFPNGNKIEVMNCRPRSDLFTCLPALRKLDNMLIEILDSFGETEFWYVDQGIVAAESARSNSFREDGDKWWLPLPRVPSDGLTEQTRKKLDHTREFTNQILKACMSINSIALAEMEVPQSYLEALPKNGRSCLGDFLYRNITSDNFSADHLLESIDLSSELAVVEMANRVEASMYVWRRRAHSRHLISLYRSTSTRWGMIVKEMMMHQTDGDKREIFAERAESLLIRLKQRFPGLRQTALDTSKIQYNKDVGKSILESYSRVLESLAYSIGVRIEEVLFMDDISKDDGDGDDDSCSDKLRLLSKEAASGGSGSLREKLSAPSLFSVSFSGTSTPYRTLSFSASTPSYSPMPLISPINGGRGGERAPFLSGRNIRERCGFGPKKALANYLRG

SEQ ID NO: 71224 - protein, 465 aa, Arabidopsis thaliana
  peptide (1)..(465): Ceres Seq. ID no. 3082490
  misc_feature (1)..(362): Pfam Name: Domain of unknown function (DUF315) Pfam Description: Domain of unknown function (DUF315)
  misc_feature (1)..(465): Homolog of NCBI NO: 15228166 NR Description: putative protein; protein id: At3g55660.1
  misc_feature (1)..(463): Homolog of NCBI NO: 15239292 NR Description: putative protein; protein id: At5g05940.1 thaliana] >gi|10177567|dbj|BAB10799.1|
  misc_feature (1)..(363): Homolog of NCBI NO: 15241663 NR Description: putative protein; protein id: At5g02010.1
  misc_feature (1)..(422): Homolog of NCBI NO: 34908302 NR Description: P0005H10.23 [Oryza sativa (japonica
  misc_feature (1)..(434): Homolog of NCBI NO: 15233845 NR Description: putative protein; protein id: At4g38430.1, by cDNA: gi_15810308, supported by cDNA: gi_15912194 [Arabidopsis >gi|18421309|ref|NP_568515.1| Expressed protein [Arabidopsis
  misc_feature (1)..(434): Homolog of NCBI NO: 15810309 NR Description: unknown protein [Arabidopsis thaliana]
  misc_feature (1)..(355): Homolog of NCBI NO: 15236138 NR Description: putative protein; protein id: At4g00460.1
  misc_feature (1)..(355): Homolog of NCBI NO: 37536670 NR Description: hypothetical protein [Oryza sativa (japonica group)] >gi|10140653|gb|AAG13489.1| hypothetical protein [Oryza
  misc_feature (1)..(355): Homolog of NCBI NO: 15223455 NR Description: hypothetical protein; protein id: At1g01700.1
  misc_feature (1)..(355): Homolog of NCBI NO: 33146611 NR Description: hypothetical protein [Oryza sativa (japonica
MAKLLLGEDMSGSGEGVCPALAISNAITNLYAAILGQQWRLEPIPSEKKLMWRREIEVLLSVSDHIVELVPSFQNFPNGNKIEVMNCRPRSDLFTCLPALRKLDNMLIEILDSFGETEFWYVDQGIVAAESARSNSFREDGDKWWLPLPRVPSDGLTEQTRKKLDHTREFTNQILKACMSINSIALAEMEVPQSYLEALPKNGRSCLGDFLYRNITSDNFSADHLLESIDLSSELAVVEMANRVEASMYVWRRRAHSRHLISLYRSTSTRWGMIVKEMMMHQTDGDKREIFAERAESLLIRLKQRFPGLRQTALDTSKIQYNKDVGKSILESYSRVLESLAYSIGVRIEEVLFMDDISKDDGDGDDDSCSDKLRLLSKEAASGGSGSLREKLSAPSLFSVSFSGTSTPYRTLSFSASTPSYSPMPLISPINGGRGGERAPFLSGRNIRERCGFGPKKALANYLRG

SEQ ID NO: 71225 - DNA, 1863 bp, Arabidopsis thaliana
  misc_feature (1)..(1863): Ceres Seq. ID no. 3083111
  misc_feature: MA Experiment ID: 20000185 Result: Down-regulated in Transcription
  misc_feature: MA Experiment 20000185 PARAMETER Experiment Name: At_Roots__P Parameter: Age (day) Value: 7 vs. 21
  misc_feature: MA Experiment 20000185 PARAMETER Experiment Name: At_Roots__P Parameter: Organism Value: A. thaliana
  misc_feature: MA Experiment 20000185 PARAMETER Experiment Name: At_Roots__P Parameter: Tissue Value: Roots vs. Whole Plant
  misc_feature: MA Experiment ID: 20000234 Result: Down-regulated in Transcription
  misc_feature: MA Experiment 20000234 PARAMETER Experiment Name: At_Siliques_P Parameter: Age (day) Value: 21
  misc_feature: MA Experiment 20000234 PARAMETER Experiment Name: At_Siliques_P Parameter: Organism Value: A. thaliana
  misc_feature: MA Experiment 20000234 PARAMETER Experiment Name: At_Siliques_P Parameter: Plant Line Value: WS
  misc_feature: MA Experiment 20000234 PARAMETER Experiment Name: At_Siliques_P Parameter: Tissue Value: Less Than 5mm Siliques vs. Whole Plant
  misc_feature: MA Experiment ID: 20000235 Result: Down-regulated in Transcription
  misc_feature: MA Experiment 20000235 PARAMETER Experiment Name: At_Siliques_P Parameter: Age (day) Value: 21
  misc_feature: MA Experiment 20000235 PARAMETER Experiment Name: At_Siliques_P Parameter: Organism Value: A. thaliana
  misc_feature: MA Experiment 20000235 PARAMETER Experiment Name: At_Siliques_P Parameter: Plant Line Value: WS
  misc_feature: MA Experiment 20000235 PARAMETER Experiment Name: At_Siliques_P Parameter: Tissue Value: 5-10mm Siliques vs. Whole Plant
  misc_feature: MA Experiment ID: 20000264 Result: Down-regulated in Transcription
  misc_feature: MA Experiment 20000264 PARAMETER Experiment Name: At_Open_Flower_P Parameter: Age (day) Value: 21
  misc_feature: MA Experiment 20000264 PARAMETER Experiment Name: At_Open_Flower_P Parameter: Plant Line Value: WS
  misc_feature: MA Experiment 20000264 PARAMETER Experiment Name: At_Open_Flower_P Parameter: Tissue Value: Open Flower vs. Whole Plant
  misc_feature: MA Experiment ID: 20000265 Result: Down-regulated in Transcription
  misc_feature: MA Experiment 20000265 PARAMETER Experiment Name: At_Open_Flower_P Parameter: Age (day) Value: 21
  misc_feature: MA Experiment 20000265 PARAMETER Experiment Name: At_Open_Flower_P Parameter: Plant Line Value: WS
  misc_feature: MA Experiment 20000265 PARAMETER Experiment Name: At_Open_Flower_P Parameter: Tissue Value: Closed Flower vs. Whole Plant
  misc_feature: MA Experiment ID: 20000267 Result: Up-regulated in Transcription
  misc_feature: MA Experiment 20000267 PARAMETER Experiment Name: At_Drought_P Parameter: Age (day) Value: 7
  misc_feature: MA Experiment 20000267 PARAMETER Experiment Name: At_Drought_P Parameter: Organism Value: A. thaliana
  misc_feature: MA Experiment 20000267 PARAMETER Experiment Name: At_Drought_P Parameter: Plant Line Value: WS
  misc_feature: MA Experiment 20000267 PARAMETER Experiment Name: At_Drought_P Parameter: Timepoint (hr) Value: 6
  misc_feature: MA Experiment 20000267 PARAMETER Experiment Name: At_Drought_P Parameter: Tissue Value: Whole Plant
  misc_feature: MA Experiment 20000267 PARAMETER Experiment Name: At_Drought_P Parameter: Treatment Value: Drought vs. No Drought
  misc_feature: MA Experiment ID: 20000286 Result: Down-regulated in Transcription
  misc_feature: MA Experiment 20000286 PARAMETER Experiment Name: At_Open_Flower_P Parameter: Age (day) Value: 21
  misc_feature: MA Experiment 20000286 PARAMETER Experiment Name: At_Open_Flower_P Parameter: Plant Line Value: WS
  misc_feature: MA Experiment 20000286 PARAMETER Experiment Name: At_Open_Flower_P Parameter: Tissue Value: Half Open vs. Whole Plant
  misc_feature: MA Experiment ID: 20000436 Result: Up-regulated in Transcription
  misc_feature: MA Experiment 20000436 PARAMETER Experiment Name: At_Drought_P Parameter: Age (day) Value: 7
  misc_feature: MA Experiment 20000436 PARAMETER Experiment Name: At_Drought_P Parameter: Organism Value: A. thaliana
  misc_feature: MA Experiment 20000436 PARAMETER Experiment Name: At_Drought_P Parameter: Plant Line Value: WS
  misc_feature: MA Experiment 20000436 PARAMETER Experiment Name: At_Drought_P Parameter: Timepoint (hr) Value: 12
  misc_feature: MA Experiment 20000436 PARAMETER Experiment Name: At_Drought_P Parameter: Tissue Value: Whole Plant
  misc_feature: MA Experiment 20000436 PARAMETER Experiment Name: At_Drought_P Parameter: Treatment Value: Drought vs. No Drought
  misc_feature: MA Experiment ID: 20000437 Result: Up-regulated in Transcription
  misc_feature: MA Experiment 20000437 PARAMETER Experiment Name: At_Drought_P Parameter: Age (day) Value: 8
  misc_feature: MA Experiment 20000437 PARAMETER Experiment Name: At_Drought_P Parameter: Organism Value: A. thaliana
  misc_feature: MA Experiment 20000437 PARAMETER Experiment Name: At_Drought_P Parameter: Plant Line Value: WS
  misc_feature: MA Experiment 20000437 PARAMETER Experiment Name: At_Drought_P Parameter: Timepoint (hr) Value: 24
  misc_feature: MA Experiment 20000437 PARAMETER Experiment Name: At_Drought_P Parameter: Tissue Value: Whole Plant
  misc_feature: MA Experiment 20000437 PARAMETER Experiment Name: At_Drought_P Parameter: Treatment Value: Drought vs. No Drought
  misc_feature: MA Experiment ID: 20000439 Result: Down-regulated in Transcription
  misc_feature: MA Experiment 20000439 PARAMETER Experiment Name: At_Roots__P Parameter: Age (day) Value: 14 vs. 21
  misc_feature: MA Experiment 20000439 PARAMETER Experiment Name: At_Roots__P Parameter: Organism Value: A. thaliana
  misc_feature: MA Experiment 20000439 PARAMETER Experiment Name: At_Roots__P Parameter: Tissue Value: Roots vs. Whole Plant
  misc_feature: MA Experiment ID: 20000573 Result: Down-regulated in Transcription
  misc_feature: MA Experiment 20000573 PARAMETER Experiment Name: At_100uM_ABA_Mutants__P Parameter: Organism Value: A. thaliana
  misc_feature: MA Experiment 20000573 PARAMETER Experiment Name: At_100uM_ABA_Mutants__P Parameter: Plant Line Value: CS22 vs. Ler wt
  misc_feature: MA Experiment 20000573 PARAMETER Experiment Name: At_100uM_ABA_Mutants__P Parameter: Timepoint (hr) Value: N/A
  misc_feature: MA Experiment 20000573 PARAMETER Experiment Name: At_100uM_ABA_Mutants__P Parameter: Tissue Value: Whole Plant
  misc_feature: MA Experiment 20000573 PARAMETER Experiment Name: At_100uM_ABA_Mutants__P Parameter: Treatment Value: None
  misc_feature: MA Experiment ID: 20000794 Result: Down-regulated in Transcription
  misc_feature: MA Experiment 20000794 PARAMETER Experiment Name: At_Petals_P Parameter: Age (day) Value: 23-25 days
  misc_feature: MA Experiment 20000794 PARAMETER Experiment Name: At_Petals_P Parameter: Plant Line Value: WS
  misc_feature: MA Experiment 20000794 PARAMETER Experiment Name: At_Petals_P Parameter: Tissue Value: Petals vs. Whole plant
  misc_feature: MA Experiment ID: 20001248 Result: Down-regulated in Transcription
  misc_feature: MA Experiment 20001248 PARAMETER Experiment Name: At_Far-red-induction_P Parameter: Age (day) Value: 7
  misc_feature: MA Experiment 20001248 PARAMETER Experiment Name: At_Far-red-induction_P Parameter: Light Value: Far-red vs. White
  misc_feature: MA Experiment 20001248 PARAMETER Experiment Name: At_Far-red-induction_P Parameter: Organism Value: A. thaliana
  misc_feature: MA Experiment 20001248 PARAMETER Experiment Name: At_Far-red-induction_P Parameter: Plant Line Value: Columbia
  misc_feature: MA Experiment 20001248 PARAMETER Experiment Name: At_Far-red-induction_P Parameter: Timepoint (hr) Value: 4
  misc_feature: MA Experiment 20001248 PARAMETER Experiment Name: At_Far-red-induction_P Parameter: Tissue Value: Whole Plant
  misc_feature: MA Experiment ID: 20001450 Result: Down-regulated in Transcription
  misc_feature: MA Experiment 20001450 PARAMETER Experiment Name: At_Far-red-induction_P Parameter: Age (day) Value: 7
  misc_feature: MA Experiment 20001450 PARAMETER Experiment Name: At_Far-red-induction_P Parameter: Light Value: Far-red vs. White
  misc_feature: MA Experiment 20001450 PARAMETER Experiment Name: At_Far-red-induction_P Parameter: Organism Value: A. thaliana
  misc_feature: MA Experiment 20001450 PARAMETER Experiment Name: At_Far-red-induction_P Parameter: Plant Line Value: Columbia
  misc_feature: MA Experiment 20001450 PARAMETER Experiment Name: At_Far-red-induction_P Parameter: Timepoint (hr) Value: 8
  misc_feature: MA Experiment 20001450 PARAMETER Experiment Name: At_Far-red-induction_P Parameter: Tissue Value: Whole Plant
atggagcacaacaaggttgatacagaacctcaagattcatatgatgatcaacaaaaatgggttctcgattcttcgaccgatagtagaggagagattccgcttcgggctcaaaccggagcttggagagctgcactcttcatcattggtatcgaattcagcgagaggctaagttactttgggatctccacgaacttagtggtctacttgactaccattcttcaccaagatctcaagatggctgtaaaaaatacgaactactggtctggtgtcactactttgatgcctcttcttggaggcttcgtcgcagatgcttatctcggccgttatggaactgtcctacttgcaaccaccatttaccttatgggcttgattctgttaacattgtcttggtttataccgggattgaaagcatgtcatgaagacatgtgtgttgagccaaggaaagcccacgagatagccttcttcattgcaatctacttgatctccataggcactggaggtcataagccatcccttgagagctttggagctgaccaattcgaagatggccatccggaagaacgaaaaatgaaaatgtcttactttaactggtggaatgctggtctatgcgctggtattttaaccgcggtgactgtaattgtctatatcgaagaccggattggttggggtgtggctagcatcatactcacaatagttatggctacttcgttttttatcttccgtatcggcaaaccgttttaccgttatagagcaccttctggtagcccattgaccccaatgttgcaagtctttgtcgccgccattgccaaaagaaatcttccttgtcccagtgattcttctcttcttcatgagttaactaatgaagagtatactaaaggccggcttctttccagctcaaagaatcttaaatttctagacaaagcagcagttattgaggaccgaaacgagaacactaaagccgagaagcagagtccatggcgactcgcaacggttacgaaagtggaagaagttaagctactcatcaacatgattccaatctggttctttacattagcctttggagtatgcgccactcaaagctcaacactctttatcaaacaagccataataatggaccgacacatcacagggacaagcttcatagttcctccagcttcattgttctctctcatagctctctccataatcatcaccgtaacaatctacgagaaactcctcgttcctcttttgagacgtgccacaggaaacgaaagaggcattagcattctacaaagaatcggggtcggtatggttttctccttattcgctatgatcattgctgctctgattgagaagaaaagattagattatgctaaggaacaccacatgaataagaccatgaccttgagtgctatatggttagctcctcaattcctagtcttaggagttgcggatgcttttacccttgtcggtcttcaagaatatttctacgaccaagtcccagattctatgagaagcttaggcatagcgttttacctcagcgtgcttggagcggctagctttgtcaacaatcttttgataacggttagtgatcatttagccgaggaaatttccgggaagggctggtttgggaaagaccttaatagcagccgcttggaccgcttttactggatgctagccgccttgaccgctgcaaatatatgctgctttgtgatcgtggccatgagatacacttacaagactgtgcagccgagtctggctgttgttgctgacggcggtgatgacgttgagacagccacggggacgaataacacgtccaagtttacggctggttcgggaaagaccttaatagcagctgcatggaccgcttttactggatgctag

SEQ ID NO: 71226 - protein, 620 aa, Arabidopsis thaliana
  peptide (1)..(620): Ceres Seq. ID no. 3083112
  misc_feature (109)..(509): Pfam Name: POT family Pfam Description: POT family
  misc_feature (1)..(578): Homolog of NCBI NO: 15224397 NR Description: putative peptide/amino acid transporter; protein At2g37900.1 [Arabidopsis thaliana] >gi|25408574|pir||E84798
  misc_feature (18)..(592): Homolog of NCBI NO: 34897398 NR Description: putative peptide transport protein [Oryza sativa
  misc_feature (296)..(602): Homolog of NCBI NO: 13605523 NR Description: AT3g53960/F5K20_260 [Arabidopsis thaliana]
  misc_feature (15)..(573): Homolog of NCBI NO: 15232435 NR Description: peptide transport - like protein; protein id: supported by cDNA: 117581., supported by cDNA: gi_13430485,
  misc_feature (15)..(588): Homolog of NCBI NO: 37535270 NR Description: putative peptide transport protein [Oryza sativa
  misc_feature (15)..(573): Homolog of NCBI NO: 15240905 NR Description: oligopeptide transporter - like protein; protein At5g01180.1 [Arabidopsis thaliana] >gi|11358593|pir||T45958
  misc_feature (10)..(573): Homolog of NCBI NO: 15076661 NR Description: peptide transporter [Oryza sativa (japonica >gi|15076663|dbj|BAB62327.1| peptide transporter [Oryza sativa
  misc_feature (23)..(573): Homolog of NCBI NO: 4102839 NR Description: LeOPT1 [Lycopersicon esculentum]
  misc_feature (15)..(586): Homolog of NCBI NO: 37535262 NR Description: putative peptide transport protein [Oryza sativa
  misc_feature (23)..(573): Homolog of NCBI NO: 30696666 NR Description: oligopeptide transporter -related [Arabidopsis >gi|16604436|gb|AAL24224.1| At1g62200/F19K23_13 [Arabidopsis
MEHNKVDTEPQDSYDDQQKWVLDSSTDSRGEIPLRAQTGAWRAALFIIGIEFSERLSYFGISTNLVVYLTTILHQDLKMAVKNTNYWSGVTTLMPLLGGFVADAYLGRYGTVLLATTIYLMGLILLTLSWFIPGLKACHEDMCVEPRKAHEIAFFIAIYLISIGTGGHKPSLESFGADQFEDGHPEERKMKMSYFNWWNAGLCAGILTAVTVIVYIEDRIGWGVASIILTIVMATSFFIFRIGKPFYRYRAPSGSPLTPMLQVFVAAIAKRNLPCPSDSSLLHELTNEEYTKGRLLSSSKNLKFLDKAAVIEDRNENTKAEKQSPWRLATVTKVEEVKLLINMIPIWFFTLAFGVCATQSSTLFIKQAIIMDRHITGTSFIVPPASLFSLIALSIIITVTIYEKLLVPLLRRATGNERGISILQRIGVGMVFSLFAMIIAALIEKKRLDYAKEHHMNKTMTLSAIWLAPQFLVLGVADAFTLVGLQEYFYDQVPDSMRSLGIAFYLSVLGAASFVNNLLITVSDHLAEEISGKGWFGKDLNSSRLDRFYWMLAALTAANICCFVIVAMRYTYKTVQPSLAVVADGGDDVETATGTNNTSKFTAGSGKTLIAAAWTAFTGC

SEQ ID NO: 71227 - protein, 542 aa, Arabidopsis thaliana
  peptide (1)..(542): Ceres Seq. ID no. 3083113
  misc_feature (31)..(431): Pfam Name: POT family Pfam Description: POT family
  misc_feature (1)..(495): Homolog of NCBI NO: 15076661 NR Description: peptide transporter [Oryza sativa (japonica >gi|15076663|dbj|BAB62327.1| peptide transporter [Oryza sativa
  misc_feature (1)..(495): Homolog of NCBI NO: 4102839 NR Description: LeOPT1 [Lycopersicon esculentum]
  misc_feature (1)..(500): Homolog of NCBI NO: 15224397 NR Description: putative peptide/amino acid transporter; protein At2g37900.1 [Arabidopsis thaliana] >gi|25408574|pir||E84798
  misc_feature (218)..(524): Homolog of NCBI NO: 13605523 NR Description: AT3g53960/F5K20_260 [Arabidopsis thaliana]
  misc_feature (1)..(510): Homolog of NCBI NO: 37535270 NR Description: putative peptide transport protein [Oryza sativa
  misc_feature (1)..(495): Homolog of NCBI NO: 15240905 NR Description: oligopeptide transporter - like protein; protein At5g01180.1 [Arabidopsis thaliana] >gi|11358593|pir||T45958
  misc_feature (1)..(495): Homolog of NCBI NO: 15232435 NR Description: peptide transport - like protein; protein id: supported by cDNA: 117581., supported by cDNA: gi_13430485,
  misc_feature (1)..(514): Homolog of NCBI NO: 34897398 NR Description: putative peptide transport protein [Oryza sativa
  misc_feature (1)..(508): Homolog of NCBI NO: 37535262 NR Description: putative peptide transport protein [Oryza sativa
  misc_feature (1)..(495): Homolog of NCBI NO: 30696666 NR Description: oligopeptide transporter -related [Arabidopsis >gi|16604436|gb|AAL24224.1| At1g62200/F19K23_13 [Arabidopsis
MAVKNTNYWSGVTTLMPLLGGFVADAYLGRYGTVLLATTIYLMGLILLTLSWFIPGLKACHEDMCVEPRKAHEIAFFIAIYLISIGTGGHKPSLESFGADQFEDGHPEERKMKMSYFNWWNAGLCAGILTAVTVIVYIEDRIGWGVASIILTIVMATSFFIFRIGKPFYRYRAPSGSPLTPMLQVFVAAIAKRNLPCPSDSSLLHELTNEEYTKGRLLSSSKNLKFLDKAAVIEDRNENTKAEKQSPWRLATVTKVEEVKLLINMIPIWFFTLAFGVCATQSSTLFIKQAIIMDRHITGTSFIVPPASLFSLIALSIIITVTIYEKLLVPLLRRATGNERGISILQRIGVGMVFSLFAMIIAALIEKKRLDYAKEHHMNKTMTLSAIWLAPQFLVLGVADAFTLVGLQEYFYDQVPDSMRSLGIAFYLSVLGAASFVNNLLITVSDHLAEEISGKGWFGKDLNSSRLDRFYWMLAALTAANICCFVIVAMRYTYKTVQPSLAVVADGGDDVETATGTNNTSKFTAGSGKTLIAAAWTAFTGC

SEQ ID NO: 71228 - protein, 527 aa, Arabidopsis thaliana
  peptide (1)..(527): Ceres Seq. ID no. 3083114
  misc_feature (16)..(416): Pfam Name: POT family Pfam Description: POT family
  misc_feature (1)..(485): Homolog of NCBI NO: 15224397 NR Description: putative peptide/amino acid transporter; protein At2g37900.1 [Arabidopsis thaliana] >gi|25408574|pir||E84798
  misc_feature (1)..(499): Homolog of NCBI NO: 34897398 NR Description: putative peptide transport protein [Oryza sativa
  misc_feature (203)..(509): Homolog of NCBI NO: 13605523 NR Description: AT3g53960/F5K20_260 [Arabidopsis thaliana]
  misc_feature (1)..(480): Homolog of NCBI NO: 15232435 NR Description: peptide transport - like protein; protein id: supported by cDNA: 117581., supported by cDNA: gi_13430485,
  misc_feature (1)..(495): Homolog of NCBI NO: 37535270 NR Description: putative peptide transport protein [Oryza sativa
  misc_feature (1)..(480): Homolog of NCBI NO: 15240905 NR Description: oligopeptide transporter - like protein; protein At5g01180.1 [Arabidopsis thaliana] >gi|11358593|pir||T45958
  misc_feature (1)..(480): Homolog of NCBI NO: 15076661 NR Description: peptide transporter [Oryza sativa (japonica >gi|15076663|dbj|BAB62327.1| peptide transporter [Oryza sativa
  misc_feature (1)..(480): Homolog of NCBI NO: 4102839 NR Description: LeOPT1 [Lycopersicon esculentum]
  misc_feature (1)..(493): Homolog of NCBI NO: 37535262 NR Description: putative peptide transport protein [Oryza sativa
  misc_feature (1)..(480): Homolog of NCBI NO: 30696666 NR Description: oligopeptide transporter -related [Arabidopsis >gi|16604436|gb|AAL24224.1| At1g62200/F19K23_13 [Arabidopsis
MPLLGGFVADAYLGRYGTVLLATTIYLMGLILLTLSWFIPGLKACHEDMCVEPRKAHEIAFFIAIYLISIGTGGHKPSLESFGADQFEDGHPEERKMKMSYFNWWNAGLCAGILTAVTVIVYIEDRIGWGVASIILTIVMATSFFIFRIGKPFYRYRAPSGSPLTPMLQVFVAAIAKRNLPCPSDSSLLHELTNEEYTKGRLLSSSKNLKFLDKAAVIEDRNENTKAEKQSPWRLATVTKVEEVKLLINMIPIWFFTLAFGVCATQSSTLFIKQAIIMDRHITGTSFIVPPASLFSLIALSIIITVTIYEKLLVPLLRRATGNERGISILQRIGVGMVFSLFAMIIAALIEKKRLDYAKEHHMNKTMTLSAIWLAPQFLVLGVADAFTLVGLQEYFYDQVPDSMRSLGIAFYLSVLGAASFVNNLLITVSDHLAEEISGKGWFGKDLNSSRLDRFYWMLAALTAANICCFVIVAMRYTYKTVQPSLAVVADGGDDVETATGTNNTSKFTAGSGKTLIAAAWTAFTGC

SEQ ID NO: 71229 - DNA, 1185 bp, Arabidopsis thaliana
  misc_feature (1)..(1185): Ceres Seq. ID no. 3083154
  misc_feature: MA Experiment ID: 20000166 Result: Up-regulated in Transcription
  misc_feature: MA Experiment 20000166 PARAMETER Experiment Name: At_100uM_ABA_P Parameter: Age (day) Value: 14
  misc_feature: MA Experiment 20000166 PARAMETER Experiment Name: At_100uM_ABA_P Parameter: Organism Value: A. thaliana
  misc_feature: MA Experiment 20000166 PARAMETER Experiment Name: At_100uM_ABA_P Parameter: Plant Line Value: WS
  misc_feature: MA Experiment 20000166 PARAMETER Experiment Name: At_100uM_ABA_P Parameter: Timepoint (hr) Value: 1
  misc_feature: MA Experiment 20000166 PARAMETER Experiment Name: At_100uM_ABA_P Parameter: Tissue Value: Aerial
  misc_feature: MA Experiment 20000166 PARAMETER Experiment Name: At_100uM_ABA_P Parameter: Treatment Value: 100uM ABA vs. No Treatment
  misc_feature: MA Experiment ID: 20000173 Result: Down-regulated in Transcription
  misc_feature: MA Experiment 20000173 PARAMETER Experiment Name: At_42deg_Heat_P Parameter: Age (day) Value: 14
  misc_feature: MA Experiment 20000173 PARAMETER Experiment Name: At_42deg_Heat_P Parameter: Organism Value: A. thaliana
  misc_feature: MA Experiment 20000173 PARAMETER Experiment Name: At_42deg_Heat_P Parameter: Plant Line Value: WS
  misc_feature: MA Experiment 20000173 PARAMETER Experiment Name: At_42deg_Heat_P Parameter: Temperature (deg C) Value: 42 vs. 22
  misc_feature: MA Experiment 20000173 PARAMETER Experiment Name: At_42deg_Heat_P Parameter: Timepoint (hr) Value: 6
  misc_feature: MA Experiment 20000173 PARAMETER Experiment Name: At_42deg_Heat_P Parameter: Tissue Value: Aerial
  misc_feature: MA Experiment ID: 20000182 Result: Up-regulated in Transcription
  misc_feature: MA Experiment 20000182 PARAMETER Experiment Name: At_2mM_SA_P Parameter: Age (day) Value: 14
  misc_feature: MA Experiment 20000182 PARAMETER Experiment Name: At_2mM_SA_P Parameter: Organism Value: A. thaliana
  misc_feature: MA Experiment 20000182 PARAMETER Experiment Name: At_2mM_SA_P Parameter: Plant Line Value: WS
  misc_feature: MA Experiment 20000182 PARAMETER Experiment Name: At_2mM_SA_P Parameter: Timepoint (hr) Value: 6
  misc_feature: MA Experiment 20000182 PARAMETER Experiment Name: At_2mM_SA_P Parameter: Tissue Value: Aerial
  misc_feature: MA Experiment 20000182 PARAMETER Experiment Name: At_2mM_SA_P Parameter: Treatment Value: 2mM SA vs. No Treatment
  misc_feature: MA Experiment ID: 20000234 Result: Down-regulated in Transcription
  misc_feature: MA Experiment 20000234 PARAMETER Experiment Name: At_Siliques_P Parameter: Age (day) Value: 21
  misc_feature: MA Experiment 20000234 PARAMETER Experiment Name: At_Siliques_P Parameter: Organism Value: A. thaliana
  misc_feature: MA Experiment 20000234 PARAMETER Experiment Name: At_Siliques_P Parameter: Plant Line Value: WS
  misc_feature: MA Experiment 20000234 PARAMETER Experiment Name: At_Siliques_P Parameter: Tissue Value: Less Than 5mm Siliques vs. Whole Plant
  misc_feature: MA Experiment ID: 20000235 Result: Down-regulated in Transcription
  misc_feature: MA Experiment 20000235 PARAMETER Experiment Name: At_Siliques_P Parameter: Age (day) Value: 21
  misc_feature: MA Experiment 20000235 PARAMETER Experiment Name: At_Siliques_P Parameter: Organism Value: A. thaliana
  misc_feature: MA Experiment 20000235 PARAMETER Experiment Name: At_Siliques_P Parameter: Plant Line Value: WS
  misc_feature: MA Experiment 20000235 PARAMETER Experiment Name: At_Siliques_P Parameter: Tissue Value: 5-10mm Siliques vs. Whole Plant
  misc_feature: MA Experiment ID: 20001560 Result: Down-regulated in Transcription
  misc_feature: MA Experiment 20001560 PARAMETER Experiment Name: At_Drought_Soil_Dry_P Parameter: Age (day) Value: 28
  misc_feature: MA Experiment 20001560 PARAMETER Experiment Name: At_Drought_Soil_Dry_P Parameter: Organism Value: A. thaliana
  misc_feature: MA Experiment 20001560 PARAMETER Experiment Name: At_Drought_Soil_Dry_P Parameter: Plant Line Value: WS
  misc_feature: MA Experiment 20001560 PARAMETER Experiment Name: At_Drought_Soil_Dry_P Parameter: Post Timepoint (hr) Value: None
  misc_feature: MA Experiment 20001560 PARAMETER Experiment Name: At_Drought_Soil_Dry_P Parameter: Post-Treatment Value: None
  misc_feature: MA Experiment 20001560 PARAMETER Experiment Name: At_Drought_Soil_Dry_P Parameter: Timepoint (day) Value: 14
  misc_feature: MA Experiment 20001560 PARAMETER Experiment Name: At_Drought_Soil_Dry_P Parameter: Treatment Value: Drought vs. No Drought
  misc_feature: Pfam Name: Rhomboid Pfam Description: Rhomboid family
atgggtgagaaagattcagaaacagctccgatttgggggaaaactcgagagagagagaggagcaacaacaacaatatacagccaatggatttagagtcgtcctcttctgtatctgggcaacaacgatcgttgactcagagtcgaagttcttatgaagaacgaggtagaggagttaaagagtttcggagttggtttccttggctcattccttgtttcgttgttgctaacgttgccgtcttcgtgatcaccatgtatgtcaacaattgtcctaagaaatctggagattgttttgctgatttcttgggtcgtttctcgtttcagaacaccagagaaaatcctcttctgggtccttcctctctcacgttacaaacaatgggtggattagatgttaaaaaagtggttaaaggagatgaaggatggcgtctactttcttgcaattggttacatggaggagttgttcatttactgatgaacatgttgactcttttattcatcggtatacgtatggaacgtgaatttggttttattcggattggattgctttatttgatatcagggtttggaggaagcatattgtcagctcttttcctccgttcaaacatctctgttggagcatctggtgccgtgtttggtttacttggaggaatgctctctgagatctttatcaactggacaatctattctaacaaggttgtgacgattgtaactcttgtattgattgtggcggtgaacttggggctcggtgtgctccctggagtagataactttgctcatatcggagggtttgctacaggttttcttcttggatttgtgctcttaatccgtccccattacggatggatcaaccaaagaaacggtcctggagctaaaccccacaggttcaagatatatcagggcatattatggactatctctcttctcatcttggtcgctgggttcattgttggattgatctctctcttcaacaatgtcgatggaaacgaacattgttcgtggtgtcattatctttcatgtgttccaacatctaaatggagctgtaaccgagaaccagcctcttgcacgacgactcaattaggtaaccaattgagcatgacttgtttgaggaatgggaaatcagcatcttacattttggcaaatccctcggattcacggattaatagcttatgtgttcagctttgccgttga

SEQ ID NO: 71230 - protein, 394 aa, Arabidopsis thaliana
  peptide (1)..(394): Ceres Seq. ID no. 3083155
  misc_feature: Pfam Name: Rhomboid Pfam Description: Rhomboid family
  misc_feature (1)..(394): Homolog of NCBI NO: 30693911 NR Description: membrane protein, Rhomboid family [Arabidopsis
  misc_feature (29)..(394): Homolog of NCBI NO: 11357824 NR Description: hypothetical protein F5K20.80 - Arabidopsis >gi|7629998|emb|CAB88340.1| putative protein [Arabidopsis
  misc_feature (125)..(394): Homolog of NCBI NO: 18409916 NR Description: putative protein; protein id: At3g53780.1
  misc_feature (60)..(347): Homolog of NCBI NO: 294845 NR Description: membrane protein [Saccharum hybrid cultivar
  misc_feature (64)..(346): Homolog of NCBI NO: 15221690 NR Description: membrane protein, putative; protein id: [Arabidopsis thaliana] >gi|25404407|pir||F96656 probable membrane
  misc_feature (49)..(347): Homolog of NCBI NO: 15240744 NR Description: membrane protein; protein id: At5g07250.1, by cDNA: gi_16648761, supported by cDNA: gi_20466142 [Arabidopsis
  misc_feature (67)..(348): Homolog of NCBI NO: 38344377 NR Description: OSJNBb0032E06.11 [Oryza sativa (japonica
  misc_feature (48)..(346): Homolog of NCBI NO: 15222058 NR Description: membrane protein, putative; protein id: supported by cDNA: gi_17529033 [Arabidopsis thaliana] putative membrane protein [Arabidopsis thaliana]
  misc_feature (53)..(346): Homolog of NCBI NO: 25402744 NR Description: protein T12C24.28 [imported] - Arabidopsis >gi|9502383|gb|AAF88090.1|AC025417_18 T12C24.28 [Arabidopsis
  misc_feature (101)..(302): Homolog of NCBI NO: 34895778 NR Description: putative membrane protein [Oryza sativa (japonica group)] >gi|12328478|dbj|BAB21138.1| putative membrane protein
MGEKDSETAPIWGKTRERERSNNNNIQPMDLESSSSVSGQQRSLTQSRSSYEERGRGVKEFRSWFPWLIPCFVVANVAVFVITMYVNNCPKKSGDCFADFLGRFSFQNTRENPLLGPSSLTLQTMGGLDVKKVVKGDEGWRLLSCNWLHGGVVHLLMNMLTLLFIGIRMEREFGFIRIGLLYLISGFGGSILSALFLRSNISVGASGAVFGLLGGMLSEIFINWTIYSNKVVTIVTLVLIVAVNLGLGVLPGVDNFAHIGGFATGFLLGFVLLIRPHYGWINQRNGPGAKPHRFKIYQGILWTISLLILVAGFIVGLISLFNNVDGNEHCSWCHYLSCVPTSKWSCNREPASCTTTQLGNQLSMTCLRNGKSASYILANPSDSRINSLCVQLCR

SEQ ID NO: 71231 - protein, 366 aa, Arabidopsis thaliana
  peptide (1)..(366): Ceres Seq. ID no. 3083156
  misc_feature: Pfam Name: Rhomboid Pfam Description: Rhomboid family
  misc_feature (1)..(366): Homolog of NCBI NO: 30693911 NR Description: membrane protein, Rhomboid family [Arabidopsis
  misc_feature (1)..(366): Homolog of NCBI NO: 11357824 NR Description: hypothetical protein F5K20.80 - Arabidopsis >gi|7629998|emb|CAB88340.1| putative protein [Arabidopsis
  misc_feature (97)..(366): Homolog of NCBI NO: 18409916 NR Description: putative protein; protein id: At3g53780.1
  misc_feature (32)..(319): Homolog of NCBI NO: 294845 NR Description: membrane protein [Saccharum hybrid cultivar
  misc_feature (36)..(318): Homolog of NCBI NO: 15221690 NR Description: membrane protein, putative; protein id: [Arabidopsis thaliana] >gi|25404407|pir||F96656 probable membrane
  misc_feature (21)..(319): Homolog of NCBI NO: 15240744 NR Description: membrane protein; protein id: At5g07250.1, by cDNA: gi_16648761, supported by cDNA: gi_20466142 [Arabidopsis
  misc_feature (39)..(320): Homolog of NCBI NO: 38344377 NR Description: OSJNBb0032E06.11 [Oryza sativa (japonica
  misc_feature (20)..(318): Homolog of NCBI NO: 15222058 NR Description: membrane protein, putative; protein id: supported by cDNA: gi_17529033 [Arabidopsis thaliana] putative membrane protein [Arabidopsis thaliana]
  misc_feature (25)..(318): Homolog of NCBI NO: 25402744 NR Description: protein T12C24.28 [imported] - Arabidopsis >gi|9502383|gb|AAF88090.1|AC025417_18 T12C24.28 [Arabidopsis
  misc_feature (73)..(274): Homolog of NCBI NO: 34895778 NR Description: putative membrane protein [Oryza sativa (japonica group)] >gi|12328478|dbj|BAB21138.1| putative membrane protein
MDLESSSSVSGQQRSLTQSRSSYEERGRGVKEFRSWFPWLIPCFVVANVAVFVITMYVNNCPKKSGDCFADFLGRFSFQNTRENPLLGPSSLTLQTMGGLDVKKVVKGDEGWRLLSCNWLHGGVVHLLMNMLTLLFIGIRMEREFGFIRIGLLYLISGFGGSILSALFLRSNISVGASGAVFGLLGGMLSEIFINWTIYSNKVVTIVTLVLIVAVNLGLGVLPGVDNFAHIGGFATGFLLGFVLLIRPHYGWINQRNGPGAKPHRFKIYQGILWTISLLILVAGFIVGLISLFNNVDGNEHCSWCHYLSCVPTSKWSCNREPASCTTTQLGNQLSMTCLRNGKSASYILANPSDSRINSLCVQLCR

SEQ ID NO: 71232 - protein, 311 aa, Arabidopsis thaliana
  peptide (1)..(311): Ceres Seq. ID no. 3083157
  misc_feature: Pfam Name: Rhomboid Pfam Description: Rhomboid family
  misc_feature (1)..(311): Homolog of NCBI NO: 30693911 NR Description: membrane protein, Rhomboid family [Arabidopsis
  misc_feature (1)..(311): Homolog of NCBI NO: 11357824 NR Description: hypothetical protein F5K20.80 - Arabidopsis >gi|7629998|emb|CAB88340.1| putative protein [Arabidopsis
  misc_feature (42)..(311): Homolog of NCBI NO: 18409916 NR Description: putative protein; protein id: At3g53780.1
  misc_feature (1)..(264): Homolog of NCBI NO: 294845 NR Description: membrane protein [Saccharum hybrid cultivar
  misc_feature (1)..(263): Homolog of NCBI NO: 15221690 NR Description: membrane protein, putative; protein id: [Arabidopsis thaliana] >gi|25404407|pir||F96656 probable membrane
  misc_feature (1)..(264): Homolog of NCBI NO: 15240744 NR Description: membrane protein; protein id: At5g07250.1, by cDNA: gi_16648761, supported by cDNA: gi_20466142 [Arabidopsis
  misc_feature (1)..(265): Homolog of NCBI NO: 38344377 NR Description: OSJNBb0032E06.11 [Oryza sativa (japonica
  misc_feature (1)..(263): Homolog of NCBI NO: 15222058 NR Description: membrane protein, putative; protein id: supported by cDNA: gi_17529033 [Arabidopsis thaliana] putative membrane protein [Arabidopsis thaliana]
  misc_feature (1)..(263): Homolog of NCBI NO: 25402744 NR Description: protein T12C24.28 [imported] - Arabidopsis >gi|9502383|gb|AAF88090.1|AC025417_18 T12C24.28 [Arabidopsis
  misc_feature (18)..(219): Homolog of NCBI NO: 34895778 NR Description: putative membrane protein [Oryza sativa (japonica group)] >gi|12328478|dbj|BAB21138.1| putative membrane protein
MYVNNCPKKSGDCFADFLGRFSFQNTRENPLLGPSSLTLQTMGGLDVKKVVKGDEGWRLLSCNWLHGGVVHLLMNMLTLLFIGIRMEREFGFIRIGLLYLISGFGGSILSALFLRSNISVGASGAVFGLLGGMLSEIFINWTIYSNKVVTIVTLVLIVAVNLGLGVLPGVDNFAHIGGFATGFLLGFVLLIRPHYGWINQRNGPGAKPHRFKIYQGILWTISLLILVAGFIVGLISLFNNVDGNEHCSWCHYLSCVPTSKWSCNREPASCTTTQLGNQLSMTCLRNGKSASYILANPSDSRINSLCVQLCR

SEQ ID NO: 71233 - DNA, 2067 bp, Arabidopsis thaliana
  misc_feature (1)..(2067): Ceres Seq. ID no. 3083243
  misc_feature: MA Experiment ID: 20000234 Result: Down-regulated in Transcription
  misc_feature: MA Experiment 20000234 PARAMETER Experiment Name: At_Siliques_P Parameter: Age (day) Value: 21
  misc_feature: MA Experiment 20000234 PARAMETER Experiment Name: At_Siliques_P Parameter: Organism Value: A. thaliana
  misc_feature: MA Experiment 20000234 PARAMETER Experiment Name: At_Siliques_P Parameter: Plant Line Value: WS
  misc_feature: MA Experiment 20000234 PARAMETER Experiment Name: At_Siliques_P Parameter: Tissue Value: Less Than 5mm Siliques vs. Whole Plant
  misc_feature: MA Experiment ID: 20000235 Result: Down-regulated in Transcription
  misc_feature: MA Experiment 20000235 PARAMETER Experiment Name: At_Siliques_P Parameter: Age (day) Value: 21
  misc_feature: MA Experiment 20000235 PARAMETER Experiment Name: At_Siliques_P Parameter: Organism Value: A. thaliana
  misc_feature: MA Experiment 20000235 PARAMETER Experiment Name: At_Siliques_P Parameter: Plant Line Value: WS
  misc_feature: MA Experiment 20000235 PARAMETER Experiment Name: At_Siliques_P Parameter: Tissue Value: 5-10mm Siliques vs. Whole Plant
  misc_feature: MA Experiment ID: 20000264 Result: Down-regulated in Transcription
  misc_feature: MA Experiment 20000264 PARAMETER Experiment Name: At_Open_Flower_P Parameter: Age (day) Value: 21
  misc_feature: MA Experiment 20000264 PARAMETER Experiment Name: At_Open_Flower_P Parameter: Plant Line Value: WS
  misc_feature: MA Experiment 20000264 PARAMETER Experiment Name: At_Open_Flower_P Parameter: Tissue Value: Open Flower vs. Whole Plant
  misc_feature: MA Experiment ID: 20000286 Result: Down-regulated in Transcription
  misc_feature: MA Experiment 20000286 PARAMETER Experiment Name: At_Open_Flower_P Parameter: Age (day) Value: 21
  misc_feature: MA Experiment 20000286 PARAMETER Experiment Name: At_Open_Flower_P Parameter: Plant Line Value: WS
  misc_feature: MA Experiment 20000286 PARAMETER Experiment Name: At_Open_Flower_P Parameter: Tissue Value: Half Open vs. Whole Plant
  misc_feature: MA Experiment ID: 20000438 Result: Down-regulated in Transcription
  misc_feature: MA Experiment 20000438 PARAMETER Experiment Name: At_Shoots__P Parameter: Age (day) Value: 14
  misc_feature: MA Experiment 20000438 PARAMETER Experiment Name: At_Shoots__P Parameter: Tissue Value: Shoots vs. Whole Plant
  misc_feature: MA Experiment ID: 20001905 Result: Up-regulated in Transcription
  misc_feature: MA Experiment 20001905 PARAMETER Experiment Name: At_Drought_Reproduction_P Parameter: Age (day) Value: 40
  misc_feature: MA Experiment 20001905 PARAMETER Experiment Name: At_Drought_Reproduction_P Parameter: Organism Value: A. thaliana
  misc_feature: MA Experiment 20001905 PARAMETER Experiment Name: At_Drought_Reproduction_P Parameter: Plant Line Value: WS
  misc_feature: MA Experiment 20001905 PARAMETER Experiment Name: At_Drought_Reproduction_P Parameter: Timepoint (day) Value: 10
  misc_feature: MA Experiment 20001905 PARAMETER Experiment Name: At_Drought_Reproduction_P Parameter: Tissue Value: Rosettes
  misc_feature: MA Experiment 20001905 PARAMETER Experiment Name: At_Drought_Reproduction_P Parameter: Treatment Value: Drought vs. No Drought
  misc_feature: Pfam Name: Lectin_legB Pfam Description: Legume lectin domain
atgctcgtgctcttcttgcttttgaccatccctactcgagctcaaagaacaacaacggagactccaaaaacagagtttattttccgaggttttagcggaaaccaatcaaatattgtgacaacgggagctgcgacgatcaaactcgacggactattgaggctcactgaccgaaactcaaacgttaccggtacatctttctaccacaaacctgtgagattgctggagactaatacaagttccacaaactccacaatccgttcttttagcacttccttcgtatttgtcatcatccctacaagctctagcaacggaggttttggcttcaccttcacgctatctccaacccctgatcgtaccggagccgaatccgcacagtacttgggacttctcaacaaagcaaacgacgggaattcgacgaatcacgtttttgctgtggaattcgacacagtgcaaggttttaaagacggtgccgatagaacaggcaatcacatcggtctgaatttcaacagtttaacatctgatgtccaagaaccggtcgtgtattacgacaacgaagatcctaaccggaaagaggatttcccactacagagtggcgatccaatccgagcaattttggattacgatgggccaactcaaacgctaaacttaactgtctacccggctaacttgaagtctagacccgtaaggcctttgatctcgcgacctgttccaaagttgtcgcaaatcgtgcaagaagaaatgtatgttggattcacagcagctacagggagagatcagtcgagtgctcactacgtcatgggctggagtttttctagcggcggtgatcttctaactgaagatacgcttgacctcttggaacttcctcgtccgcctccgaacacggcgaagaagagaggttacaattctcaagtactcgctctgatcgtagctctatcgggagtaacagtgatcttgcttgcgttactcttctttttcgtgatgtacaagaaacgattgcaacaaggagaggttcttgaagactgggaaatcaatcatcctcatagacttagatataaagatctctacgctgctacggatggattcaaggagaataggattgtcggaactggaggatttggaaccgttttccgaggaaacttatcgtcaccttcgtctgatcaaatcgccgtgaagaagataactccgaatagtatgcaaggtgttcgagaattcatcgcagagatcgagagtttggggagattaaggcataagaatctggtcaaccttcaaggatggtgcaagcaaaaaaacgatctcttgttaatttatgattatatccctaacggaagcttagactcgctgctctacagtagaccaagacagagcggtgttgttttgtcgtggaacgcacgttttaagattgctaaaggaatcgcgtctggtttgttgtatctccatgaagaatgggaaaaggttgtgattcacagagacataaaacctagcaacgttttgattgaggacgatatgaatcctaggttgggagattttggactcgcgaggctttacgaacgcggatcgcaatcgaacacgaccgtagtcgtgggcacaattgggtacatggcaccagagctagcacgcaacggcaaatcttcgtctgcgtctgatgtttttgcgtttggcgttttgttattagagatagtctccgggagaagaccgactgactcagggacattcttcttggccgattgggttatggaattgcacgcgagaggagagattctccatgcggtggatccgagacttggatttggttacgacggcgttgaggcacggcttgctcttgttgtgggattgctctgttgccatcaaagaccgacgtctcggccgtccatgagaacggtgcttaggtatttgaacggagatgatgatgtacctgaaattgataacgattggggatactcggattcttcaagaagcgatttaggatccaactttgaaggatatgtttcatcggatagggcttcgagctcagtcccatctttctccgttacaagggtttcttctagttctgttatcagtggtagatag

SEQ ID NO: 71234 - protein, 688 aa, Arabidopsis thaliana
  peptide (1)..(688): Ceres Seq. ID no. 3083244
  misc_feature: Pfam Name: Lectin_legB Pfam Description: Legume lectin domain
  misc_feature (2)..(688): Homolog of NCBI NO: 11346438 NR Description: receptor like protein kinase - Arabidopsis >gi|7327815|emb|CAB82272.1| receptor like protein kinase
  misc_feature (2)..(688): Homolog of NCBI NO: 30679315 NR Description: receptor lectin kinase, putative [Arabidopsis
  misc_feature (4)..(686): Homolog of NCBI NO: 15241006 NR Description: receptor like protein kinase; protein id: supported by cDNA: gi_13605542 [Arabidopsis thaliana]
  misc_feature (3)..(688): Homolog of NCBI NO: 15231975 NR Description: putative serine/threonine protein kinase; protein At3g08870.1 [Arabidopsis thaliana]
  misc_feature (25)..(675): Homolog of NCBI NO: 37536406 NR Description: putative receptor-like protein kinase [Oryza
  misc_feature (3)..(640): Homolog of NCBI NO: 34899542 NR Description: putative receptor-type protein kinase LRK1 [Oryza
  misc_feature (3)..(688): Homolog of NCBI NO: 22093630 NR Description: contains ESTs
  misc_feature (25)..(640): Homolog of NCBI NO: 37534762 NR Description: putative serine/threonine-specific kinase like
  misc_feature (80)..(687): Homolog of NCBI NO: 15232332 NR Description: serine/threonine-specific kinase like protein;
  misc_feature (80)..(687): Homolog of NCBI NO: 28416699 NR Description: At3g53810 [Arabidopsis thaliana]
MLVLFLLLTIPTRAQRTTTETPKTEFIFRGFSGNQSNIVTTGAATIKLDGLLRLTDRNSNVTGTSFYHKPVRLLETNTSSTNSTIRSFSTSFVFVIIPTSSSNGGFGFTFTLSPTPDRTGAESAQYLGLLNKANDGNSTNHVFAVEFDTVQGFKDGADRTGNHIGLNFNSLTSDVQEPVVYYDNEDPNRKEDFPLQSGDPIRAILDYDGPTQTLNLTVYPANLKSRPVRPLISRPVPKLSQIVQEEMYVGFTAATGRDQSSAHYVMGWSFSSGGDLLTEDTLDLLELPRPPPNTAKKRGYNSQVLALIVALSGVTVILLALLFFFVMYKKRLQQGEVLEDWEINHPHRLRYKDLYAATDGFKENRIVGTGGFGTVFRGNLSSPSSDQIAVKKITPNSMQGVREFIAEIESLGRLRHKNLVNLQGWCKQKNDLLLIYDYIPNGSLDSLLYSRPRQSGVVLSWNARFKIAKGIASGLLYLHEEWEKVVIHRDIKPSNVLIEDDMNPRLGDFGLARLYERGSQSNTTVVVGTIGYMAPELARNGKSSSASDVFAFGVLLLEIVSGRRPTDSGTFFLADWVMELHARGEILHAVDPRLGFGYDGVEARLALVVGLLCCHQRPTSRPSMRTVLRYLNGDDDVPEIDNDWGYSDSSRSDLGSNFEGYVSSDRASSSVPSFSVTRVSSSSVISGR

SEQ ID NO: 71235 - protein, 442 aa, Arabidopsis thaliana
  peptide (1)..(442): Ceres Seq. ID no. 3083245
  misc_feature: Pfam Name: Lectin_legB Pfam Description: Legume lectin domain
  misc_feature (1)..(442): Homolog of NCBI NO: 11346438 NR Description: receptor like protein kinase - Arabidopsis >gi|7327815|emb|CAB82272.1| receptor like protein kinase
  misc_feature (1)..(442): Homolog of NCBI NO: 30679315 NR Description: receptor lectin kinase, putative [Arabidopsis
  misc_feature (1)..(440): Homolog of NCBI NO: 15241006 NR Description: receptor like protein kinase; protein id: supported by cDNA: gi_13605542 [Arabidopsis thaliana]
  misc_feature (1)..(442): Homolog of NCBI NO: 15231975 NR Description: putative serine/threonine protein kinase; protein At3g08870.1 [Arabidopsis thaliana]
  misc_feature (1)..(429): Homolog of NCBI NO: 37536406 NR Description: putative receptor-like protein kinase [Oryza
  misc_feature (1)..(394): Homolog of NCBI NO: 34899542 NR Description: putative receptor-type protein kinase LRK1 [Oryza
  misc_feature (1)..(442): Homolog of NCBI NO: 22093630 NR Description: contains ESTs
  misc_feature (1)..(394): Homolog of NCBI NO: 37534762 NR Description: putative serine/threonine-specific kinase like
  misc_feature (1)..(441): Homolog of NCBI NO: 15232332 NR Description: serine/threonine-specific kinase like protein;
  misc_feature (1)..(441): Homolog of NCBI NO: 28416699 NR Description: At3g53810 [Arabidopsis thaliana]
MYVGFTAATGRDQSSAHYVMGWSFSSGGDLLTEDTLDLLELPRPPPNTAKKRGYNSQVLALIVALSGVTVILLALLFFFVMYKKRLQQGEVLEDWEINHPHRLRYKDLYAATDGFKENRIVGTGGFGTVFRGNLSSPSSDQIAVKKITPNSMQGVREFIAEIESLGRLRHKNLVNLQGWCKQKNDLLLIYDYIPNGSLDSLLYSRPRQSGVVLSWNARFKIAKGIASGLLYLHEEWEKVVIHRDIKPSNVLIEDDMNPRLGDFGLARLYERGSQSNTTVVVGTIGYMAPELARNGKSSSASDVFAFGVLLLEIVSGRRPTDSGTFFLADWVMELHARGEILHAVDPRLGFGYDGVEARLALVVGLLCCHQRPTSRPSMRTVLRYLNGDDDVPEIDNDWGYSDSSRSDLGSNFEGYVSSDRASSSVPSFSVTRVSSSSVISGR

SEQ ID NO: 71236 - protein, 423 aa, Arabidopsis thaliana
  peptide (1)..(423): Ceres Seq. ID no. 3083246
  misc_feature: Pfam Name: Lectin_legB Pfam Description: Legume lectin domain
  misc_feature (1)..(423): Homolog of NCBI NO: 11346438 NR Description: receptor like protein kinase - Arabidopsis >gi|7327815|emb|CAB82272.1| receptor like protein kinase
  misc_feature (1)..(423): Homolog of NCBI NO: 30679315 NR Description: receptor lectin kinase, putative [Arabidopsis
  misc_feature (1)..(421): Homolog of NCBI NO: 15241006 NR Description: receptor like protein kinase; protein id: supported by cDNA: gi_13605542 [Arabidopsis thaliana]
  misc_feature (1)..(423): Homolog of NCBI NO: 15231975 NR Description: putative serine/threonine protein kinase; protein At3g08870.1 [Arabidopsis thaliana]
  misc_feature (1)..(410): Homolog of NCBI NO: 37536406 NR Description: putative receptor-like protein kinase [Oryza
  misc_feature (1)..(375): Homolog of NCBI NO: 34899542 NR Description: putative receptor-type protein kinase LRK1 [Oryza
  misc_feature (1)..(423): Homolog of NCBI NO: 22093630 NR Description: contains ESTs
  misc_feature (1)..(375): Homolog of NCBI NO: 37534762 NR Description: putative serine/threonine-specific kinase like
  misc_feature (1)..(422): Homolog of NCBI NO: 15232332 NR Description: serine/threonine-specific kinase like protein;
  misc_feature (1)..(422): Homolog of NCBI NO: 28416699 NR Description: At3g53810 [Arabidopsis thaliana]
MGWSFSSGGDLLTEDTLDLLELPRPPPNTAKKRGYNSQVLALIVALSGVTVILLALLFFFVMYKKRLQQGEVLEDWEINHPHRLRYKDLYAATDGFKENRIVGTGGFGTVFRGNLSSPSSDQIAVKKITPNSMQGVREFIAEIESLGRLRHKNLVNLQGWCKQKNDLLLIYDYIPNGSLDSLLYSRPRQSGVVLSWNARFKIAKGIASGLLYLHEEWEKVVIHRDIKPSNVLIEDDMNPRLGDFGLARLYERGSQSNTTVVVGTIGYMAPELARNGKSSSASDVFAFGVLLLEIVSGRRPTDSGTFFLADWVMELHARGEILHAVDPRLGFGYDGVEARLALVVGLLCCHQRPTSRPSMRTVLRYLNGDDDVPEIDNDWGYSDSSRSDLGSNFEGYVSSDRASSSVPSFSVTRVSSSSVISGR

SEQ ID NO: 71237 - DNA, 894 bp, Arabidopsis thaliana
  misc_feature (1)..(894): Ceres Seq. ID no. 3083434
  misc_feature: MA Experiment ID: 20000185 Result: Up-regulated in Transcription
  misc_feature: MA Experiment 20000185 PARAMETER Experiment Name: At_Roots__P Parameter: Age (day) Value: 7 vs. 21
  misc_feature: MA Experiment 20000185 PARAMETER Experiment Name: At_Roots__P Parameter: Organism Value: A. thaliana
  misc_feature: MA Experiment 20000185 PARAMETER Experiment Name: At_Roots__P Parameter: Tissue Value: Roots vs. Whole Plant
  misc_feature: MA Experiment ID: 20000235 Result: Up-regulated in Transcription
  misc_feature: MA Experiment 20000235 PARAMETER Experiment Name: At_Siliques_P Parameter: Age (day) Value: 21
  misc_feature: MA Experiment 20000235 PARAMETER Experiment Name: At_Siliques_P Parameter: Organism Value: A. thaliana
  misc_feature: MA Experiment 20000235 PARAMETER Experiment Name: At_Siliques_P Parameter: Plant Line Value: WS
  misc_feature: MA Experiment 20000235 PARAMETER Experiment Name: At_Siliques_P Parameter: Tissue Value: 5-10mm Siliques vs. Whole Plant
atgacaaagatcttctactacttcttcatcatcatttttcttcaatctccaccgcatcttcaatcccaaaccatcacaaggaacatcagcattttcatcttggccgggcaaagcaacatggcgggtcgaggcggtgtttataacgacactgccacaaacaccaccgtgtgggacggtgtaattccgccagaatgccgatcaaacccttcgatcctccgtctcacgagtaaactcgagtggaaagaggctaaagagccacttcacgttgacattgacattaataagactaatggtgttggaccggggatgccctttgctaaccgggtggttaaccggtttggtcaggtgggtttggttccgtgctctatcggtgggactaaactaagccaatggcaaaaaggtgagtttctttacgaggagacggtgaagagggctaaagcggcgatggctagtggtggtggtggctcgtaccgggcggttttgtggtatcagggtgagtctgatacggttgatatggtcgatgcttcggtatataagaagagactagtgaagtttttcagtgatcttcgaaatgatttacaacacccaaatcttcctattatccaggtggctctagcgacaggagcaggaccatatcttgacgcggtgagaaaagctcaactgaagactgatcttgagaacgtgtattgcgttgacgccagaggcctacctcttgaaccggacggtttgcatctgaccacttcctctcaggtccagctcggtcacatgatagccgagagtttcttggctattccaaattcagctcgaccatcactctacatgcattttttctccttgttctgttccctttatgtttctttaaatatttttggaactatctttcattttctttag

SEQ ID NO: 71238 - protein, 297 aa, Arabidopsis thaliana
  peptide (1)..(297): Ceres Seq. ID no. 3083436
  misc_feature (1)..(203): Homolog of NCBI NO: 30693749 NR Description: expressed protein [Arabidopsis thaliana]
  misc_feature (40)..(203): Homolog of NCBI NO: 11357879 NR Description: hypothetical protein F8J2.180 - Arabidopsis >gi|7529725|emb|CAB86905.1| putative protein [Arabidopsis
  misc_feature (15)..(263): Homolog of NCBI NO: 18418402 NR Description: Expressed protein; protein id: At4g34215.1,
  misc_feature (15)..(263): Homolog of NCBI NO: 21594009 NR Description: unknown [Arabidopsis thaliana]
  misc_feature (28)..(262): Homolog of NCBI NO: 30102980 NR Description: unknown protein [Oryza sativa (japonica
  misc_feature (31)..(263): Homolog of NCBI NO: 38347110 NR Description: OSJNBa0009K15.7 [Oryza sativa (japonica
  misc_feature (31)..(263): Homolog of NCBI NO: 30102977 NR Description: hypothetical protein [Oryza sativa (japonica
  misc_feature (31)..(272): Homolog of NCBI NO: 38345580 NR Description: OSJNBa0027H06.16 [Oryza sativa (japonica
  misc_feature (15)..(206): Homolog of NCBI NO: 7488258 NR Description: protein kinase homolog F28A23.20 - Arabidopsis
  misc_feature (15)..(255): Homolog of NCBI NO: 32473459 NR Description: probable acetyl xylan esterase AxeA [Pirellula >gi|32398139|emb|CAD78234.1| probable acetyl xylan esterase AxeA
MTKIFYYFFIIIFLQSPPHLQSQTITRNISIFILAGQSNMAGRGGVYNDTATNTTVWDGVIPPECRSNPSILRLTSKLEWKEAKEPLHVDIDINKTNGVGPGMPFANRVVNRFGQVGLVPCSIGGTKLSQWQKGEFLYEETVKRAKAAMASGGGGSYRAVLWYQGESDTVDMVDASVYKKRLVKFFSDLRNDLQHPNLPIIQVALATGAGPYLDAVRKAQLKTDLENVYCVDARGLPLEPDGLHLTTSSQVQLGHMIAESFLAIPNSARPSLYMHFFSLFCSLYVSLNIFGTIFHFL

SEQ ID NO: 71239 - protein, 258 aa, Arabidopsis thaliana
  peptide (1)..(258): Ceres Seq. ID no. 3083437
  misc_feature (1)..(164): Homolog of NCBI NO: 30693749 NR Description: expressed protein [Arabidopsis thaliana]
  misc_feature (1)..(164): Homolog of NCBI NO: 11357879 NR Description: hypothetical protein F8J2.180 - Arabidopsis >gi|7529725|emb|CAB86905.1| putative protein [Arabidopsis
  misc_feature (1)..(224): Homolog of NCBI NO: 18418402 NR Description: Expressed protein; protein id: At4g34215.1,
  misc_feature (1)..(224): Homolog of NCBI NO: 21594009 NR Description: unknown [Arabidopsis thaliana]
  misc_feature (1)..(223): Homolog of NCBI NO: 30102980 NR Description: unknown protein [Oryza sativa (japonica
  misc_feature (1)..(224): Homolog of NCBI NO: 38347110 NR Description: OSJNBa0009K15.7 [Oryza sativa (japonica
  misc_feature (1)..(224): Homolog of NCBI NO: 30102977 NR Description: hypothetical protein [Oryza sativa (japonica
  misc_feature (1)..(233): Homolog of NCBI NO: 38345580 NR Description: OSJNBa0027H06.16 [Oryza sativa (japonica
  misc_feature (1)..(167): Homolog of NCBI NO: 7488258 NR Description: protein kinase homolog F28A23.20 - Arabidopsis
  misc_feature (1)..(216): Homolog of NCBI NO: 32473459 NR Description: probable acetyl xylan esterase AxeA [Pirellula >gi|32398139|emb|CAD78234.1| probable acetyl xylan esterase AxeA
MAGRGGVYNDTATNTTVWDGVIPPECRSNPSILRLTSKLEWKEAKEPLHVDIDINKTNGVGPGMPFANRVVNRFGQVGLVPCSIGGTKLSQWQKGEFLYEETVKRAKAAMASGGGGSYRAVLWYQGESDTVDMVDASVYKKRLVKFFSDLRNDLQHPNLPIIQVALATGAGPYLDAVRKAQLKTDLENVYCVDARGLPLEPDGLHLTTSSQVQLGHMIAESFLAIPNSARPSLYMHFFSLFCSLYVSLNIFGTIFHFL

SEQ ID NO: 71240 - protein, 195 aa, Arabidopsis thaliana
  peptide (1)..(195): Ceres Seq. ID no. 3083438
  misc_feature (1)..(101): Homolog of NCBI NO: 30693749 NR Description: expressed protein [Arabidopsis thaliana]
  misc_feature (1)..(101): Homolog of NCBI NO: 11357879 NR Description: hypothetical protein F8J2.180 - Arabidopsis >gi|7529725|emb|CAB86905.1| putative protein [Arabidopsis
  misc_feature (1)..(161): Homolog of NCBI NO: 18418402 NR Description: Expressed protein; protein id: At4g34215.1,
  misc_feature (1)..(161): Homolog of NCBI NO: 21594009 NR Description: unknown [Arabidopsis thaliana]
  misc_feature (1)..(160): Homolog of NCBI NO: 30102980 NR Description: unknown protein [Oryza sativa (japonica
  misc_feature (1)..(161): Homolog of NCBI NO: 38347110 NR Description: OSJNBa0009K15.7 [Oryza sativa (japonica
  misc_feature (1)..(161): Homolog of NCBI NO: 30102977 NR Description: hypothetical protein [Oryza sativa (japonica
  misc_feature (1)..(170): Homolog of NCBI NO: 38345580 NR Description: OSJNBa0027H06.16 [Oryza sativa (japonica
  misc_feature (1)..(104): Homolog of NCBI NO: 7488258 NR Description: protein kinase homolog F28A23.20 - Arabidopsis
  misc_feature (1)..(153): Homolog of NCBI NO: 32473459 NR Description: probable acetyl xylan esterase AxeA [Pirellula >gi|32398139|emb|CAD78234.1| probable acetyl xylan esterase AxeA
MPFANRVVNRFGQVGLVPCSIGGTKLSQWQKGEFLYEETVKRAKAAMASGGGGSYRAVLWYQGESDTVDMVDASVYKKRLVKFFSDLRNDLQHPNLPIIQVALATGAGPYLDAVRKAQLKTDLENVYCVDARGLPLEPDGLHLTTSSQVQLGHMIAESFLAIPNSARPSLYMHFFSLFCSLYVSLNIFGTIFHFL

SEQ ID NO: 71241 - DNA, 2676 bp, Arabidopsis thaliana
  misc_feature (1)..(2676): Ceres Seq. ID no. 3083884
atggatgatttcaatcttcgtagcgaaaaccctaattcatcatccaccacttcctcatcctcttcctctttccaccgtcacaagagcgaaaccggaaacacaaaacggtcaaggtcaacgtccacgttatcgacggaccctcagagcgtggcggctcgcgacagacggcaccgaattagcgaccgtttcaagattttacaaagcatggtccctggtggtgcgaagatggacactgtatctatgcttgacgaagccattagctacgtcaagttcttgaaggctcagatctggtatcaccaaaacatgcttctcttcataaacgaccacgaaactacatcatcttgtacttactctcccggcgctggagaatttggaccgaaactctttggttatgatgacgattatgcccctataatggacacatattcacaaggcgtgccacttacggttgcggactcgaagcgtgccacacgacacgcattacgagggcactgcaattgtataatcggagaaacagaggaattcgccgatcaacgagagaagatggaagtgcaaattgaagaatctggtaaaaatcaaacctctccggaatcaattgaagcagacaaagcgaagcagatagtggtgcttctgattggtccaccaggaagcggcaaatcgacgttttgtgacaccgcaatgcgttcctctcaccgcccttggtctcgtatctgccaggacattgttaacaatggcaaagctggaacaaaggctcagtgtttaaagatggctacagattctcttagggaaggcaagagcgtctttatagacagatgcaatcttgacagggagcaacgttcagagtttattaagcttggtggtcctgagttcgaagttcatgcagtggttctggagcttcctgctcaggtttgtatatctagatcagttaaaagaactggtcatgaaggaaatctacaaggtggaagagctgcagctgttgtgaataagatgcttcagagtaaggaacttcccaaagtgaatgaagggttttctcggattatgttttgttacagtgacgctgatgttgataatgctgttaacatgtataacaagcttggtccaatggatacccttccttctggctgttttggcgaaaaaaaattagatactaaaagccaacccggtataatgaagttctttaagaaagtcagtgctctgcctgcttcatcttctaatgaagctactaacacaactcggaaagctgatgaaatgacagcaaatgtccgagtttcgccagtcaagcttggttctgctgatattgtacctacactggcattcccatcaatttcgactgcggattttcagtttgatcttgaaaaggcttctgatatcattgtggagaaagcagaggagttcttgtctaaacttgggactgcgcgtctcgtcttggtggacttgagccgcgggtcaaagattctatctctggtcaaggctaaggcttctcagaagaacattgattcagcgaaattcttcacatttgttggggacataactaagcttcgttctgaaggtggtctacactgtaatgtcatagctaatgctactaactggcggcttaaacctggaggtggaggtgtgaatgcagcaatattcaaagctgctggtccagatcttgagactgcgacaagagtacgagcaaacactcttcttcctggaaaagccgtggtagttcctcttccttctacttgtccattacacaatgcagaaggaattacacatgtcatacatgttctaggaccaaacatgaacccaaaccgaccagacaaccttaacaacgactacaccaaggggtgcaaaactctccgggaagcttacacatctctatttgaaggttttctatcagtagtacaggatcaatcgaagttgcccaaacgaagcagtcaaacagctgtgtcagattctggtgaggatattaaggaagactctgagagaaacaaaaagtacaaaggatcacaagataaggccgtaactaataatttggaatcagagtctctggaggacacaagaggcagtggaaagaagatgagtaaaggatggaacacatgggcattggctctccacagcatcgcgatgcacccagagagacacgagaatgtcgtgcttgaatatttagacaacatcgttgtcataaacgaccagtacccaaaggcgcggaaacacgtgctagtactggcgagacaggagagtctagatgggctagaagatgttcgcaaagagaatcttcaacttctgcaggaaatgcacaatgttggtctgaaatgggttgatagattccagaacgaggatgcatctcttatcttccgccttggatatcactcggttccctcgatgcgacaactacacttacacgttataagccaagactttaattcagatagtttgaagaacaagaaacactggaactctttcacgacctcgttcttccgtgactcagttgatgtacttgaagaggtcaacagccaaggcaaggccaatgtggcgagcgaagatctgttgaaaggtgagctgcgttgcaatcggtgtagaagcgcacacccaaatattccaaaacttaaatcacatgtcagaagctgccattctcaatttccagaccatttactccaaaacaatcgccttgtggctagagcagagacgtag

SEQ ID NO: 71242 - protein, 891 aa, Arabidopsis thaliana
  peptide (1)..(891): Ceres Seq. ID no. 3083885
  misc_feature (525)..(622): Pfam Name: Appr-1"-p processing enzyme family Pfam Description: Appr-1"-p processing enzyme family
  misc_feature (627)..(869): Homolog of NCBI NO: 32527968 NR Description: FHA-HIT [Gallus gallus]
  misc_feature (634)..(869): Homolog of NCBI NO: 32394382 NR Description: forkhead-associated domain histidine-triad like
  misc_feature (654)..(874): Homolog of NCBI NO: 32527946 NR Description: FHA-HIT isoform [Homo sapiens]
  misc_feature (595)..(876): Homolog of NCBI NO: 32527972 NR Description: FHA-HIT short isoform [Takifugu rubripes]
  misc_feature (638)..(874): Homolog of NCBI NO: 32527940 NR Description: FHA-HIT isoform [Homo sapiens]
  misc_feature (679)..(869): Homolog of NCBI NO: 26342519 NR Description: unnamed protein product [Mus musculus]
  misc_feature (679)..(869): Homolog of NCBI NO: 26369552 NR Description: unnamed protein product [Mus musculus]
  misc_feature (679)..(869): Homolog of NCBI NO: 32526865 NR Description: aprataxin; forkhead-associated domain like [Mus musculus] >gi|26346224|dbj|BAC36763.1| unnamed protein
  misc_feature (686)..(874): Homolog of NCBI NO: 28329433 NR Description: aprataxin isoform c [Homo sapiens]
  misc_feature (686)..(874): Homolog of NCBI NO: 28329436 NR Description: aprataxin isoform a [Homo sapiens]
MDDFNLRSENPNSSSTTSSSSSSFHRHKSETGNTKRSRSTSTLSTDPQSVAARDRRHRISDRFKILQSMVPGGAKMDTVSMLDEAISYVKFLKAQIWYHQNMLLFINDHETTSSCTYSPGAGEFGPKLFGYDDDYAPIMDTYSQGVPLTVADSKRATRHALRGHCNCIIGETEEFADQREKMEVQIEESGKNQTSPESIEADKAKQIVVLLIGPPGSGKSTFCDTAMRSSHRPWSRICQDIVNNGKAGTKAQCLKMATDSLREGKSVFIDRCNLDREQRSEFIKLGGPEFEVHAVVLELPAQVCISRSVKRTGHEGNLQGGRAAAVVNKMLQSKELPKVNEGFSRIMFCYSDADVDNAVNMYNKLGPMDTLPSGCFGEKKLDTKSQPGIMKFFKKVSALPASSSNEATNTTRKADEMTANVRVSPVKLGSADIVPTLAFPSISTADFQFDLEKASDIIVEKAEEFLSKLGTARLVLVDLSRGSKILSLVKAKASQKNIDSAKFFTFVGDITKLRSEGGLHCNVIANATNWRLKPGGGGVNAAIFKAAGPDLETATRVRANTLLPGKAVVVPLPSTCPLHNAEGITHVIHVLGPNMNPNRPDNLNNDYTKGCKTLREAYTSLFEGFLSVVQDQSKLPKRSSQTAVSDSGEDIKEDSERNKKYKGSQDKAVTNNLESESLEDTRGSGKKMSKGWNTWALALHSIAMHPERHENVVLEYLDNIVVINDQYPKARKHVLVLARQESLDGLEDVRKENLQLLQEMHNVGLKWVDRFQNEDASLIFRLGYHSVPSMRQLHLHVISQDFNSDSLKNKKHWNSFTTSFFRDSVDVLEEVNSQGKANVASEDLLKGELRCNRCRSAHPNIPKLKSHVRSCHSQFPDHLLQNNRLVARAET

SEQ ID NO: 71243 - protein, 823 aa, Arabidopsis thaliana
  peptide (1)..(823): Ceres Seq. ID no. 3083886
  misc_feature (457)..(554): Pfam Name: Appr-1"-p processing enzyme family Pfam Description: Appr-1"-p processing enzyme family
  misc_feature (611)..(801): Homolog of NCBI NO: 32526865 NR Description: aprataxin; forkhead-associated domain like [Mus musculus] >gi|26346224|dbj|BAC36763.1| unnamed protein
  misc_feature (618)..(806): Homolog of NCBI NO: 28329433 NR Description: aprataxin isoform c [Homo sapiens]
  misc_feature (566)..(801): Homolog of NCBI NO: 32394382 NR Description: forkhead-associated domain histidine-triad like
  misc_feature (527)..(808): Homolog of NCBI NO: 32527972 NR Description: FHA-HIT short isoform [Takifugu rubripes]
  misc_feature (611)..(801): Homolog of NCBI NO: 26342519 NR Description: unnamed protein product [Mus musculus]
  misc_feature (611)..(801): Homolog of NCBI NO: 26369552 NR Description: unnamed protein product [Mus musculus]
  misc_feature (570)..(806): Homolog of NCBI NO: 32527940 NR Description: FHA-HIT isoform [Homo sapiens]
  misc_feature (586)..(806): Homolog of NCBI NO: 32527946 NR Description: FHA-HIT isoform [Homo sapiens]
  misc_feature (559)..(801): Homolog of NCBI NO: 32527968 NR Description: FHA-HIT [Gallus gallus]
  misc_feature (618)..(806): Homolog of NCBI NO: 28329436 NR Description: aprataxin isoform a [Homo sapiens]
MVPGGAKMDTVSMLDEAISYVKFLKAQIWYHQNMLLFINDHETTSSCTYSPGAGEFGPKLFGYDDDYAPIMDTYSQGVPLTVADSKRATRHALRGHCNCIIGETEEFADQREKMEVQIEESGKNQTSPESIEADKAKQIVVLLIGPPGSGKSTFCDTAMRSSHRPWSRICQDIVNNGKAGTKAQCLKMATDSLREGKSVFIDRCNLDREQRSEFIKLGGPEFEVHAVVLELPAQVCISRSVKRTGHEGNLQGGRAAAVVNKMLQSKELPKVNEGFSRIMFCYSDADVDNAVNMYNKLGPMDTLPSGCFGEKKLDTKSQPGIMKFFKKVSALPASSSNEATNTTRKADEMTANVRVSPVKLGSADIVPTLAFPSISTADFQFDLEKASDIIVEKAEEFLSKLGTARLVLVDLSRGSKILSLVKAKASQKNIDSAKFFTFVGDITKLRSEGGLHCNVIANATNWRLKPGGGGVNAAIFKAAGPDLETATRVRANTLLPGKAVVVPLPSTCPLHNAEGITHVIHVLGPNMNPNRPDNLNNDYTKGCKTLREAYTSLFEGFLSVVQDQSKLPKRSSQTAVSDSGEDIKEDSERNKKYKGSQDKAVTNNLESESLEDTRGSGKKMSKGWNTWALALHSIAMHPERHENVVLEYLDNIVVINDQYPKARKHVLVLARQESLDGLEDVRKENLQLLQEMHNVGLKWVDRFQNEDASLIFRLGYHSVPSMRQLHLHVISQDFNSDSLKNKKHWNSFTTSFFRDSVDVLEEVNSQGKANVASEDLLKGELRCNRCRSAHPNIPKLKSHVRSCHSQFPDHLLQNNRLVARAET

SEQ ID NO: 71244 - protein, 816 aa, Arabidopsis thaliana
  peptide (1)..(816): Ceres Seq. ID no. 3083887
  misc_feature (450)..(547): Pfam Name: Appr-1"-p processing enzyme family Pfam Description: Appr-1"-p processing enzyme family
  misc_feature (552)..(794): Homolog of NCBI NO: 32527968 NR Description: FHA-HIT [Gallus gallus]
  misc_feature (559)..(794): Homolog of NCBI NO: 32394382 NR Description: forkhead-associated domain histidine-triad like
  misc_feature (579)..(799): Homolog of NCBI NO: 32527946 NR Description: FHA-HIT isoform [Homo sapiens]
  misc_feature (520)..(801): Homolog of NCBI NO: 32527972 NR Description: FHA-HIT short isoform [Takifugu rubripes]
  misc_feature (563)..(799): Homolog of NCBI NO: 32527940 NR Description: FHA-HIT isoform [Homo sapiens]
  misc_feature (604)..(794): Homolog of NCBI NO: 26342519 NR Description: unnamed protein product [Mus musculus]
  misc_feature (604)..(794): Homolog of NCBI NO: 26369552 NR Description: unnamed protein product [Mus musculus]
  misc_feature (604)..(794): Homolog of NCBI NO: 32526865 NR Description: aprataxin; forkhead-associated domain like [Mus musculus] >gi|26346224|dbj|BAC36763.1| unnamed protein
  misc_feature (611)..(799): Homolog of NCBI NO: 28329433 NR Description: aprataxin isoform c [Homo sapiens]
  misc_feature (611)..(799): Homolog of NCBI NO: 28329436 NR Description: aprataxin isoform a [Homo sapiens]
MDTVSMLDEAISYVKFLKAQIWYHQNMLLFINDHETTSSCTYSPGAGEFGPKLFGYDDDYAPIMDTYSQGVPLTVADSKRATRHALRGHCNCIIGETEEFADQREKMEVQIEESGKNQTSPESIEADKAKQIVVLLIGPPGSGKSTFCDTAMRSSHRPWSRICQDIVNNGKAGTKAQCLKMATDSLREGKSVFIDRCNLDREQRSEFIKLGGPEFEVHAVVLELPAQVCISRSVKRTGHEGNLQGGRAAAVVNKMLQSKELPKVNEGFSRIMFCYSDADVDNAVNMYNKLGPMDTLPSGCFGEKKLDTKSQPGIMKFFKKVSALPASSSNEATNTTRKADEMTANVRVSPVKLGSADIVPTLAFPSISTADFQFDLEKASDIIVEKAEEFLSKLGTARLVLVDLSRGSKILSLVKAKASQKNIDSAKFFTFVGDITKLRSEGGLHCNVIANATNWRLKPGGGGVNAAIFKAAGPDLETATRVRANTLLPGKAVVVPLPSTCPLHNAEGITHVIHVLGPNMNPNRPDNLNNDYTKGCKTLREAYTSLFEGFLSVVQDQSKLPKRSSQTAVSDSGEDIKEDSERNKKYKGSQDKAVTNNLESESLEDTRGSGKKMSKGWNTWALALHSIAMHPERHENVVLEYLDNIVVINDQYPKARKHVLVLARQESLDGLEDVRKENLQLLQEMHNVGLKWVDRFQNEDASLIFRLGYHSVPSMRQLHLHVISQDFNSDSLKNKKHWNSFTTSFFRDSVDVLEEVNSQGKANVASEDLLKGELRCNRCRSAHPNIPKLKSHVRSCHSQFPDHLLQNNRLVARAET

SEQ ID NO: 71245 - DNA, 1284 bp, Arabidopsis thaliana
  misc_feature (1)..(1284): Ceres Seq. ID no. 3084009
  misc_feature: MA Experiment ID: 20001911 Result: Up-regulated in Transcription
  misc_feature: MA Experiment 20001911 PARAMETER Experiment Name: At_Drought_Reproduction_P Parameter: Age (day) Value: 40
  misc_feature: MA Experiment 20001911 PARAMETER Experiment Name: At_Drought_Reproduction_P Parameter: Organism Value: A. thaliana
  misc_feature: MA Experiment 20001911 PARAMETER Experiment Name: At_Drought_Reproduction_P Parameter: Plant Line Value: WS
  misc_feature: MA Experiment 20001911 PARAMETER Experiment Name: At_Drought_Reproduction_P Parameter: Timepoint (day) Value: 10
  misc_feature: MA Experiment 20001911 PARAMETER Experiment Name: At_Drought_Reproduction_P Parameter: Tissue Value: Flowers
  misc_feature: MA Experiment 20001911 PARAMETER Experiment Name: At_Drought_Reproduction_P Parameter: Treatment Value: Drought vs. No Drought
atgaagaagcgcttaaccacttccacttgttcttcttctccatcttcctctgtttcttcttctactactacttcctctcctattcagtcggaggctccaaggcctaaacgagccaaaagggctaagaaatcttctccttctggtgataaatctcataacccgacaagccctgcttctacccgacgcagctctatctacagaggagtcactagacatagatggactgggagattcgaggctcatctttgggacaaaagctcttggaattcgattcagaacaagaaaggcaaacaaggagcatatgacagtgaagaagcagcagcacatacgtacgatctggctgctctcaagtactggggacccgacaccatcttgaattttccggcagagacgtacacaaaggaattggaagaaatgcagagagtgacaaaggaagaatatttggcttctctccgccgccagagcagtggtttctccagaggcgtctctaaatatcgcggcgtcgctaggcatcaccacaacggaagatgggaggctcggatcggaagagtgtttgggaacaagtacttgtacctcggcacctataatacgcaggaggaagctgctgcagcatatgacatggctgcgattgagtatcgaggcgcaaacgcggttactaatttcgacattagtaattacattgaccggttaaagaagaaaggtgttttcccgttccctgtgaaccaagctaaccatcaagagggtattcttgttgaagccaaacaagaagttgaaacgagagaagcgaaggaagagcctagagaagaagtgaaacaacagtacgtggaagaaccaccgcaagaagaagaagagaaggaagaagagaaagcagagcaacaagaagcagagattgtaggatattcagaagaagcagcagtggtcaattgctgcatagactcttcaaccataatggaaatggatcgttgtggggacaacaatgagctggcttggaacttctgtatgatggatacagggttttctccgtttttgactgatcagaatctcgcgaatgagaatcccatagagtatccggagctattcaatgagttagcatttgaggacaacatcgacttcatgttcgatgatgggaagcacgagtgcttgaacttggaaaatctggattgttgcgtggtgggaagagagagcccaccctcttcttcttcaccattgtcttgcttatctactgactctgcttcatcaacaacaacaacaacaacctcggtttcttgtaactatttggtctga

SEQ ID NO: 71246 - protein, 427 aa, Arabidopsis thaliana
  peptide (1)..(427): Ceres Seq. ID no. 3084010
  misc_feature (63)..(133): Pfam Name: AP2 domain Pfam Description: AP2 domain
  misc_feature (207)..(427): Homolog of NCBI NO: 15232492 NR Description: putative protein; protein id: At3g54330.1
  misc_feature (1)..(197): Homolog of NCBI NO: 15232481 NR Description: aintegumaenta-like protein; protein id:
  misc_feature (13)..(301): Homolog of NCBI NO: 25518475 NR Description: hypothetical protein T24D18.16 - Arabidopsis >gi|6587812|gb|AAF18503.1|AC010924_16 Similar to gb|U44028 factor CKC from Arabidopsis thaliana and contains two PF|00847
  misc_feature (13)..(301): Homolog of NCBI NO: 18394319 NR Description: ovule development protein, putative; protein id: supported by cDNA: gi_15028184 [Arabidopsis thaliana]
  misc_feature (8)..(230): Homolog of NCBI NO: 34909212 NR Description: P0425G02.29 [Oryza sativa (japonica
  misc_feature (50)..(228): Homolog of NCBI NO: 15219975 NR Description: ovule development protein, putative; protein id:
  misc_feature (5)..(237): Homolog of NCBI NO: 38492172 NR Description: ANT-like protein [Nicotiana tabacum]
  misc_feature (7)..(265): Homolog of NCBI NO: 15223777 NR Description: ovule development protein, putative; protein id:
  misc_feature (7)..(265): Homolog of NCBI NO: 25405447 NR Description: hypothetical protein F11M15.6 [imported] - thaliana >gi|4836931|gb|AAD30633.1|AC006085_6 Hypothetical
  misc_feature (12)..(230): Homolog of NCBI NO: 28201307 NR Description: putative ovule development protein antitegumenta
MKKRLTTSTCSSSPSSSVSSSTTTSSPIQSEAPRPKRAKRAKKSSPSGDKSHNPTSPASTRRSSIYRGVTRHRWTGRFEAHLWDKSSWNSIQNKKGKQGAYDSEEAAAHTYDLAALKYWGPDTILNFPAETYTKELEEMQRVTKEEYLASLRRQSSGFSRGVSKYRGVARHHHNGRWEARIGRVFGNKYLYLGTYNTQEEAAAAYDMAAIEYRGANAVTNFDISNYIDRLKKKGVFPFPVNQANHQEGILVEAKQEVETREAKEEPREEVKQQYVEEPPQEEEEKEEEKAEQQEAEIVGYSEEAAVVNCCIDSSTIMEMDRCGDNNELAWNFCMMDTGFSPFLTDQNLANENPIEYPELFNELAFEDNIDFMFDDGKHECLNLENLDCCVVGRESPPSSSSPLSCLSTDSASSTTTTTTSVSCNYLV

SEQ ID NO: 71247 - protein, 289 aa, Arabidopsis thaliana
  peptide (1)..(289): Ceres Seq. ID no. 3084011
  misc_feature (25)..(88): Pfam Name: AP2 domain Pfam Description: AP2 domain
  misc_feature (69)..(289): Homolog of NCBI NO: 15232492 NR Description: putative protein; protein id: At3g54330.1
  misc_feature (1)..(59): Homolog of NCBI NO: 15232481 NR Description: aintegumaenta-like protein; protein id:
  misc_feature (1)..(163): Homolog of NCBI NO: 25518475 NR Description: hypothetical protein T24D18.16 - Arabidopsis >gi|6587812|gb|AAF18503.1|AC010924_16 Similar to gb|U44028 factor CKC from Arabidopsis thaliana and contains two PF|00847
  misc_feature (1)..(163): Homolog of NCBI NO: 18394319 NR Description: ovule development protein, putative; protein id: supported by cDNA: gi_15028184 [Arabidopsis thaliana]
  misc_feature (1)..(92): Homolog of NCBI NO: 34909212 NR Description: P0425G02.29 [Oryza sativa (japonica
  misc_feature (1)..(90): Homolog of NCBI NO: 15219975 NR Description: ovule development protein, putative; protein id:
  misc_feature (1)..(99): Homolog of NCBI NO: 38492172 NR Description: ANT-like protein [Nicotiana tabacum]
  misc_feature (1)..(127): Homolog of NCBI NO: 15223777 NR Description: ovule development protein, putative; protein id:
  misc_feature (1)..(127): Homolog of NCBI NO: 25405447 NR Description: hypothetical protein F11M15.6 [imported] - thaliana >gi|4836931|gb|AAD30633.1|AC006085_6 Hypothetical
  misc_feature (1)..(92): Homolog of NCBI NO: 28201307 NR Description: putative ovule development protein antitegumenta
MQRVTKEEYLASLRRQSSGFSRGVSKYRGVARHHHNGRWEARIGRVFGNKYLYLGTYNTQEEAAAAYDMAAIEYRGANAVTNFDISNYIDRLKKKGVFPFPVNQANHQEGILVEAKQEVETREAKEEPREEVKQQYVEEPPQEEEEKEEEKAEQQEAEIVGYSEEAAVVNCCIDSSTIMEMDRCGDNNELAWNFCMMDTGFSPFLTDQNLANENPIEYPELFNELAFEDNIDFMFDDGKHECLNLENLDCCVVGRESPPSSSSPLSCLSTDSASSTTTTTTSVSCNYLV

SEQ ID NO: 71248 - protein, 221 aa, Arabidopsis thaliana
  peptide (1)..(221): Ceres Seq. ID no. 3084012
  misc_feature (1)..(221): Homolog of NCBI NO: 15232492 NR Description: putative protein; protein id: At3g54330.1
  misc_feature (1)..(95): Homolog of NCBI NO: 25518475 NR Description: hypothetical protein T24D18.16 - Arabidopsis >gi|6587812|gb|AAF18503.1|AC010924_16 Similar to gb|U44028 factor CKC from Arabidopsis thaliana and contains two PF|00847
  misc_feature (1)..(95): Homolog of NCBI NO: 18394319 NR Description: ovule development protein, putative; protein id: supported by cDNA: gi_15028184 [Arabidopsis thaliana]
  misc_feature (1)..(24): Homolog of NCBI NO: 34909212 NR Description: P0425G02.29 [Oryza sativa (japonica
  misc_feature (1)..(22): Homolog of NCBI NO: 15219975 NR Description: ovule development protein, putative; protein id:
  misc_feature (1)..(31): Homolog of NCBI NO: 38492172 NR Description: ANT-like protein [Nicotiana tabacum]
  misc_feature (1)..(59): Homolog of NCBI NO: 15223777 NR Description: ovule development protein, putative; protein id:
  misc_feature (1)..(59): Homolog of NCBI NO: 25405447 NR Description: hypothetical protein F11M15.6 [imported] - thaliana >gi|4836931|gb|AAD30633.1|AC006085_6 Hypothetical
  misc_feature (1)..(24): Homolog of NCBI NO: 28201307 NR Description: putative ovule development protein antitegumenta
  misc_feature (1)..(22): Homolog of NCBI NO: 34221733 NR Description: putative AP2 domain transcription factor
MAAIEYRGANAVTNFDISNYIDRLKKKGVFPFPVNQANHQEGILVEAKQEVETREAKEEPREEVKQQYVEEPPQEEEEKEEEKAEQQEAEIVGYSEEAAVVNCCIDSSTIMEMDRCGDNNELAWNFCMMDTGFSPFLTDQNLANENPIEYPELFNELAFEDNIDFMFDDGKHECLNLENLDCCVVGRESPPSSSSPLSCLSTDSASSTTTTTTSVSCNYLV

SEQ ID NO: 71249 - DNA, 1161 bp, Arabidopsis thaliana
  misc_feature (1)..(1161): Ceres Seq. ID no. 3084650
  misc_feature: MA Experiment ID: 20000180 Result: Down-regulated in Transcription
  misc_feature: MA Experiment 20000180 PARAMETER Experiment Name: At_Germinating_Seeds_P Parameter: Age (hr) Value: 24 vs. 0
  misc_feature: MA Experiment 20000180 PARAMETER Experiment Name: At_Germinating_Seeds_P Parameter: Tissue Value: Germinating Seeds
  misc_feature: MA Experiment ID: 20000496 Result: Up-regulated in Transcription
  misc_feature: MA Experiment 20000496 PARAMETER Experiment Name: At_Guard_Cells_P Parameter: Harvest Date Value: 7/19/2002
  misc_feature: MA Experiment 20000496 PARAMETER Experiment Name: At_Guard_Cells_P Parameter: Organism Value: Canola
  misc_feature: MA Experiment 20000496 PARAMETER Experiment Name: At_Guard_Cells_P Parameter: Tissue Value: Guard Cells vs. Leaves
  misc_feature: MA Experiment ID: 20000794 Result: Down-regulated in Transcription
  misc_feature: MA Experiment 20000794 PARAMETER Experiment Name: At_Petals_P Parameter: Age (day) Value: 23-25 days
  misc_feature: MA Experiment 20000794 PARAMETER Experiment Name: At_Petals_P Parameter: Plant Line Value: WS
  misc_feature: MA Experiment 20000794 PARAMETER Experiment Name: At_Petals_P Parameter: Tissue Value: Petals vs. Whole plant
atggagacagacgaagcataccaaaagaaagagcgagctgcattagtagccatcgttgtccttgcttgtcttgctttatcttctttgttcgtcgcctttagctactactgctatattcgtaacaaggaaaaaggcgattgtcagaaagtacaagatgttactgaaaatgggttgcaaattttcacctttaagcaattgcattcagcaactggtggatttagcaagtctaatgtggttgggaatggtgggtttggcttggtttatcgtggtgtgcttaacgatggcagaaaagttgctatcaagctcatggatcatgcaggaaagcaaggggaagaagaattcaagatggaggttgagttactgagccgtctgcgttcaccatacttgttggcacttcttggttattgctcagacaatagtcataagctgcttgtgtatgagttcatggcaaatggtggtctgcaggaacacctgtatcttcccaacaggtctggttctgtcccaccaagattagattgggaaactaggatgagaatagctgtggaagctgcaaaaggcttggaatatctccatgaacaagtatcacccccggtgattcatagagactttaagagcagcaatattctgctggacagaaacttcaatgccaaagtttcagattttggattggctaaagtcggatcagataaagctggtggacacgtttctacccgtgtattaggcacacaaggatatgtagctcctgagtacgctttaactggtcacttgacaacaaagtcggatgtctatagctacggtgttgtcctgttagagttactaaccggtagagttccagtagatatgaagagagctacaggagaaggtgttcttgtctcttgggctttgcctcaattggctgatagagacaaagtagtagacataatggatccaacactcgaaggacaatactctacgaaagaagttgttcaagttgcagcaatagcagcaatgtgtgttcaagcagaagctgactacagacccttaatggcagatgtggtgcagtcactggttccattagtgagaaaccgtaggtcagcttcaaagcttagtggctgctctagtagctttagcttggctcggtctcctaactctccgggtaaagcaagcataggttctcaatga

SEQ ID NO: 71250 - protein, 386 aa, Arabidopsis thaliana
  peptide (1)..(386): Ceres Seq. ID no. 3084651
  misc_feature (73)..(278): Pfam Name: Protein kinase domain Pfam Description: Protein kinase domain
  misc_feature (1)..(386): Homolog of NCBI NO: 11358842 NR Description: serine/threonine-specific protein kinase-like
  misc_feature (116)..(386): Homolog of NCBI NO: 30694859 NR Description: protein kinase family [Arabidopsis thaliana]
  misc_feature (116)..(386): Homolog of NCBI NO: 26449989 NR Description: putative serine/threonine-specific protein kinase
  misc_feature (14)..(354): Homolog of NCBI NO: 12322155 NR Description: protein kinase, putative [Arabidopsis thaliana]
  misc_feature (57)..(354): Homolog of NCBI NO: 15221910 NR Description: protein kinase, putative; protein id: At1g54820.1
  misc_feature (57)..(354): Homolog of NCBI NO: 25405773 NR Description: hypothetical protein T22H22.21 [imported] - thaliana >gi|3776574|gb|AAC64891.1| Similar to T11J7.13
  misc_feature (59)..(349): Homolog of NCBI NO: 7488203 NR Description: probable serine/threonine-specific protein kinase
  misc_feature (59)..(349): Homolog of NCBI NO: 30679031 NR Description: protein kinase family [Arabidopsis thaliana]
  misc_feature (29)..(349): Homolog of NCBI NO: 30696629 NR Description: protein kinase, putative [Arabidopsis thaliana]
  misc_feature (29)..(297): Homolog of NCBI NO: 7434288 NR Description: probable serine/threonine-specific protein kinase
METDEAYQKKERAALVAIVVLACLALSSLFVAFSYYCYIRNKEKGDCQKVQDVTENGLQIFTFKQLHSATGGFSKSNVVGNGGFGLVYRGVLNDGRKVAIKLMDHAGKQGEEEFKMEVELLSRLRSPYLLALLGYCSDNSHKLLVYEFMANGGLQEHLYLPNRSGSVPPRLDWETRMRIAVEAAKGLEYLHEQVSPPVIHRDFKSSNILLDRNFNAKVSDFGLAKVGSDKAGGHVSTRVLGTQGYVAPEYALTGHLTTKSDVYSYGVVLLELLTGRVPVDMKRATGEGVLVSWALPQLADRDKVVDIMDPTLEGQYSTKEVVQVAAIAAMCVQAEADYRPLMADVVQSLVPLVRNRRSASKLSGCSSSFSLARSPNSPGKASIGSQ

SEQ ID NO: 71251 - protein, 284 aa, Arabidopsis thaliana; identical to SEQ ID NO: 47640
  peptide (1)..(284): Ceres Seq. ID no. 3084652
  misc_feature (1)..(176): Pfam Name: Protein kinase domain Pfam Description: Protein kinase domain
  misc_feature (1)..(284): Homolog of NCBI NO: 11358842 NR Description: serine/threonine-specific protein kinase-like
  misc_feature (14)..(284): Homolog of NCBI NO: 30694859 NR Description: protein kinase family [Arabidopsis thaliana]
  misc_feature (14)..(284): Homolog of NCBI NO: 26449989 NR Description: putative serine/threonine-specific protein kinase
  misc_feature (1)..(252): Homolog of NCBI NO: 12322155 NR Description: protein kinase, putative [Arabidopsis thaliana]
  misc_feature (1)..(252): Homolog of NCBI NO: 15221910 NR Description: protein kinase, putative; protein id: At1g54820.1
  misc_feature (1)..(252): Homolog of NCBI NO: 25405773 NR Description: hypothetical protein T22H22.21 [imported] - thaliana >gi|3776574|gb|AAC64891.1| Similar to T11J7.13
  misc_feature (1)..(247): Homolog of NCBI NO: 7488203 NR Description: probable serine/threonine-specific protein kinase
  misc_feature (1)..(247): Homolog of NCBI NO: 30679031 NR Description: protein kinase family [Arabidopsis thaliana]
  misc_feature (1)..(247): Homolog of NCBI NO: 30696629 NR Description: protein kinase, putative [Arabidopsis thaliana]
  misc_feature (1)..(195): Homolog of NCBI NO: 7434288 NR Description: probable serine/threonine-specific protein kinase

SEQ ID NO: 71252 - protein, 271 aa, Arabidopsis thaliana; identical to SEQ ID NO: 47641
  peptide (1)..(271): Ceres Seq. ID no. 3084653
  misc_feature (1)..(163): Pfam Name: Protein kinase domain Pfam Description: Protein kinase domain
  misc_feature (1)..(271): Homolog of NCBI NO: 11358842 NR Description: serine/threonine-specific protein kinase-like
  misc_feature (1)..(271): Homolog of NCBI NO: 30694859 NR Description: protein kinase family [Arabidopsis thaliana]
  misc_feature (1)..(271): Homolog of NCBI NO: 26449989 NR Description: putative serine/threonine-specific protein kinase
  misc_feature (1)..(239): Homolog of NCBI NO: 12322155 NR Description: protein kinase, putative [Arabidopsis thaliana]
  misc_feature (1)..(239): Homolog of NCBI NO: 15221910 NR Description: protein kinase, putative; protein id: At1g54820.1
  misc_feature (1)..(239): Homolog of NCBI NO: 25405773 NR Description: hypothetical protein T22H22.21 [imported] - thaliana >gi|3776574|gb|AAC64891.1| Similar to T11J7.13
  misc_feature (1)..(234): Homolog of NCBI NO: 7488203 NR Description: probable serine/threonine-specific protein kinase
  misc_feature (1)..(234): Homolog of NCBI NO: 30679031 NR Description: protein kinase family [Arabidopsis thaliana]
  misc_feature (1)..(234): Homolog of NCBI NO: 30696629 NR Description: protein kinase, putative [Arabidopsis thaliana]
  misc_feature (1)..(182): Homolog of NCBI NO: 7434288 NR Description: probable serine/threonine-specific protein kinase

SEQ ID NO: 71253 - DNA, 2019 bp, Arabidopsis thaliana
  misc_feature (1)..(2019): Ceres Seq. ID no. 3084854
  misc_feature: MA Experiment ID: 20000328 Result: Down-regulated in Transcription
  misc_feature: MA Experiment 20000328 PARAMETER Experiment Name: At_42deg_Heat_Sub_P Parameter: Age (day) Value: 14
  misc_feature: MA Experiment 20000328 PARAMETER Experiment Name: At_42deg_Heat_Sub_P Parameter: Organism Value: A. thaliana
  misc_feature: MA Experiment 20000328 PARAMETER Experiment Name: At_42deg_Heat_Sub_P Parameter: Plant Line Value: WS
  misc_feature: MA Experiment 20000328 PARAMETER Experiment Name: At_42deg_Heat_Sub_P Parameter: Temperature (deg C) Value: 42 vs. 22
  misc_feature: MA Experiment 20000328 PARAMETER Experiment Name: At_42deg_Heat_Sub_P Parameter: Timepoint (hr) Value: 6
  misc_feature: MA Experiment 20000328 PARAMETER Experiment Name: At_42deg_Heat_Sub_P Parameter: Tissue Value: Aerial
atgtttttatctcctcgtagtgctcaccaaaaggttggactctctatgctaattgaccctcttcctgaaaaaaataccaaatctggcaactcatccacaattttacgccaccgaacatttcgccaaaccacacattttgtctgctttctacttcgccagggaaagtggccagagctcatctacttcgcaagaactaagcaatctcttgtaagtcaaaaggcagcacaagcaatcatgttgccaaagttcgatccaacagaccaaaaagcttgtctgtctcttcttgaggatgtgactaccaacgtaaagcagattcaagattctgtcttggaagcaatactttcacgtaatgctcataccgagtatcttagtggtttcctcaacggtcaagctgataagaaaagcttcaagaagaatgtacccgttgtaacctacgaagatattaagccttatatcgatcgtatcgccaatggagagccgtctgatctcatctgtgatcgacccatcagtgtactcttgactagctcaggtacttcaggaggagttccgaagctgattcctttgacaacagaggagttggaacagaggatttcgtttgcttctctctatagacctctactctacaagtacatcgagggtattagagaaagaaaatctttcatgttatatttcgtgactcgagaaagcgagactgcttctgggatactggtcaggactatgataacttgtgttttgaaaagcgtgacgccagctaactcttttatctgggatcaatcacagataagcccgcatgcgattacgacttgttcagacactactcagagcatgtactgccaactgctttgtgggcttctacaacgagataatgtaggtcgccttggtgcaccatttgcttcatcctttctcaaaataatcaagttcttggaggatcactggcctgagttttgctcaaacataaggactggttgtctcagtgactggattacagacccccaatgtgtttcagggatcggtaagttcctcactgctcctaatccggaactagcgagccttatcgagcaagaatgcagtcaaacatcatgggaagcaatagtgaagagactatggccaaaagcaaaatgcatcgaagccattgttacaggaaccatggcacagtacaatccattactggaattctatagcggtggtcttcctgtgatttcaacgttttatggcagctctgaatgtttcttcggtctcaatctcaatcctctgtctaagcctaatgaggtgtcgtacaccatcattccatgtatggcttatttcgagttcttagaggttgagaaagactatgaaagtggtcatgatcccgcagagaatcctgttgtagtcgatcttgtcgatgttaaaatcggtcatgattatgaacctgttgtcacaacgtttgctggtttgtataggtaccgtttaggggacgttttaagagtgactggtttctacaacaatgcgccacagtttcatttcgtgggaagacagaaagttgttctgagcatcgacatggacaagacctacgacgaagacctcctcaaggcagtgactaacgcgagtctcctgcttgagccacatgacctaatgctcatggatttcactagccgtgtggattcctcctcgtatccaggtcactacgtgctctactgggaactcgggagaaaagtcaaggacgccaagcttgagcttgaccagaatgttttggaggaatgctgcttcaccattgaggagtctctggacgcggtttacagaaaaggacgaaagaatgataagaacattggaccacttgagattaaggttgttaagcctggcgctttcgacaagctcatgaacttctttctgtctagaggctcttctgtgagtcagtataagacaccgaggtcggtgacgaatgaagaagccttgaagatattggaggccaacgttgtgtccgagtttcttagccagaaaactccgtcgtgggagctacatgagctgcattccagccgataa

SEQ ID NO: 71254 - protein, 672 aa, Arabidopsis thaliana
  peptide (1)..(672): Ceres Seq. ID no. 3084855
  misc_feature (90)..(646): Pfam Name: GH3 auxin-responsive promoter Pfam Description: GH3 auxin-responsive promoter
  misc_feature (79)..(672): Homolog of NCBI NO: 30684377 NR Description: auxin reponsive - like protein [Arabidopsis >gi|26449584|dbj|BAC41918.1| putative auxin responsive protein thaliana] >gi|29028956|gb|AAO64857.1| At5g13370 [Arabidopsis
  misc_feature (257)..(672): Homolog of NCBI NO: 11281348 NR Description: auxin-regulated protein GH3 homolog T22N19.20 -
  misc_feature (79)..(234): Homolog of NCBI NO: 11281348 NR Description: auxin-regulated protein GH3 homolog T22N19.20 -
  misc_feature (79)..(663): Homolog of NCBI NO: 15240608 NR Description: auxin-responsive - like protein; protein id:
  misc_feature (246)..(672): Homolog of NCBI NO: 15240617 NR Description: auxin reponsive - like protein; protein id:
  misc_feature (79)..(241): Homolog of NCBI NO: 15240617 NR Description: auxin reponsive - like protein; protein id:
  misc_feature (79)..(664): Homolog of NCBI NO: 15217844 NR Description: auxin-regulated GH3 protein, putative; protein At1g28130.1, supported by cDNA: gi_15450364 [Arabidopsis
  misc_feature (94)..(662): Homolog of NCBI NO: 15242095 NR Description: auxin-responsive GH3-like protein; protein id:
  misc_feature (92)..(657): Homolog of NCBI NO: 15220661 NR Description: GH3-like auxin-regulated protein; protein id:
  misc_feature (92)..(663): Homolog of NCBI NO: 15239653 NR Description: auxin-responsive-like protein; protein id: supported by cDNA: gi_11041725, supported by cDNA: gi_17978965
MFLSPRSAHQKVGLSMLIDPLPEKNTKSGNSSTILRHRTFRQTTHFVCFLLRQGKWPELIYFARTKQSLVSQKAAQAIMLPKFDPTDQKACLSLLEDVTTNVKQIQDSVLEAILSRNAHTEYLSGFLNGQADKKSFKKNVPVVTYEDIKPYIDRIANGEPSDLICDRPISVLLTSSGTSGGVPKLIPLTTEELEQRISFASLYRPLLYKYIEGIRERKSFMLYFVTRESETASGILVRTMITCVLKSVTPANSFIWDQSQISPHAITTCSDTTQSMYCQLLCGLLQRDNVGRLGAPFASSFLKIIKFLEDHWPEFCSNIRTGCLSDWITDPQCVSGIGKFLTAPNPELASLIEQECSQTSWEAIVKRLWPKAKCIEAIVTGTMAQYNPLLEFYSGGLPVISTFYGSSECFFGLNLNPLSKPNEVSYTIIPCMAYFEFLEVEKDYESGHDPAENPVVVDLVDVKIGHDYEPVVTTFAGLYRYRLGDVLRVTGFYNNAPQFHFVGRQKVVLSIDMDKTYDEDLLKAVTNASLLLEPHDLMLMDFTSRVDSSSYPGHYVLYWELGRKVKDAKLELDQNVLEECCFTIEESLDAVYRKGRKNDKNIGPLEIKVVKPGAFDKLMNFFLSRGSSVSQYKTPRSVTNEEALKILEANVVSEFLSQKTPSWELHELHSSR

SEQ ID NO: 71255 - protein, 657 aa, Arabidopsis thaliana
  peptide (1)..(657): Ceres Seq. ID no. 3084856
  misc_feature (75)..(631): Pfam Name: GH3 auxin-responsive promoter Pfam Description: GH3 auxin-responsive promoter
  misc_feature (64)..(657): Homolog of NCBI NO: 30684377 NR Description: auxin reponsive - like protein [Arabidopsis >gi|26449584|dbj|BAC41918.1| putative auxin responsive protein thaliana] >gi|29028956|gb|AAO64857.1| At5g13370 [Arabidopsis
  misc_feature (242)..(657): Homolog of NCBI NO: 11281348 NR Description: auxin-regulated protein GH3 homolog T22N19.20 -
  misc_feature (64)..(219): Homolog of NCBI NO: 11281348 NR Description: auxin-regulated protein GH3 homolog T22N19.20 -
  misc_feature (64)..(648): Homolog of NCBI NO: 15240608 NR Description: auxin-responsive - like protein; protein id:
  misc_feature (231)..(657): Homolog of NCBI NO: 15240617 NR Description: auxin reponsive - like protein; protein id:
  misc_feature (64)..(226): Homolog of NCBI NO: 15240617 NR Description: auxin reponsive - like protein; protein id:
  misc_feature (64)..(649): Homolog of NCBI NO: 15217844 NR Description: auxin-regulated GH3 protein, putative; protein At1g28130.1, supported by cDNA: gi_15450364 [Arabidopsis
  misc_feature (79)..(647): Homolog of NCBI NO: 15242095 NR Description: auxin-responsive GH3-like protein; protein id:
  misc_feature (77)..(642): Homolog of NCBI NO: 15220661 NR Description: GH3-like auxin-regulated protein; protein id:
  misc_feature (77)..(648): Homolog of NCBI NO: 15239653 NR Description: auxin-responsive-like protein; protein id: supported by cDNA: gi_11041725, supported by cDNA: gi_17978965
MLIDPLPEKNTKSGNSSTILRHRTFRQTTHFVCFLLRQGKWPELIYFARTKQSLVSQKAAQAIMLPKFDPTDQKACLSLLEDVTTNVKQIQDSVLEAILSRNAHTEYLSGFLNGQADKKSFKKNVPVVTYEDIKPYIDRIANGEPSDLICDRPISVLLTSSGTSGGVPKLIPLTTEELEQRISFASLYRPLLYKYIEGIRERKSFMLYFVTRESETASGILVRTMITCVLKSVTPANSFIWDQSQISPHAITTCSDTTQSMYCQLLCGLLQRDNVGRLGAPFASSFLKIIKFLEDHWPEFCSNIRTGCLSDWITDPQCVSGIGKFLTAPNPELASLIEQECSQTSWEAIVKRLWPKAKCIEAIVTGTMAQYNPLLEFYSGGLPVISTFYGSSECFFGLNLNPLSKPNEVSYTIIPCMAYFEFLEVEKDYESGHDPAENPVVVDLVDVKIGHDYEPVVTTFAGLYRYRLGDVLRVTGFYNNAPQFHFVGRQKVVLSIDMDKTYDEDLLKAVTNASLLLEPHDLMLMDFTSRVDSSSYPGHYVLYWELGRKVKDAKLELDQNVLEECCFTIEESLDAVYRKGRKNDKNIGPLEIKVVKPGAFDKLMNFFLSRGSSVSQYKTPRSVTNEEALKILEANVVSEFLSQKTPSWELHELHSSR

SEQ ID NO: 71256 - protein, 594 aa, Arabidopsis thaliana
  peptide (1)..(594): Ceres Seq. ID no. 3084857
  misc_feature (12)..(568): Pfam Name: GH3 auxin-responsive promoter Pfam Description: GH3 auxin-responsive promoter
  misc_feature (1)..(594): Homolog of NCBI NO: 30684377 NR Description: auxin reponsive - like protein [Arabidopsis >gi|26449584|dbj|BAC41918.1| putative auxin responsive protein thaliana] >gi|29028956|gb|AAO64857.1| At5g13370 [Arabidopsis
  misc_feature (179)..(594): Homolog of NCBI NO: 11281348 NR Description: auxin-regulated protein GH3 homolog T22N19.20 -
  misc_feature (1)..(156): Homolog of NCBI NO: 11281348 NR Description: auxin-regulated protein GH3 homolog T22N19.20 -
  misc_feature (1)..(585): Homolog of NCBI NO: 15240608 NR Description: auxin-responsive - like protein; protein id:
  misc_feature (168)..(594): Homolog of NCBI NO: 15240617 NR Description: auxin reponsive - like protein; protein id:
  misc_feature (1)..(163): Homolog of NCBI NO: 15240617 NR Description: auxin reponsive - like protein; protein id:
  misc_feature (1)..(586): Homolog of NCBI NO: 15217844 NR Description: auxin-regulated GH3 protein, putative; protein At1g28130.1, supported by cDNA: gi_15450364 [Arabidopsis
  misc_feature (16)..(584): Homolog of NCBI NO: 15242095 NR Description: auxin-responsive GH3-like protein; protein id:
  misc_feature (14)..(579): Homolog of NCBI NO: 15220661 NR Description: GH3-like auxin-regulated protein; protein id:
  misc_feature (14)..(585): Homolog of NCBI NO: 15239653 NR Description: auxin-responsive-like protein; protein id: supported by cDNA: gi_11041725, supported by cDNA: gi_17978965
MLPKFDPTDQKACLSLLEDVTTNVKQIQDSVLEAILSRNAHTEYLSGFLNGQADKKSFKKNVPVVTYEDIKPYIDRIANGEPSDLICDRPISVLLTSSGTSGGVPKLIPLTTEELEQRISFASLYRPLLYKYIEGIRERKSFMLYFVTRESETASGILVRTMITCVLKSVTPANSFIWDQSQISPHAITTCSDTTQSMYCQLLCGLLQRDNVGRLGAPFASSFLKIIKFLEDHWPEFCSNIRTGCLSDWITDPQCVSGIGKFLTAPNPELASLIEQECSQTSWEAIVKRLWPKAKCIEAIVTGTMAQYNPLLEFYSGGLPVISTFYGSSECFFGLNLNPLSKPNEVSYTIIPCMAYFEFLEVEKDYESGHDPAENPVVVDLVDVKIGHDYEPVVTTFAGLYRYRLGDVLRVTGFYNNAPQFHFVGRQKVVLSIDMDKTYDEDLLKAVTNASLLLEPHDLMLMDFTSRVDSSSYPGHYVLYWELGRKVKDAKLELDQNVLEECCFTIEESLDAVYRKGRKNDKNIGPLEIKVVKPGAFDKLMNFFLSRGSSVSQYKTPRSVTNEEALKILEANVVSEFLSQKTPSWELHELHSSR

SEQ ID NO: 71257 - DNA, 1245 bp, Arabidopsis thaliana
  misc_feature (1)..(1245): Ceres Seq. ID no. 3085045
  misc_feature: MA Experiment ID: 20000184 Result: Down-regulated in Transcription
  misc_feature: MA Experiment 20000184 PARAMETER Experiment Name: At_Shoots__P Parameter: Age (day) Value: 7
  misc_feature: MA Experiment 20000184 PARAMETER Experiment Name: At_Shoots__P Parameter: Tissue Value: Shoots vs. Whole Plant
atggattaccgaccttctgatagtagtggtacagatgatgacctgcctccatctcatcaaggtagatatcaaagaaacgccagacctaccgggaatggaaggccttcagttctcaattctgctcctttatcacgggtgcacaatgaaatggaaactcaaattcatctcattgagcaagaagcttatagctcgatactccgcgcatttaaagcccagtccgatgctattacctgggagaaagaaagtttgatcactgaactcagaaaagaacttcgagtgtctgatgaggaacacagagagctgttatcaagggttaacgctgatgaaatgatcaggcgaataagggaatggagaaaggcaaacagccttcagtctagtgttcctcagctggttcatgatgctccgagtccggctgtatcaggatcacgtaagaagcaaaagacatcacaatcaatcgcctcattagcgatgggcccaccatctccttctttgcacccttcaatgcaaccatcgtcatctgcactaagaaggggaggtcctccaccaggtccaaagaccaagaagccaaagacatcgatgcagtacccatctacaggcattgctggaaggccccaggctggcgctttaacaaatgaaccaggtgaatcgggatcatatgacccgttggttggaaggaaggtatggacgaagtggcctgatgacaaccaatactacgaagctgttataactgactacaaccctgttgaggggcgtcatgctttagtgtatgatattaactctgcgaatgaaacctgggaatgggtaaatcttaaagagatatctccgggagatatcagatgggaaggtgaagatcctgggatttctcgtaaaggaggacatcctgggcaaggccgtggaacaaaaaccatggctcgtggtggtcctgcaagcaatgcgggtggtagaggtaggggaagcatgaggatgcagcaacctaagacacagaatggcatcggaaagaaagctttaggcgaaatcgaaattctccacactgagacattgttaaaagaggtggaaaaagtttttgggtcagttaaccccaacccagcagaggtagagaaggcaaagagagtgctgagagatcatgaactagctcttatggatgccatcgcaaagcttgaagaaatatcagatggagaaagcgatgatggagccggagcattagagttgcaaaaaggtgttgtagatggtggtggcaaaatgtga

SEQ ID NO: 71258 - protein, 414 aa, Arabidopsis thaliana
  peptide (1)..(414): Ceres Seq. ID no. 3085046
  misc_feature (50)..(123): Pfam Name: ENT domain Pfam Description: ENT domain
  misc_feature (1)..(414): Homolog of NCBI NO: 11358228 NR Description: hypothetical protein T24H18.190 - Arabidopsis >gi|7630058|emb|CAB88266.1| putative protein [Arabidopsis
  misc_feature (1)..(394): Homolog of NCBI NO: 30684221 NR Description: expressed protein [Arabidopsis thaliana]
  misc_feature (187)..(395): Homolog of NCBI NO: 15240146 NR Description: putative protein; protein id: At5g06780.1, by cDNA: 157058., supported by cDNA: gi_16226578 [Arabidopsis >gi|9759306|dbj|BAB09812.1|
  misc_feature (46)..(155): Homolog of NCBI NO: 15240146 NR Description: putative protein; protein id: At5g06780.1, by cDNA: 157058., supported by cDNA: gi_16226578 [Arabidopsis >gi|9759306|dbj|BAB09812.1|
  misc_feature (187)..(395): Homolog of NCBI NO: 21553685 NR Description: unknown [Arabidopsis thaliana]
  misc_feature (50)..(155): Homolog of NCBI NO: 21553685 NR Description: unknown [Arabidopsis thaliana]
  misc_feature (129)..(406): Homolog of NCBI NO: 38637206 NR Description: unknown protein [Oryza sativa (japonica
  misc_feature (1)..(329): Homolog of NCBI NO: 38637206 NR Description: unknown protein [Oryza sativa (japonica
  misc_feature (117)..(395): Homolog of NCBI NO: 15229958 NR Description: unknown protein; protein id: At3g12140.1
  misc_feature (117)..(393): Homolog of NCBI NO: 9294111 NR Description: emb|CAB88266.1~gene_id:T23B7.8~similar to unknown
MDYRPSDSSGTDDDLPPSHQGRYQRNARPTGNGRPSVLNSAPLSRVHNEMETQIHLIEQEAYSSILRAFKAQSDAITWEKESLITELRKELRVSDEEHRELLSRVNADEMIRRIREWRKANSLQSSVPQLVHDAPSPAVSGSRKKQKTSQSIASLAMGPPSPSLHPSMQPSSSALRRGGPPPGPKTKKPKTSMQYPSTGIAGRPQAGALTNEPGESGSYDPLVGRKVWTKWPDDNQYYEAVITDYNPVEGRHALVYDINSANETWEWVNLKEISPGDIRWEGEDPGISRKGGHPGQGRGTKTMARGGPASNAGGRGRGSMRMQQPKTQNGIGKKALGEIEILHTETLLKEVEKVFGSVNPNPAEVEKAKRVLRDHELALMDAIAKLEEISDGESDDGAGALELQKGVVDGGGKM

SEQ ID NO: 71259 - protein, 365 aa, Arabidopsis thaliana
  peptide (1)..(365): Ceres Seq. ID no. 3085047
  misc_feature (1)..(74): Pfam Name: ENT domain Pfam Description: ENT domain
  misc_feature (138)..(346): Homolog of NCBI NO: 15240146 NR Description: putative protein; protein id: At5g06780.1, by cDNA: 157058., supported by cDNA: gi_16226578 [Arabidopsis >gi|9759306|dbj|BAB09812.1|
  misc_feature (1)..(106): Homolog of NCBI NO: 15240146 NR Description: putative protein; protein id: At5g06780.1, by cDNA: 157058., supported by cDNA: gi_16226578 [Arabidopsis >gi|9759306|dbj|BAB09812.1|
  misc_feature (138)..(346): Homolog of NCBI NO: 21553685 NR Description: unknown [Arabidopsis thaliana]
  misc_feature (1)..(106): Homolog of NCBI NO: 21553685 NR Description: unknown [Arabidopsis thaliana]
  misc_feature (1)..(365): Homolog of NCBI NO: 11358228 NR Description: hypothetical protein T24H18.190 - Arabidopsis >gi|7630058|emb|CAB88266.1| putative protein [Arabidopsis
  misc_feature (1)..(345): Homolog of NCBI NO: 30684221 NR Description: expressed protein [Arabidopsis thaliana]
  misc_feature (80)..(357): Homolog of NCBI NO: 38637206 NR Description: unknown protein [Oryza sativa (japonica
  misc_feature (1)..(280): Homolog of NCBI NO: 38637206 NR Description: unknown protein [Oryza sativa (japonica
  misc_feature (68)..(346): Homolog of NCBI NO: 15229958 NR Description: unknown protein; protein id: At3g12140.1
  misc_feature (68)..(344): Homolog of NCBI NO: 9294111 NR Description: emb|CAB88266.1~gene_id:T23B7.8~similar to unknown
METQIHLIEQEAYSSILRAFKAQSDAITWEKESLITELRKELRVSDEEHRELLSRVNADEMIRRIREWRKANSLQSSVPQLVHDAPSPAVSGSRKKQKTSQSIASLAMGPPSPSLHPSMQPSSSALRRGGPPPGPKTKKPKTSMQYPSTGIAGRPQAGALTNEPGESGSYDPLVGRKVWTKWPDDNQYYEAVITDYNPVEGRHALVYDINSANETWEWVNLKEISPGDIRWEGEDPGISRKGGHPGQGRGTKTMARGGPASNAGGRGRGSMRMQQPKTQNGIGKKALGEIEILHTETLLKEVEKVFGSVNPNPAEVEKAKRVLRDHELALMDAIAKLEEISDGESDDGAGALELQKGVVDGGGKM

SEQ ID NO: 71260 - protein, 305 aa, Arabidopsis thaliana
  peptide (1)..(305): Ceres Seq. ID no. 3085048
  misc_feature (1)..(305): Homolog of NCBI NO: 11358228 NR Description: hypothetical protein T24H18.190 - Arabidopsis >gi|7630058|emb|CAB88266.1| putative protein [Arabidopsis
  misc_feature (1)..(285): Homolog of NCBI NO: 30684221 NR Description: expressed protein [Arabidopsis thaliana]
  misc_feature (78)..(286): Homolog of NCBI NO: 15240146 NR Description: putative protein; protein id: At5g06780.1, by cDNA: 157058., supported by cDNA: gi_16226578 [Arabidopsis >gi|9759306|dbj|BAB09812.1|
  misc_feature (1)..(46): Homolog of NCBI NO: 15240146 NR Description: putative protein; protein id: At5g06780.1, by cDNA: 157058., supported by cDNA: gi_16226578 [Arabidopsis >gi|9759306|dbj|BAB09812.1|
  misc_feature (78)..(286): Homolog of NCBI NO: 21553685 NR Description: unknown [Arabidopsis thaliana]
  misc_feature (1)..(46): Homolog of NCBI NO: 21553685 NR Description: unknown [Arabidopsis thaliana]
  misc_feature (20)..(297): Homolog of NCBI NO: 38637206 NR Description: unknown protein [Oryza sativa (japonica
  misc_feature (1)..(220): Homolog of NCBI NO: 38637206 NR Description: unknown protein [Oryza sativa (japonica
  misc_feature (8)..(286): Homolog of NCBI NO: 15229958 NR Description: unknown protein; protein id: At3g12140.1
  misc_feature (8)..(284): Homolog of NCBI NO: 9294111 NR Description: emb|CAB88266.1~gene_id:T23B7.8~similar to unknown
MIRRIREWRKANSLQSSVPQLVHDAPSPAVSGSRKKQKTSQSIASLAMGPPSPSLHPSMQPSSSALRRGGPPPGPKTKKPKTSMQYPSTGIAGRPQAGALTNEPGESGSYDPLVGRKVWTKWPDDNQYYEAVITDYNPVEGRHALVYDINSANETWEWVNLKEISPGDIRWEGEDPGISRKGGHPGQGRGTKTMARGGPASNAGGRGRGSMRMQQPKTQNGIGKKALGEIEILHTETLLKEVEKVFGSVNPNPAEVEKAKRVLRDHELALMDAIAKLEEISDGESDDGAGALELQKGVVDGGGKM

SEQ ID NO: 71261 - DNA, 1341 bp, Arabidopsis thaliana
  misc_feature (1)..(1341): Ceres Seq. ID no. 3085140
  misc_feature: MA Experiment ID: 20000184 Result: Up-regulated in Transcription
  misc_feature: MA Experiment 20000184 PARAMETER Experiment Name: At_Shoots__P Parameter: Age (day) Value: 7
  misc_feature: MA Experiment 20000184 PARAMETER Experiment Name: At_Shoots__P Parameter: Tissue Value: Shoots vs. Whole Plant
atgatccgttcttcgattgtaattttatctctgttactaatttcacacttggtttctgcaaaagttctgttgatcggtaacagcacatctctctccttcgacgacgtcgaagccactttcactccgatgattaagagatcggatcaaggcggtgtgttgtatgtagcagagccactcgatgcttgttcggatttggtgaatacggtgaatgtgaaaaatggaactactgtgtctcctccgtatgtgttgattatccgcggtggttgtagtttcgaagataagattaggaatgctcaaaaggctggttataaagctgctattgtttatgactatgaagattttgggttcttagtatcaagaaacccctctggtgtacttatttatggtacgtttgtctccaaagcaactggggaagtacttaaagagtatgcgggtcgtaccgattttgaagtgtggctcatgccaagtttcgagacttcagcatggtcaatcatggctatttctttcatatctctcctcgccatgtcggctgtgctcgctacttgcttctttgtccgtaggcatcgagttaggcgtcggcgtattctggctcttaatggcaatgactttcatcgtatgcccaaaagcatgataatacgtatgcctactaccatatttaacggtatttgtgatgaagcaactacatctatattgtgctgcatatgccttgagaattatgagaaaggggacaagctaaggatcctaccttgccatcacaaatttcatgttgcttgtgtagacttgtggcttggccagaggaaatccttttgcccggtttgcaaacgcgatgcaagaagcatcagtaccgacaagcccccatcagagcacacaccctttctttctcggactcctagcatgaccccgacgtcatcgtttctcttatcatcatcctccacaaccccattgcagtcatctcatgagctaccaatatccatcagagtagacccttctttaccatccacctcaatgcagccacacacagttcctatgtatctctcccactctcgctcccacacaagcttccaaaatggatcaaaccgattttcccggcctataccagttagccggagttcagcagatctcaggaacgccgtttcccaaagatcttacaactcaccccaccaggtttctttgcctcgtttcctccactcaagatatacgcacatacttggcccgggaaatgcatcaagaagccaggttgttgggttgttaacaagccagcgcgagcattcacttcatcaaaatgactcgcgcaggtctttcattcactttgcatctgcgagctccttaccaggctggtaa

SEQ ID NO: 71262 - protein, 446 aa, Arabidopsis thaliana
  peptide (1)..(446): Ceres Seq. ID no. 3085141
  misc_feature (43)..(144): Pfam Name: PA domain Pfam Description: PA domain
  misc_feature (1)..(446): Homolog of NCBI NO: 15233945 NR Description: putative protein; protein id: At4g09560.1
  misc_feature (1)..(444): Homolog of NCBI NO: 22330577 NR Description: unknown protein; protein id: At1g71980.1, by cDNA: gi_17529199 [Arabidopsis thaliana] unknown protein [Arabidopsis thaliana]
  misc_feature (6)..(444): Homolog of NCBI NO: 6942149 NR Description: ReMembR-H2 protein JR702 [Arabidopsis thaliana]
  misc_feature (27)..(444): Homolog of NCBI NO: 25406132 NR Description: unknown protein F17M19.13 [imported] -
  misc_feature (11)..(407): Homolog of NCBI NO: 38637053 NR Description: putative ReMembR-H2 protein [Oryza sativa
  misc_feature (13)..(441): Homolog of NCBI NO: 19071633 NR Description: putative integral membrane protein [Oryza sativa
  misc_feature (4)..(330): Homolog of NCBI NO: 25403460 NR Description: protein F15O4.19 [imported] - Arabidopsis >gi|8778343|gb|AAF79351.1|AC007887_10 F15O4.19 [Arabidopsis
  misc_feature (4)..(327): Homolog of NCBI NO: 15219670 NR Description: integral membrane protein, putative; protein id:
  misc_feature (42)..(327): Homolog of NCBI NO: 15219668 NR Description: integral membrane protein, putative; protein id:
  misc_feature (11)..(263): Homolog of NCBI NO: 25403460 NR Description: protein F15O4.19 [imported] - Arabidopsis >gi|8778343|gb|AAF79351.1|AC007887_10 F15O4.19 [Arabidopsis
MIRSSIVILSLLLISHLVSAKVLLIGNSTSLSFDDVEATFTPMIKRSDQGGVLYVAEPLDACSDLVNTVNVKNGTTVSPPYVLIIRGGCSFEDKIRNAQKAGYKAAIVYDYEDFGFLVSRNPSGVLIYGTFVSKATGEVLKEYAGRTDFEVWLMPSFETSAWSIMAISFISLLAMSAVLATCFFVRRHRVRRRRILALNGNDFHRMPKSMIIRMPTTIFNGICDEATTSILCCICLENYEKGDKLRILPCHHKFHVACVDLWLGQRKSFCPVCKRDARSISTDKPPSEHTPFLSRTPSMTPTSSFLLSSSSTTPLQSSHELPISIRVDPSLPSTSMQPHTVPMYLSHSRSHTSFQNGSNRFSRPIPVSRSSADLRNAVSQRSYNSPHQVSLPRFLHSRYTHILGPGNASRSQVVGLLTSQREHSLHQNDSRRSFIHFASASSLPGW

SEQ ID NO: 71263 - protein, 404 aa, Arabidopsis thaliana
  peptide (1)..(404): Ceres Seq. ID no. 3085142
  misc_feature (1)..(102): Pfam Name: PA domain Pfam Description: PA domain
  misc_feature (1)..(404): Homolog of NCBI NO: 15233945 NR Description: putative protein; protein id: At4g09560.1
  misc_feature (1)..(402): Homolog of NCBI NO: 22330577 NR Description: unknown protein; protein id: At1g71980.1, by cDNA: gi_17529199 [Arabidopsis thaliana] unknown protein [Arabidopsis thaliana]
  misc_feature (1)..(402): Homolog of NCBI NO: 6942149 NR Description: ReMembR-H2 protein JR702 [Arabidopsis thaliana]
  misc_feature (1)..(402): Homolog of NCBI NO: 25406132 NR Description: unknown protein F17M19.13 [imported] -
  misc_feature (1)..(365): Homolog of NCBI NO: 38637053 NR Description: putative ReMembR-H2 protein [Oryza sativa
  misc_feature (1)..(399): Homolog of NCBI NO: 19071633 NR Description: putative integral membrane protein [Oryza sativa
  misc_feature (1)..(288): Homolog of NCBI NO: 25403460 NR Description: protein F15O4.19 [imported] - Arabidopsis >gi|8778343|gb|AAF79351.1|AC007887_10 F15O4.19 [Arabidopsis
  misc_feature (1)..(285): Homolog of NCBI NO: 15219670 NR Description: integral membrane protein, putative; protein id:
  misc_feature (1)..(285): Homolog of NCBI NO: 15219668 NR Description: integral membrane protein, putative; protein id:
  misc_feature (1)..(221): Homolog of NCBI NO: 25403460 NR Description: protein F15O4.19 [imported] - Arabidopsis >gi|8778343|gb|AAF79351.1|AC007887_10 F15O4.19 [Arabidopsis
MIKRSDQGGVLYVAEPLDACSDLVNTVNVKNGTTVSPPYVLIIRGGCSFEDKIRNAQKAGYKAAIVYDYEDFGFLVSRNPSGVLIYGTFVSKATGEVLKEYAGRTDFEVWLMPSFETSAWSIMAISFISLLAMSAVLATCFFVRRHRVRRRRILALNGNDFHRMPKSMIIRMPTTIFNGICDEATTSILCCICLENYEKGDKLRILPCHHKFHVACVDLWLGQRKSFCPVCKRDARSISTDKPPSEHTPFLSRTPSMTPTSSFLLSSSSTTPLQSSHELPISIRVDPSLPSTSMQPHTVPMYLSHSRSHTSFQNGSNRFSRPIPVSRSSADLRNAVSQRSYNSPHQVSLPRFLHSRYTHILGPGNASRSQVVGLLTSQREHSLHQNDSRRSFIHFASASSLPGW

SEQ ID NO: 71264 - protein, 293 aa, Arabidopsis thaliana; identical to SEQ ID NO: 70777
  peptide (1)..(293): Ceres Seq. ID no. 3085143
  misc_feature (79)..(120): Pfam Name: Zinc finger, C3HC4 type (RING finger) Pfam Description: Zinc finger, C3HC4 type (RING finger)
  misc_feature (1)..(293): Homolog of NCBI NO: 15233945 NR Description: putative protein; protein id: At4g09560.1
  misc_feature (1)..(291): Homolog of NCBI NO: 22330577 NR Description: unknown protein; protein id: At1g71980.1, by cDNA: gi_17529199 [Arabidopsis thaliana] unknown protein [Arabidopsis thaliana]
  misc_feature (1)..(291): Homolog of NCBI NO: 6942149 NR Description: ReMembR-H2 protein JR702 [Arabidopsis thaliana]
  misc_feature (1)..(291): Homolog of NCBI NO: 25406132 NR Description: unknown protein F17M19.13 [imported] -
  misc_feature (1)..(254): Homolog of NCBI NO: 38637053 NR Description: putative ReMembR-H2 protein [Oryza sativa
  misc_feature (1)..(288): Homolog of NCBI NO: 19071633 NR Description: putative integral membrane protein [Oryza sativa
  misc_feature (1)..(177): Homolog of NCBI NO: 25403460 NR Description: protein F15O4.19 [imported] - Arabidopsis >gi|8778343|gb|AAF79351.1|AC007887_10 F15O4.19 [Arabidopsis
  misc_feature (1)..(174): Homolog of NCBI NO: 15219670 NR Description: integral membrane protein, putative; protein id:
  misc_feature (1)..(174): Homolog of NCBI NO: 15219668 NR Description: integral membrane protein, putative; protein id:
  misc_feature (1)..(110): Homolog of NCBI NO: 25403460 NR Description: protein F15O4.19 [imported] - Arabidopsis >gi|8778343|gb|AAF79351.1|AC007887_10 F15O4.19 [Arabidopsis

SEQ ID NO: 71265 - DNA, 1086 bp, Arabidopsis thaliana
  misc_feature (1)..(1086): Ceres Seq. ID no. 3085402
  misc_feature: MA Experiment ID: 20000180 Result: Up-regulated in Transcription
  misc_feature: MA Experiment 20000180 PARAMETER Experiment Name: At_Germinating_Seeds_P Parameter: Age (hr) Value: 24 vs. 0
  misc_feature: MA Experiment 20000180 PARAMETER Experiment Name: At_Germinating_Seeds_P Parameter: Tissue Value: Germinating Seeds
  misc_feature: MA Experiment ID: 20000184 Result: Down-regulated in Transcription
  misc_feature: MA Experiment 20000184 PARAMETER Experiment Name: At_Shoots__P Parameter: Age (day) Value: 7
  misc_feature: MA Experiment 20000184 PARAMETER Experiment Name: At_Shoots__P Parameter: Tissue Value: Shoots vs. Whole Plant
  misc_feature: MA Experiment ID: 20000185 Result: Up-regulated in Transcription
  misc_feature: MA Experiment 20000185 PARAMETER Experiment Name: At_Roots__P Parameter: Age (day) Value: 7 vs. 21
  misc_feature: MA Experiment 20000185 PARAMETER Experiment Name: At_Roots__P Parameter: Organism Value: A. thaliana
  misc_feature: MA Experiment 20000185 PARAMETER Experiment Name: At_Roots__P Parameter: Tissue Value: Roots vs. Whole Plant
  misc_feature: MA Experiment ID: 20000227 Result: Up-regulated in Transcription
  misc_feature: MA Experiment 20000227 PARAMETER Experiment Name: At_Root-Tips-vs-Tops_P Parameter: Tissue Value: Root Tips vs. Root Tops
  misc_feature: MA Experiment ID: 20000264 Result: Up-regulated in Transcription
  misc_feature: MA Experiment 20000264 PARAMETER Experiment Name: At_Open_Flower_P Parameter: Age (day) Value: 21
  misc_feature: MA Experiment 20000264 PARAMETER Experiment Name: At_Open_Flower_P Parameter: Plant Line Value: WS
  misc_feature: MA Experiment 20000264 PARAMETER Experiment Name: At_Open_Flower_P Parameter: Tissue Value: Open Flower vs. Whole Plant
  misc_feature: MA Experiment ID: 20000265 Result: Down-regulated in Transcription
  misc_feature: MA Experiment 20000265 PARAMETER Experiment Name: At_Open_Flower_P Parameter: Age (day) Value: 21
  misc_feature: MA Experiment 20000265 PARAMETER Experiment Name: At_Open_Flower_P Parameter: Plant Line Value: WS
  misc_feature: MA Experiment 20000265 PARAMETER Experiment Name: At_Open_Flower_P Parameter: Tissue Value: Closed Flower vs. Whole Plant
  misc_feature: MA Experiment ID: 20000286 Result: Up-regulated in Transcription
  misc_feature: MA Experiment 20000286 PARAMETER Experiment Name: At_Open_Flower_P Parameter: Age (day) Value: 21
  misc_feature: MA Experiment 20000286 PARAMETER Experiment Name: At_Open_Flower_P Parameter: Plant Line Value: WS
  misc_feature: MA Experiment 20000286 PARAMETER Experiment Name: At_Open_Flower_P Parameter: Tissue Value: Half Open vs. Whole Plant
  misc_feature: MA Experiment ID: 20000438 Result: Down-regulated in Transcription
  misc_feature: MA Experiment 20000438 PARAMETER Experiment Name: At_Shoots__P Parameter: Age (day) Value: 14
  misc_feature: MA Experiment 20000438 PARAMETER Experiment Name: At_Shoots__P Parameter: Tissue Value: Shoots vs. Whole Plant
  misc_feature: MA Experiment ID: 20000439 Result: Up-regulated in Transcription
  misc_feature: MA Experiment 20000439 PARAMETER Experiment Name: At_Roots__P Parameter: Age (day) Value: 14 vs. 21
  misc_feature: MA Experiment 20000439 PARAMETER Experiment Name: At_Roots__P Parameter: Organism Value: A. thaliana
  misc_feature: MA Experiment 20000439 PARAMETER Experiment Name: At_Roots__P Parameter: Tissue Value: Roots vs. Whole Plant
  misc_feature: MA Experiment ID: 20000527 Result: Down-regulated in Transcription
  misc_feature: MA Experiment 20000527 PARAMETER Experiment Name: At_10percent_PEG_P Parameter: Age (day) Value: 20
  misc_feature: MA Experiment 20000527 PARAMETER Experiment Name: At_10percent_PEG_P Parameter: Organism Value: A. thaliana
  misc_feature: MA Experiment 20000527 PARAMETER Experiment Name: At_10percent_PEG_P Parameter: Plant Line Value: WS
  misc_feature: MA Experiment 20000527 PARAMETER Experiment Name: At_10percent_PEG_P Parameter: Timepoint (day) Value: 20
  misc_feature: MA Experiment 20000527 PARAMETER Experiment Name: At_10percent_PEG_P Parameter: Tissue Value: Whole Plant
  misc_feature: MA Experiment 20000527 PARAMETER Experiment Name: At_10percent_PEG_P Parameter: Treatment Value: 10percent PEG vs. No Treatment
  misc_feature: MA Experiment ID: 20000794 Result: Up-regulated in Transcription
  misc_feature: MA Experiment 20000794 PARAMETER Experiment Name: At_Petals_P Parameter: Age (day) Value: 23-25 days
  misc_feature: MA Experiment 20000794 PARAMETER Experiment Name: At_Petals_P Parameter: Plant Line Value: WS
  misc_feature: MA Experiment 20000794 PARAMETER Experiment Name: At_Petals_P Parameter: Tissue Value: Petals vs. Whole plant
  misc_feature: MA Experiment ID: 20001451 Result: Up-regulated in Transcription
  misc_feature: MA Experiment 20001451 PARAMETER Experiment Name: At_Far-red-induction_P Parameter: Age (day) Value: 7
  misc_feature: MA Experiment 20001451 PARAMETER Experiment Name: At_Far-red-induction_P Parameter: Light Value: Far-red vs. White
  misc_feature: MA Experiment 20001451 PARAMETER Experiment Name: At_Far-red-induction_P Parameter: Organism Value: A. thaliana
  misc_feature: MA Experiment 20001451 PARAMETER Experiment Name: At_Far-red-induction_P Parameter: Plant Line Value: Columbia
  misc_feature: MA Experiment 20001451 PARAMETER Experiment Name: At_Far-red-induction_P Parameter: Timepoint (hr) Value: 24
  misc_feature: MA Experiment 20001451 PARAMETER Experiment Name: At_Far-red-induction_P Parameter: Tissue Value: Whole Plant
  misc_feature: MA Experiment ID: 20001554 Result: Up-regulated in Transcription
  misc_feature: MA Experiment 20001554 PARAMETER Experiment Name: At_Drought_Soil_Dry_P Parameter: Age (day) Value: 21
  misc_feature: MA Experiment 20001554 PARAMETER Experiment Name: At_Drought_Soil_Dry_P Parameter: Organism Value: A. thaliana
  misc_feature: MA Experiment 20001554 PARAMETER Experiment Name: At_Drought_Soil_Dry_P Parameter: Plant Line Value: WS
  misc_feature: MA Experiment 20001554 PARAMETER Experiment Name: At_Drought_Soil_Dry_P Parameter: Post Timepoint (hr) Value: None
  misc_feature: MA Experiment 20001554 PARAMETER Experiment Name: At_Drought_Soil_Dry_P Parameter: Post-Treatment Value: None
  misc_feature: MA Experiment 20001554 PARAMETER Experiment Name: At_Drought_Soil_Dry_P Parameter: Timepoint (day) Value: 7
  misc_feature: MA Experiment 20001554 PARAMETER Experiment Name: At_Drought_Soil_Dry_P Parameter: Treatment Value: Drought vs. No Drought
  misc_feature: MA Experiment ID: 20001556 Result: Up-regulated in Transcription
  misc_feature: MA Experiment 20001556 PARAMETER Experiment Name: At_Drought_Soil_Dry_P Parameter: Age (day) Value: 26
  misc_feature: MA Experiment 20001556 PARAMETER Experiment Name: At_Drought_Soil_Dry_P Parameter: Organism Value: A. thaliana
  misc_feature: MA Experiment 20001556 PARAMETER Experiment Name: At_Drought_Soil_Dry_P Parameter: Plant Line Value: WS
  misc_feature: MA Experiment 20001556 PARAMETER Experiment Name: At_Drought_Soil_Dry_P Parameter: Post Timepoint (hr) Value: None
  misc_feature: MA Experiment 20001556 PARAMETER Experiment Name: At_Drought_Soil_Dry_P Parameter: Post-Treatment Value: None
  misc_feature: MA Experiment 20001556 PARAMETER Experiment Name: At_Drought_Soil_Dry_P Parameter: Timepoint (day) Value: 12
  misc_feature: MA Experiment 20001556 PARAMETER Experiment Name: At_Drought_Soil_Dry_P Parameter: Treatment Value: Drought vs. No Drought
  misc_feature: MA Experiment ID: 20001558 Result: Up-regulated in Transcription
  misc_feature: MA Experiment 20001558 PARAMETER Experiment Name: At_Drought_Soil_Dry_P Parameter: Age (day) Value: 27
  misc_feature: MA Experiment 20001558 PARAMETER Experiment Name: At_Drought_Soil_Dry_P Parameter: Organism Value: A. thaliana
  misc_feature: MA Experiment 20001558 PARAMETER Experiment Name: At_Drought_Soil_Dry_P Parameter: Plant Line Value: WS
  misc_feature: MA Experiment 20001558 PARAMETER Experiment Name: At_Drought_Soil_Dry_P Parameter: Post Timepoint (hr) Value: 6
  misc_feature: MA Experiment 20001558 PARAMETER Experiment Name: At_Drought_Soil_Dry_P Parameter: Post-Treatment Value: Re-Water vs. No Drought
  misc_feature: MA Experiment 20001558 PARAMETER Experiment Name: At_Drought_Soil_Dry_P Parameter: Timepoint (day) Value: 13
  misc_feature: MA Experiment 20001558 PARAMETER Experiment Name: At_Drought_Soil_Dry_P Parameter: Treatment Value: Drought vs. No Drought
  misc_feature: MA Experiment ID: 20001904 Result: Up-regulated in Transcription
  misc_feature: MA Experiment 20001904 PARAMETER Experiment Name: At_Drought_Reproduction_P Parameter: Age (day) Value: 37
  misc_feature: MA Experiment 20001904 PARAMETER Experiment Name: At_Drought_Reproduction_P Parameter: Organism Value: A. thaliana
  misc_feature: MA Experiment 20001904 PARAMETER Experiment Name: At_Drought_Reproduction_P Parameter: Plant Line Value: WS
  misc_feature: MA Experiment 20001904 PARAMETER Experiment Name: At_Drought_Reproduction_P Parameter: Timepoint (day) Value: 7
  misc_feature: MA Experiment 20001904 PARAMETER Experiment Name: At_Drought_Reproduction_P Parameter: Tissue Value: Rosettes
  misc_feature: MA Experiment 20001904 PARAMETER Experiment Name: At_Drought_Reproduction_P Parameter: Treatment Value: Drought vs. No Drought
  misc_feature: MA Experiment ID: 20001905 Result: Up-regulated in Transcription
  misc_feature: MA Experiment 20001905 PARAMETER Experiment Name: At_Drought_Reproduction_P Parameter: Age (day) Value: 40
  misc_feature: MA Experiment 20001905 PARAMETER Experiment Name: At_Drought_Reproduction_P Parameter: Organism Value: A. thaliana
  misc_feature: MA Experiment 20001905 PARAMETER Experiment Name: At_Drought_Reproduction_P Parameter: Plant Line Value: WS
  misc_feature: MA Experiment 20001905 PARAMETER Experiment Name: At_Drought_Reproduction_P Parameter: Timepoint (day) Value: 10
  misc_feature: MA Experiment 20001905 PARAMETER Experiment Name: At_Drought_Reproduction_P Parameter: Tissue Value: Rosettes
  misc_feature: MA Experiment 20001905 PARAMETER Experiment Name: At_Drought_Reproduction_P Parameter: Treatment Value: Drought vs. No Drought
  misc_feature: MA Experiment ID: 20001906 Result: Up-regulated in Transcription
  misc_feature: MA Experiment 20001906 PARAMETER Experiment Name: At_Drought_Reproduction_P Parameter: Age (day) Value: 35
  misc_feature: MA Experiment 20001906 PARAMETER Experiment Name: At_Drought_Reproduction_P Parameter: Organism Value: A. thaliana
  misc_feature: MA Experiment 20001906 PARAMETER Experiment Name: At_Drought_Reproduction_P Parameter: Plant Line Value: WS
  misc_feature: MA Experiment 20001906 PARAMETER Experiment Name: At_Drought_Reproduction_P Parameter: Timepoint (day) Value: 5
  misc_feature: MA Experiment 20001906 PARAMETER Experiment Name: At_Drought_Reproduction_P Parameter: Tissue Value: Siliques
  misc_feature: MA Experiment 20001906 PARAMETER Experiment Name: At_Drought_Reproduction_P Parameter: Treatment Value: Drought vs. No Drought
atgaagaaacttcttttgatatttctcttttctcttgtcattctccaaactgcttgtggattcgattacgacgacaaggaaatagaaagcgaagagggcttatcaacgctttatgatagatggaggagccaccactccgttcctaggagtctaaatgaaagggagaagagattcaacgttttcagacacaatgtcatgcatgtccacaataccaacaagaagaaccgatcctacaaacttaagctcaacaagtttgcagatttaacaattaatgagttcaagaatgcatacaccggttccaacatcaagcatcacagaatgttgcaaggaccaaaacgcggctcaaaacagttcatgtatgatcatgagaatttatccaaattaccgtcctccgttgattggagaaagaaaggtgctgtcactgaaatcaagaatcaaggaaaatgtggaagttgttgggcattctctaccgtagcagctgttgagggaatcaacaagatcaagactaacaaactggtctcactgtctgaacaagaactagtggattgtgatactaagcagaatgaaggttgtaacggaggtcttatggagattgcatttgaattcatcaagaagaacggtggtatcaccactgaagatagctatccttatgaaggtatcgatggaaaatgcgacgcttcaaaggataacggcgtgcttgtgacgatagatgggcatgaagatgtacccgaaaacgacgaaaatgctcttcttaaggctgttgcaaaccaacctgtatctgttgcaattgatgctggaagttcagatttccagttttattcagagggagtgtttacgggatcttgtggaacagagctgaaccatggtgtggcagcggtcgggtatggatctgagagggggaaaaagtattggatagtgagaaactcatggggagctgaatggggagagggaggctatataaagattgaaagagagattgatgaaccggaagggcgttgcggtattgcgatggaggcatcgtatccgatcaagctatcgtcgtctaatcctaccccgaaagacggtgatgtcaaagatgagctctag

SEQ ID NO: 71266 - protein, 361 aa, Arabidopsis thaliana
  peptide (1)..(361): Ceres Seq. ID no. 3085403
  misc_feature (128)..(343): Pfam Name: Papain family cysteine protease Pfam Description: Papain family cysteine protease
  misc_feature (1)..(361): Homolog of NCBI NO: 7435811 NR Description: cysteine proteinase (EC 3.4.22.-) T29H11.140 -
  misc_feature (1)..(361): Homolog of NCBI NO: 22331686 NR Description: similar to cysteine proteinase; protein id:
  misc_feature (1)..(361): Homolog of NCBI NO: 7435817 NR Description: cysteine endopeptidase (EC 3.4.22.-) precursor - bean >gi|2944446|gb|AAC62396.1| cysteine endopeptidase precursor
  misc_feature (3)..(361): Homolog of NCBI NO: 18408616 NR Description: Expressed protein; protein id: At3g48350.1, by cDNA: 151603. [Arabidopsis thaliana] >gi|7435810|pir||T06707
MKKLLLIFLFSLVILQTACGFDYDDKEIESEEGLSTLYDRWRSHHSVPRSLNEREKRFNVFRHNVMHVHNTNKKNRSYKLKLNKFADLTINEFKNAYTGSNIKHHRMLQGPKRGSKQFMYDHENLSKLPSSVDWRKKGAVTEIKNQGKCGSCWAFSTVAAVEGINKIKTNKLVSLSEQELVDCDTKQNEGCNGGLMEIAFEFIKKNGGITTEDSYPYEGIDGKCDASKDNGVLVTIDGHEDVPENDENALLKAVANQPVSVAIDAGSSDFQFYSEGVFTGSCGTELNHGVAAVGYGSERGKKYWIVRNSWGAEWGEGGYIKIEREIDEPEGRCGIAMEASYPIKLSSSNPTPKDGDVKDEL

SEQ ID NO: 71267 - protein, 296 aa, Arabidopsis thaliana
  peptide (1)..(296): Ceres Seq. ID no. 3085404
  misc_feature (63)..(278): Pfam Name: Papain family cysteine protease Pfam Description: Papain family cysteine protease
  misc_feature (1)..(296): Homolog of NCBI NO: 7435811 NR Description: cysteine proteinase (EC 3.4.22.-) T29H11.140 -
  misc_feature (1)..(296): Homolog of NCBI NO: 22331686 NR Description: similar to cysteine proteinase; protein id:
  misc_feature (1)..(296): Homolog of NCBI NO: 7435817 NR Description: cysteine endopeptidase (EC 3.4.22.-) precursor - bean >gi|2944446|gb|AAC62396.1| cysteine endopeptidase precursor
  misc_feature (1)..(296): Homolog of NCBI NO: 18408616 NR Description: Expressed protein; protein id: At3g48350.1, by cDNA: 151603. [Arabidopsis thaliana] >gi|7435810|pir||T06707
MHVHNTNKKNRSYKLKLNKFADLTINEFKNAYTGSNIKHHRMLQGPKRGSKQFMYDHENLSKLPSSVDWRKKGAVTEIKNQGKCGSCWAFSTVAAVEGINKIKTNKLVSLSEQELVDCDTKQNEGCNGGLMEIAFEFIKKNGGITTEDSYPYEGIDGKCDASKDNGVLVTIDGHEDVPENDENALLKAVANQPVSVAIDAGSSDFQFYSEGVFTGSCGTELNHGVAAVGYGSERGKKYWIVRNSWGAEWGEGGYIKIEREIDEPEGRCGIAMEASYPIKLSSSNPTPKDGDVKDEL

SEQ ID NO: 71268 - protein, 255 aa, Arabidopsis thaliana
  peptide (1)..(255): Ceres Seq. ID no. 3085405
  misc_feature (22)..(237): Pfam Name: Papain family cysteine protease Pfam Description: Papain family cysteine protease
  misc_feature (1)..(255): Homolog of NCBI NO: 7435811 NR Description: cysteine proteinase (EC 3.4.22.-) T29H11.140 -
  misc_feature (1)..(255): Homolog of NCBI NO: 22331686 NR Description: similar to cysteine proteinase; protein id:
  misc_feature (1)..(255): Homolog of NCBI NO: 7435817 NR Description: cysteine endopeptidase (EC 3.4.22.-) precursor - bean >gi|2944446|gb|AAC62396.1| cysteine endopeptidase precursor
  misc_feature (1)..(255): Homolog of NCBI NO: 18408616 NR Description: Expressed protein; protein id: At3g48350.1, by cDNA: 151603. [Arabidopsis thaliana] >gi|7435810|pir||T06707
MLQGPKRGSKQFMYDHENLSKLPSSVDWRKKGAVTEIKNQGKCGSCWAFSTVAAVEGINKIKTNKLVSLSEQELVDCDTKQNEGCNGGLMEIAFEFIKKNGGITTEDSYPYEGIDGKCDASKDNGVLVTIDGHEDVPENDENALLKAVANQPVSVAIDAGSSDFQFYSEGVFTGSCGTELNHGVAAVGYGSERGKKYWIVRNSWGAEWGEGGYIKIEREIDEPEGRCGIAMEASYPIKLSSSNPTPKDGDVKDEL

SEQ ID NO: 71269 - DNA, 2259 bp, Arabidopsis thaliana
  misc_feature (1)..(2259): Ceres Seq. ID no. 3085597
  misc_feature: MA Experiment ID: 20000315 Result: Down-regulated in Transcription
  misc_feature: MA Experiment 20000315 PARAMETER Experiment Name: At_14day_Shoots-Roots_Sub_P Parameter: Age (day) Value: 14
  misc_feature: MA Experiment 20000315 PARAMETER Experiment Name: At_14day_Shoots-Roots_Sub_P Parameter: Organism Value: A. thaliana
  misc_feature: MA Experiment 20000315 PARAMETER Experiment Name: At_14day_Shoots-Roots_Sub_P Parameter: Plant Line Value: WS
  misc_feature: MA Experiment 20000315 PARAMETER Experiment Name: At_14day_Shoots-Roots_Sub_P Parameter: Tissue Value: Shoots vs. Whole Plant
  misc_feature: MA Experiment ID: 20000328 Result: Down-regulated in Transcription
  misc_feature: MA Experiment 20000328 PARAMETER Experiment Name: At_42deg_Heat_Sub_P Parameter: Age (day) Value: 14
  misc_feature: MA Experiment 20000328 PARAMETER Experiment Name: At_42deg_Heat_Sub_P Parameter: Organism Value: A. thaliana
  misc_feature: MA Experiment 20000328 PARAMETER Experiment Name: At_42deg_Heat_Sub_P Parameter: Plant Line Value: WS
  misc_feature: MA Experiment 20000328 PARAMETER Experiment Name: At_42deg_Heat_Sub_P Parameter: Temperature (deg C) Value: 42 vs. 22
  misc_feature: MA Experiment 20000328 PARAMETER Experiment Name: At_42deg_Heat_Sub_P Parameter: Timepoint (hr) Value: 6
  misc_feature: MA Experiment 20000328 PARAMETER Experiment Name: At_42deg_Heat_Sub_P Parameter: Tissue Value: Aerial
atgacgattctcactgtacagtcttcgtttagctcttctcgagttccggttataaagaacgcgaatttcgatcaaattccgtcgtgggtttctctgaagtcgagcacttcttctccgtctgttaaaatctcgcataagcaaggacaagtagagaatcttcatttggtttcgttgtcgaagcataggaagctcaacgaagcatttgagtttttgcaagaaatggataaggctggtgtctccgttagctcgtattcttaccaatgtctctttgaggcttgcagagaattgaggtctttatctcatgggagactcttgcacgatcgcatgcggatgggtatcgagaatccttctgtgcttcttcagaactgtgtgcttcaaatgtactgtgagtgtcggagcttggaagatgcagataagctgttcgatgaaatgtctgagttaaatgcagtttctcgtacaacgatgatatctgcttacgccgaacaaggaattttggataaagctgttggtttgttctcgggaatgctagcgtcaggcgacaagcctccttcttccatgtatacgacactcttgaaatctttggtaaaccccagggctttagactttggtagacagattcatgctcatgttatacgtgctgggttatgtagcaacacatctatagagaccgggatcgtgaacatgtacgtgaaatgtggttggttagtgggtgctaagcgagtgttcgatcagatggcagtgaagaaaccagtggcttgtacgggattgatggtaggttatactcaagctggaagagcaagagatgctttgaaactatttgtggatttggtaacggaaggtgttgaatgggacagttttgtgttttcagttgttcttaaagcgtgtgcttctcttgaagagcttaatcttggcaagcaaattcatgcctgtgtcgctaagcttggattggaatctgaagtctcggttggaactccacttgttgatttttacatcaaatgttccagcttcgagtctgcttgtcgtgcatttcaagaaatccgtgagccaaacgatgtttcctggagcgcaatcatctccggatactgtcaaatgagtcaatttgaggaggctgttaaaaccttcaagtctttgagaagcaaaaacgcatcgattctaaattcattcacatatactagcatattccaagcatgctcggtacttgcagattgcaacattggtggccaagtccatgcagatgctataaaaagaagtctgattggatctcagtatggagaaagcgctcttattacgatgtattcaaaatgtggatgcttagatgatgcaaatgaagtctttgagtccatggacaaccccgatattgttgcatggactgcttttatatcaggtcatgcttactatggaaatgcctctgaagctttgagattgtttgagaaaatggtgagttgtggtatgaagccaaactcagttacatttattgcggttttaaccgcgtgcagccatgcaggcctagttgaacagggaaagcattgcttggacacgatgcttcgaaaatataatgtggctccgactattgatcattatgattgtatgatcgacatttatgcccgttcgggactattagacgaagctctcaaatttatgaagaatatgccttttgaacctgatgcaatgagctggaaatgctttctaagtggatgttggactcataagaatcttgaactgggcgaaattgctggtgaggaacttcgccaactcgatccagaagatacagctggatatgtgctaccgtttaatctgtacacctgggctggaaaatgggaagaagctgctgaaatgatgaaactaatgaatgagaggatgttaaagaaggaactgagctgcagctggatccaagaaaagggtaagattcatcggtttatagtgggtgataaacaccatccacaaactcaggagatctatgagaagcttaaggagtttgatggtttcatggaaggtgatatgtttcagtgtaatatgacagagagaagagaacagcttcttgatcatagtgagagacttgccattgcatttgggctgatatcggtgcatggcaatgcccctgcacctattaaggtgttcaagaatcttcgggcatgcccagattgtcatgagtttgcaaagcatgtatctttggttacaggacatgaaatcgtcatccgagattccaggaggtttcaccatttcaaggagggaaagtgttcttgcaacgattactggtga

SEQ ID NO: 71270 - protein, 752 aa, Arabidopsis thaliana
  peptide (1)..(752): Ceres Seq. ID no. 3085598
  misc_feature (525)..(559): Pfam Name: PPR repeat Pfam Description: PPR repeat
  misc_feature (62)..(752): Homolog of NCBI NO: 30693150 NR Description: pentatricopeptide (PPR) repeat-containing protein
  misc_feature (60)..(752): Homolog of NCBI NO: 34915012 NR Description: P0458A05.10 [Oryza sativa (japonica
  misc_feature (251)..(752): Homolog of NCBI NO: 21741755 NR Description: OSJNBa0060B20.9 [Oryza sativa (japonica
  misc_feature (52)..(307): Homolog of NCBI NO: 21741755 NR Description: OSJNBa0060B20.9 [Oryza sativa (japonica
  misc_feature (52)..(752): Homolog of NCBI NO: 15234006 NR Description: putative protein; protein id: At4g18750.1
  misc_feature (55)..(752): Homolog of NCBI NO: 15226200 NR Description: putative selenium-binding protein; protein id:
  misc_feature (67)..(752): Homolog of NCBI NO: 18483237 NR Description: putative vegetative storage protein [Sorghum
  misc_feature (66)..(752): Homolog of NCBI NO: 34906110 NR Description: P0020E09.15 [Oryza sativa (japonica
  misc_feature (59)..(752): Homolog of NCBI NO: 15232837 NR Description: hypothetical protein; protein id: At3g02010.1 thaliana] >gi|6091739|gb|AAF03451.1|AC010797_27 hypothetical [Arabidopsis thaliana] >gi|6513930|gb|AAF14834.1|AC011664_16
  misc_feature (89)..(752): Homolog of NCBI NO: 37535570 NR Description: hypothetical protein [Oryza sativa (japonica group)] >gi|16905194|gb|AAL31064.1| hypothetical protein [Oryza >gi|31432781|gb|AAP54374.1| hypothetical protein [Oryza sativa
MTILTVQSSFSSSRVPVIKNANFDQIPSWVSLKSSTSSPSVKISHKQGQVENLHLVSLSKHRKLNEAFEFLQEMDKAGVSVSSYSYQCLFEACRELRSLSHGRLLHDRMRMGIENPSVLLQNCVLQMYCECRSLEDADKLFDEMSELNAVSRTTMISAYAEQGILDKAVGLFSGMLASGDKPPSSMYTTLLKSLVNPRALDFGRQIHAHVIRAGLCSNTSIETGIVNMYVKCGWLVGAKRVFDQMAVKKPVACTGLMVGYTQAGRARDALKLFVDLVTEGVEWDSFVFSVVLKACASLEELNLGKQIHACVAKLGLESEVSVGTPLVDFYIKCSSFESACRAFQEIREPNDVSWSAIISGYCQMSQFEEAVKTFKSLRSKNASILNSFTYTSIFQACSVLADCNIGGQVHADAIKRSLIGSQYGESALITMYSKCGCLDDANEVFESMDNPDIVAWTAFISGHAYYGNASEALRLFEKMVSCGMKPNSVTFIAVLTACSHAGLVEQGKHCLDTMLRKYNVAPTIDHYDCMIDIYARSGLLDEALKFMKNMPFEPDAMSWKCFLSGCWTHKNLELGEIAGEELRQLDPEDTAGYVLPFNLYTWAGKWEEAAEMMKLMNERMLKKELSCSWIQEKGKIHRFIVGDKHHPQTQEIYEKLKEFDGFMEGDMFQCNMTERREQLLDHSERLAIAFGLISVHGNAPAPIKVFKNLRACPDCHEFAKHVSLVTGHEIVIRDSRRFHHFKEGKCSCNDYW

SEQ ID NO: 71271 - protein, 679 aa, Arabidopsis thaliana
  peptide (1)..(679): Ceres Seq. ID no. 3085599
  misc_feature (452)..(486): Pfam Name: PPR repeat Pfam Description: PPR repeat
  misc_feature (1)..(679): Homolog of NCBI NO: 30693150 NR Description: pentatricopeptide (PPR) repeat-containing protein
  misc_feature (1)..(679): Homolog of NCBI NO: 34915012 NR Description: P0458A05.10 [Oryza sativa (japonica
  misc_feature (178)..(679): Homolog of NCBI NO: 21741755 NR Description: OSJNBa0060B20.9 [Oryza sativa (japonica
  misc_feature (1)..(234): Homolog of NCBI NO: 21741755 NR Description: OSJNBa0060B20.9 [Oryza sativa (japonica
  misc_feature (1)..(679): Homolog of NCBI NO: 15234006 NR Description: putative protein; protein id: At4g18750.1
  misc_feature (1)..(679): Homolog of NCBI NO: 15226200 NR Description: putative selenium-binding protein; protein id:
  misc_feature (1)..(679): Homolog of NCBI NO: 18483237 NR Description: putative vegetative storage protein [Sorghum
  misc_feature (1)..(679): Homolog of NCBI NO: 34906110 NR Description: P0020E09.15 [Oryza sativa (japonica
  misc_feature (1)..(679): Homolog of NCBI NO: 15232837 NR Description: hypothetical protein; protein id: At3g02010.1 thaliana] >gi|6091739|gb|AAF03451.1|AC010797_27 hypothetical [Arabidopsis thaliana] >gi|6513930|gb|AAF14834.1|AC011664_16
  misc_feature (16)..(679): Homolog of NCBI NO: 37535570 NR Description: hypothetical protein [Oryza sativa (japonica group)] >gi|16905194|gb|AAL31064.1| hypothetical protein [Oryza >gi|31432781|gb|AAP54374.1| hypothetical protein [Oryza sativa
MDKAGVSVSSYSYQCLFEACRELRSLSHGRLLHDRMRMGIENPSVLLQNCVLQMYCECRSLEDADKLFDEMSELNAVSRTTMISAYAEQGILDKAVGLFSGMLASGDKPPSSMYTTLLKSLVNPRALDFGRQIHAHVIRAGLCSNTSIETGIVNMYVKCGWLVGAKRVFDQMAVKKPVACTGLMVGYTQAGRARDALKLFVDLVTEGVEWDSFVFSVVLKACASLEELNLGKQIHACVAKLGLESEVSVGTPLVDFYIKCSSFESACRAFQEIREPNDVSWSAIISGYCQMSQFEEAVKTFKSLRSKNASILNSFTYTSIFQACSVLADCNIGGQVHADAIKRSLIGSQYGESALITMYSKCGCLDDANEVFESMDNPDIVAWTAFISGHAYYGNASEALRLFEKMVSCGMKPNSVTFIAVLTACSHAGLVEQGKHCLDTMLRKYNVAPTIDHYDCMIDIYARSGLLDEALKFMKNMPFEPDAMSWKCFLSGCWTHKNLELGEIAGEELRQLDPEDTAGYVLPFNLYTWAGKWEEAAEMMKLMNERMLKKELSCSWIQEKGKIHRFIVGDKHHPQTQEIYEKLKEFDGFMEGDMFQCNMTERREQLLDHSERLAIAFGLISVHGNAPAPIKVFKNLRACPDCHEFAKHVSLVTGHEIVIRDSRRFHHFKEGKCSCNDYW

SEQ ID NO: 71272 - protein, 644 aa, Arabidopsis thaliana
  peptide (1)..(644): Ceres Seq. ID no. 3085600
  misc_feature (417)..(451): Pfam Name: PPR repeat Pfam Description: PPR repeat
  misc_feature (1)..(644): Homolog of NCBI NO: 30693150 NR Description: pentatricopeptide (PPR) repeat-containing protein
  misc_feature (1)..(644): Homolog of NCBI NO: 34915012 NR Description: P0458A05.10 [Oryza sativa (japonica
  misc_feature (143)..(644): Homolog of NCBI NO: 21741755 NR Description: OSJNBa0060B20.9 [Oryza sativa (japonica
  misc_feature (1)..(199): Homolog of NCBI NO: 21741755 NR Description: OSJNBa0060B20.9 [Oryza sativa (japonica
  misc_feature (1)..(644): Homolog of NCBI NO: 15234006 NR Description: putative protein; protein id: At4g18750.1
  misc_feature (1)..(644): Homolog of NCBI NO: 15226200 NR Description: putative selenium-binding protein; protein id:
  misc_feature (1)..(644): Homolog of NCBI NO: 18483237 NR Description: putative vegetative storage protein [Sorghum
  misc_feature (1)..(644): Homolog of NCBI NO: 34906110 NR Description: P0020E09.15 [Oryza sativa (japonica
  misc_feature (1)..(644): Homolog of NCBI NO: 15232837 NR Description: hypothetical protein; protein id: At3g02010.1 thaliana] >gi|6091739|gb|AAF03451.1|AC010797_27 hypothetical [Arabidopsis thaliana] >gi|6513930|gb|AAF14834.1|AC011664_16
  misc_feature (1)..(644): Homolog of NCBI NO: 37535570 NR Description: hypothetical protein [Oryza sativa (japonica group)] >gi|16905194|gb|AAL31064.1| hypothetical protein [Oryza >gi|31432781|gb|AAP54374.1| hypothetical protein [Oryza sativa
MRMGIENPSVLLQNCVLQMYCECRSLEDADKLFDEMSELNAVSRTTMISAYAEQGILDKAVGLFSGMLASGDKPPSSMYTTLLKSLVNPRALDFGRQIHAHVIRAGLCSNTSIETGIVNMYVKCGWLVGAKRVFDQMAVKKPVACTGLMVGYTQAGRARDALKLFVDLVTEGVEWDSFVFSVVLKACASLEELNLGKQIHACVAKLGLESEVSVGTPLVDFYIKCSSFESACRAFQEIREPNDVSWSAIISGYCQMSQFEEAVKTFKSLRSKNASILNSFTYTSIFQACSVLADCNIGGQVHADAIKRSLIGSQYGESALITMYSKCGCLDDANEVFESMDNPDIVAWTAFISGHAYYGNASEALRLFEKMVSCGMKPNSVTFIAVLTACSHAGLVEQGKHCLDTMLRKYNVAPTIDHYDCMIDIYARSGLLDEALKFMKNMPFEPDAMSWKCFLSGCWTHKNLELGEIAGEELRQLDPEDTAGYVLPFNLYTWAGKWEEAAEMMKLMNERMLKKELSCSWIQEKGKIHRFIVGDKHHPQTQEIYEKLKEFDGFMEGDMFQCNMTERREQLLDHSERLAIAFGLISVHGNAPAPIKVFKNLRACPDCHEFAKHVSLVTGHEIVIRDSRRFHHFKEGKCSCNDYW

SEQ ID NO: 71273 - DNA, 1947 bp, Arabidopsis thaliana
  misc_feature (1)..(1947): Ceres Seq. ID no. 3085829
  misc_feature: MA Experiment ID: 20000437 Result: Down-regulated in Transcription
  misc_feature: MA Experiment 20000437 PARAMETER Experiment Name: At_Drought_P Parameter: Age (day) Value: 8
  misc_feature: MA Experiment 20000437 PARAMETER Experiment Name: At_Drought_P Parameter: Organism Value: A. thaliana
  misc_feature: MA Experiment 20000437 PARAMETER Experiment Name: At_Drought_P Parameter: Plant Line Value: WS
  misc_feature: MA Experiment 20000437 PARAMETER Experiment Name: At_Drought_P Parameter: Timepoint (hr) Value: 24
  misc_feature: MA Experiment 20000437 PARAMETER Experiment Name: At_Drought_P Parameter: Tissue Value: Whole Plant
  misc_feature: MA Experiment 20000437 PARAMETER Experiment Name: At_Drought_P Parameter: Treatment Value: Drought vs. No Drought
  misc_feature: MA Experiment ID: 20000439 Result: Up-regulated in Transcription
  misc_feature: MA Experiment 20000439 PARAMETER Experiment Name: At_Roots__P Parameter: Age (day) Value: 14 vs. 21
  misc_feature: MA Experiment 20000439 PARAMETER Experiment Name: At_Roots__P Parameter: Organism Value: A. thaliana
  misc_feature: MA Experiment 20000439 PARAMETER Experiment Name: At_Roots__P Parameter: Tissue Value: Roots vs. Whole Plant
  misc_feature: MA Experiment ID: 20000495 Result: Up-regulated in Transcription
  misc_feature: MA Experiment 20000495 PARAMETER Experiment Name: At_Guard_Cells_P Parameter: Harvest Date Value: 8/2/2002
  misc_feature: MA Experiment 20000495 PARAMETER Experiment Name: At_Guard_Cells_P Parameter: Organism Value: A. thaliana
  misc_feature: MA Experiment 20000495 PARAMETER Experiment Name: At_Guard_Cells_P Parameter: Tissue Value: Guard Cells vs. Leaves
  misc_feature: MA Experiment ID: 20001450 Result: Down-regulated in Transcription
  misc_feature: MA Experiment 20001450 PARAMETER Experiment Name: At_Far-red-induction_P Parameter: Age (day) Value: 7
  misc_feature: MA Experiment 20001450 PARAMETER Experiment Name: At_Far-red-induction_P Parameter: Light Value: Far-red vs. White
  misc_feature: MA Experiment 20001450 PARAMETER Experiment Name: At_Far-red-induction_P Parameter: Organism Value: A. thaliana
  misc_feature: MA Experiment 20001450 PARAMETER Experiment Name: At_Far-red-induction_P Parameter: Plant Line Value: Columbia
  misc_feature: MA Experiment 20001450 PARAMETER Experiment Name: At_Far-red-induction_P Parameter: Timepoint (hr) Value: 8
  misc_feature: MA Experiment 20001450 PARAMETER Experiment Name: At_Far-red-induction_P Parameter: Tissue Value: Whole Plant
atgggagagactgaggatgaaaaagatgcttctttggctgatatcgagaaggagtgtctctcggtttataagcgaaaggtcgaggaggctagtcggggtaaagcgaatttgctgaaagaaatcgctgttggcagagcagaaattgcagctattggctcttctatgggtggacaagagattcattctaacagcaggttaggagaaaacttgaaagaggagcttgagaatgttaatgtgcaattggatggactgcgcaaaaggaaagctgagagaatgattcggtttaatgaagttatcgatcagttactgaagttgtcactgcaacttggaaatccaacagattatctgaagaagtttgctgctgaagagaccgatctttcgcttcagaggttggaggaattgcgtagccagttgggtgagctccaaaatgaaaagagcaaaagattggaagaggtagagtgtttgctgaaaacgcttaactcgttgtgctcggttcttggtgaagatttcaaaggcatgataagagggatacattcatctctggttgattccaacactagggatgtgagcagaagtactcttgataagttggatatgatgattgtgaatttacgagaggccaagttacagcgaatgcagaaggttcaagatcttgcagtgtccttgttggagctctggaatctgctggacacgcctgcggaagagcaaaagatatttcacaatgtcacatgtagcatcgctttgactgagtctgaaataactgaggccaacatactttctgttgcttccattaaacgcgttgaggatgaagtcattaggcttagcaagatcaaaataactaagatcaaagaggtgatactgaggaagaggcttgagcttgaggaaatatcaaggaagatgcacatggccaccgaagttcttaaatcagaaaacttttcagttgaagctatagaatctggtgtcaaggatcctgagcagttgttagagcaaattgattccgagattgcaaaggtcaaagaggaagcttcaagcaggaaggagattcttgaaaaagtggagaaatggatgtcagcttgtgaagaagagtcttggctggaagagtacaatcgggatgataaccggtacaacgctggaagaggagctcatcttacattgaagcgtgcagaaaaagcccgtttacttgtcaataaacttcctgggatggtggaagctttgaccgccaaagtcactgcttgggagaatgaaagaggaaatgaattcttatatgatggggtccgagtcttatcgatgcttggtcagtacaagactgtatgggaagagaaagagcatgaaaaacagagacagagagatatgaagaaacttcatggacaactcataacagagcaagaagctctttatgggtctaaaccaagcccaaataaaagcggaaagaaaccactgagaacaccagtaaatgctgccatgaacagaaaactctcccttggtggtgccatgcttcatcaaagcttaaagcatgagaaggcaacactcaatagcaaaaggacgaagtactatgaccagaacgctactagtagaagagattcagctcttccaactctttcagggaggagaaactcagagcttcctggtcgtatcagatcaaagaacgttccggttgcaggaaaagctgcgagatctccaatgcttaggaagcctctttcacctgtcacttccaatatcttgaattccccagaagatcatcacaaggatgcttacacaacaaaggagagaatcttgacacctaaaaccaacgaagaaaagaaaagagctgttccaacaactcctgcagcttcagtcgctatgacagaggcaacaacgccgttcactcctgctgtggagaagagaatggatgaggaagacgttattgttgagtattcgtttgaagaggttagggccggtttttgctaa

SEQ ID NO: 71274 - protein, 648 aa, Arabidopsis thaliana
  peptide (1)..(648): Ceres Seq. ID no. 3085830
  misc_feature (57)..(633): Pfam Name: Myosin tail Pfam Description: Myosin tail
  misc_feature (1)..(605): Homolog of NCBI NO: 15242132 NR Description: putative protein; protein id: At5g51600.1 thaliana] >gi|9758202|dbj|BAB08676.1|
  misc_feature (1)..(485): Homolog of NCBI NO: 15241762 NR Description: cytokinesis regulating protein - like; protein
  misc_feature (1)..(502): Homolog of NCBI NO: 11558252 NR Description: microtubule-associated protein MAP65-1a
  misc_feature (1)..(514): Homolog of NCBI NO: 11558256 NR Description: microtubule-associated protein MAP65-1c
  misc_feature (1)..(479): Homolog of NCBI NO: 25410943 NR Description: hypothetical protein At2g01910 [imported] - thaliana >gi|4522009|gb|AAD21782.1| unknown protein [Arabidopsis
  misc_feature (1)..(542): Homolog of NCBI NO: 15240485 NR Description: putative protein; protein id: At5g55230.1 thaliana] >gi|9758120|dbj|BAB08592.1| similarity to unknown protein [Arabidopsis thaliana]
  misc_feature (1)..(514): Homolog of NCBI NO: 11558254 NR Description: microtubule-associated protein MAP65-1b
  misc_feature (1)..(502): Homolog of NCBI NO: 28200790 NR Description: 65kD microtubule associated protein [Daucus
  misc_feature (1)..(531): Homolog of NCBI NO: 18416818 NR Description: putative protein; protein id: At4g26760.1, by cDNA: 151418., supported by cDNA: gi_18377611 [Arabidopsis
  misc_feature (12)..(479): Homolog of NCBI NO: 30677965 NR Description: microtubule associated protein (MAP65/ASE1)
MGETEDEKDASLADIEKECLSVYKRKVEEASRGKANLLKEIAVGRAEIAAIGSSMGGQEIHSNSRLGENLKEELENVNVQLDGLRKRKAERMIRFNEVIDQLLKLSLQLGNPTDYLKKFAAEETDLSLQRLEELRSQLGELQNEKSKRLEEVECLLKTLNSLCSVLGEDFKGMIRGIHSSLVDSNTRDVSRSTLDKLDMMIVNLREAKLQRMQKVQDLAVSLLELWNLLDTPAEEQKIFHNVTCSIALTESEITEANILSVASIKRVEDEVIRLSKIKITKIKEVILRKRLELEEISRKMHMATEVLKSENFSVEAIESGVKDPEQLLEQIDSEIAKVKEEASSRKEILEKVEKWMSACEEESWLEEYNRDDNRYNAGRGAHLTLKRAEKARLLVNKLPGMVEALTAKVTAWENERGNEFLYDGVRVLSMLGQYKTVWEEKEHEKQRQRDMKKLHGQLITEQEALYGSKPSPNKSGKKPLRTPVNAAMNRKLSLGGAMLHQSLKHEKATLNSKRTKYYDQNATSRRDSALPTLSGRRNSELPGRIRSKNVPVAGKAARSPMLRKPLSPVTSNILNSPEDHHKDAYTTKERILTPKTNEEKKRAVPTTPAASVAMTEATTPFTPAVEKRMDEEDVIVEYSFEEVRAGFC

SEQ ID NO: 71275 - protein, 594 aa, Arabidopsis thaliana
  peptide (1)..(594): Ceres Seq. ID no. 3085831
  misc_feature (3)..(579): Pfam Name: Myosin tail Pfam Description: Myosin tail
  misc_feature (1)..(488): Homolog of NCBI NO: 15240485 NR Description: putative protein; protein id: At5g55230.1 thaliana] >gi|9758120|dbj|BAB08592.1| similarity to unknown protein [Arabidopsis thaliana]
  misc_feature (1)..(460): Homolog of NCBI NO: 11558254 NR Description: microtubule-associated protein MAP65-1b
  misc_feature (1)..(448): Homolog of NCBI NO: 28200790 NR Description: 65kD microtubule associated protein [Daucus
  misc_feature (1)..(431): Homolog of NCBI NO: 15241762 NR Description: cytokinesis regulating protein - like; protein
  misc_feature (1)..(460): Homolog of NCBI NO: 11558256 NR Description: microtubule-associated protein MAP65-1c
  misc_feature (1)..(425): Homolog of NCBI NO: 25410943 NR Description: hypothetical protein At2g01910 [imported] - thaliana >gi|4522009|gb|AAD21782.1| unknown protein [Arabidopsis
  misc_feature (1)..(448): Homolog of NCBI NO: 11558252 NR Description: microtubule-associated protein MAP65-1a
  misc_feature (1)..(551): Homolog of NCBI NO: 15242132 NR Description: putative protein; protein id: At5g51600.1 thaliana] >gi|9758202|dbj|BAB08676.1|
  misc_feature (1)..(477): Homolog of NCBI NO: 18416818 NR Description: putative protein; protein id: At4g26760.1, by cDNA: 151418., supported by cDNA: gi_18377611 [Arabidopsis
  misc_feature (1)..(425): Homolog of NCBI NO: 30677965 NR Description: microtubule associated protein (MAP65/ASE1)
MGGQEIHSNSRLGENLKEELENVNVQLDGLRKRKAERMIRFNEVIDQLLKLSLQLGNPTDYLKKFAAEETDLSLQRLEELRSQLGELQNEKSKRLEEVECLLKTLNSLCSVLGEDFKGMIRGIHSSLVDSNTRDVSRSTLDKLDMMIVNLREAKLQRMQKVQDLAVSLLELWNLLDTPAEEQKIFHNVTCSIALTESEITEANILSVASIKRVEDEVIRLSKIKITKIKEVILRKRLELEEISRKMHMATEVLKSENFSVEAIESGVKDPEQLLEQIDSEIAKVKEEASSRKEILEKVEKWMSACEEESWLEEYNRDDNRYNAGRGAHLTLKRAEKARLLVNKLPGMVEALTAKVTAWENERGNEFLYDGVRVLSMLGQYKTVWEEKEHEKQRQRDMKKLHGQLITEQEALYGSKPSPNKSGKKPLRTPVNAAMNRKLSLGGAMLHQSLKHEKATLNSKRTKYYDQNATSRRDSALPTLSGRRNSELPGRIRSKNVPVAGKAARSPMLRKPLSPVTSNILNSPEDHHKDAYTTKERILTPKTNEEKKRAVPTTPAASVAMTEATTPFTPAVEKRMDEEDVIVEYSFEEVRAGFC

SEQ ID NO: 71276 - protein, 557 aa, Arabidopsis thaliana
  peptide (1)..(557): Ceres Seq. ID no. 3085832
  misc_feature (1)..(542): Pfam Name: Myosin tail Pfam Description: Myosin tail
  misc_feature (1)..(514): Homolog of NCBI NO: 15242132 NR Description: putative protein; protein id: At5g51600.1 thaliana] >gi|9758202|dbj|BAB08676.1|
  misc_feature (1)..(394): Homolog of NCBI NO: 15241762 NR Description: cytokinesis regulating protein - like; protein
  misc_feature (1)..(411): Homolog of NCBI NO: 11558252 NR Description: microtubule-associated protein MAP65-1a
  misc_feature (1)..(423): Homolog of NCBI NO: 11558256 NR Description: microtubule-associated protein MAP65-1c
  misc_feature (1)..(388): Homolog of NCBI NO: 25410943 NR Description: hypothetical protein At2g01910 [imported] - thaliana >gi|4522009|gb|AAD21782.1| unknown protein [Arabidopsis
  misc_feature (1)..(451): Homolog of NCBI NO: 15240485 NR Description: putative protein; protein id: At5g55230.1 thaliana] >gi|9758120|dbj|BAB08592.1| similarity to unknown protein [Arabidopsis thaliana]
  misc_feature (1)..(423): Homolog of NCBI NO: 11558254 NR Description: microtubule-associated protein MAP65-1b
  misc_feature (1)..(411): Homolog of NCBI NO: 28200790 NR Description: 65kD microtubule associated protein [Daucus
  misc_feature (1)..(440): Homolog of NCBI NO: 18416818 NR Description: putative protein; protein id: At4g26760.1, by cDNA: 151418., supported by cDNA: gi_18377611 [Arabidopsis
  misc_feature (1)..(388): Homolog of NCBI NO: 30677965 NR Description: microtubule associated protein (MAP65/ASE1)
MIRFNEVIDQLLKLSLQLGNPTDYLKKFAAEETDLSLQRLEELRSQLGELQNEKSKRLEEVECLLKTLNSLCSVLGEDFKGMIRGIHSSLVDSNTRDVSRSTLDKLDMMIVNLREAKLQRMQKVQDLAVSLLELWNLLDTPAEEQKIFHNVTCSIALTESEITEANILSVASIKRVEDEVIRLSKIKITKIKEVILRKRLELEEISRKMHMATEVLKSENFSVEAIESGVKDPEQLLEQIDSEIAKVKEEASSRKEILEKVEKWMSACEEESWLEEYNRDDNRYNAGRGAHLTLKRAEKARLLVNKLPGMVEALTAKVTAWENERGNEFLYDGVRVLSMLGQYKTVWEEKEHEKQRQRDMKKLHGQLITEQEALYGSKPSPNKSGKKPLRTPVNAAMNRKLSLGGAMLHQSLKHEKATLNSKRTKYYDQNATSRRDSALPTLSGRRNSELPGRIRSKNVPVAGKAARSPMLRKPLSPVTSNILNSPEDHHKDAYTTKERILTPKTNEEKKRAVPTTPAASVAMTEATTPFTPAVEKRMDEEDVIVEYSFEEVRAGFC

SEQ ID NO: 71277 - DNA, 1596 bp, Arabidopsis thaliana
  misc_feature (1)..(1596): Ceres Seq. ID no. 3085952
  misc_feature: MA Experiment ID: 20000180 Result: Down-regulated in Transcription
  misc_feature: MA Experiment 20000180 PARAMETER Experiment Name: At_Germinating_Seeds_P Parameter: Age (hr) Value: 24 vs. 0
  misc_feature: MA Experiment 20000180 PARAMETER Experiment Name: At_Germinating_Seeds_P Parameter: Tissue Value: Germinating Seeds
  misc_feature: MA Experiment ID: 20001248 Result: Up-regulated in Transcription
  misc_feature: MA Experiment 20001248 PARAMETER Experiment Name: At_Far-red-induction_P Parameter: Age (day) Value: 7
  misc_feature: MA Experiment 20001248 PARAMETER Experiment Name: At_Far-red-induction_P Parameter: Light Value: Far-red vs. White
  misc_feature: MA Experiment 20001248 PARAMETER Experiment Name: At_Far-red-induction_P Parameter: Organism Value: A. thaliana
  misc_feature: MA Experiment 20001248 PARAMETER Experiment Name: At_Far-red-induction_P Parameter: Plant Line Value: Columbia
  misc_feature: MA Experiment 20001248 PARAMETER Experiment Name: At_Far-red-induction_P Parameter: Timepoint (hr) Value: 4
  misc_feature: MA Experiment 20001248 PARAMETER Experiment Name: At_Far-red-induction_P Parameter: Tissue Value: Whole Plant
atggccacaaggagattaagagcattcaagagatggatgcaagctaacggcgttgattgcagcgaagctctcaacctcgtcgacgacgaaaacgatggtgtctctgtgagagcattctgcgatttgaaggaaggagatgttgttgccaatatctcaaaaactgcttgtctcactatcaaaaccagtggagctcgtgagatgatcgaatctgctgatttagatggaagtttaggtctctctgtggctctcatgtacgagagaagcttaggtgaagaatctccttgggctggttatcttcagattcttcctattcaagaagatttgcctcttgtttggtctcttgaagacttagattctctcttatctggaactgagcttcataagttggtgaaggaagatcatgttcttatatatgaggattggaaagaaaacattttgccgcttacctcttcactgcctcagaatgttgattctgattcgtttggaatcaaagagtatcttgctgctaagagtttaattgcttcacggtctttcgaaatcgatgattaccatggatccgggatggttcctcttgcagacctctttaatcataaaactggggcagaagacgttcacttcactcatgaatccgattctgaagctgatgaatctgacaacgatgatgctgcaaatgagaccactgatgaagacgagccttccagtaaaatttcttcctcgcctgagcagtcttttgaggaagttcctggtgaaaacactgatgacgaagccaaagaagaagaagaagaagaagaagaagaagaagaaggagaagaagaagaagaaggagaagaggaagaagaaaactcttcaatgctgcaaaatgatcaatccggtctaaaaatgattatggtgaaggatgtctcagctggagctgaggtattcaatacatacggtttgatgggtaatgctgcattactccacaggtacggatttacagagctcgataatccatatgacatagtaaacatagatctagaattagtaaccgaatggagcacatcctcattcacaagccggtacactcgagctagactggccttgtggagaaaactaggttacacaggatgcgagagtcaaaactcagaatactttgaggtatcttcaaccggagaaccccaaaccgagctcctgatcctactctatatactgctcttaccagacgacacatacaataaactggatctagctgaatcaacaacaggagcttctccctcgaaagaaggaaaaagatcttcttcttacgagataacaattgggaaacacaagtttgtgtatggagaaagcggaaatgatattcttctgacagatggtgtttgtgaagctcttctaactattgtggataagcgagagagtttatatggatcattgagctcattggaagatgacattgttagggtgaagacttgttgtcttccgagagacaggagactatatcattcgcttgtgttgcgtgtgagtgagaggaagattctaaagaagcttaggagctacatccatacccagaccaatgagtcttccagcggaaagcgccggaagaagatggttccaaaatcctag

SEQ ID NO: 71278 - protein, 531 aa, Arabidopsis thaliana
  peptide (1)..(531): Ceres Seq. ID no. 3085953
  misc_feature (82)..(317): Pfam Name: SET domain Pfam Description: SET domain
  misc_feature (1)..(531): Homolog of NCBI NO: 15228958 NR Description: putative protein; protein id: At3g56570.1
  misc_feature (260)..(527): Homolog of NCBI NO: 34907380 NR Description: P0471B04.24 [Oryza sativa (japonica
  misc_feature (4)..(271): Homolog of NCBI NO: 34907380 NR Description: P0471B04.24 [Oryza sativa (japonica
  misc_feature (21)..(403): Homolog of NCBI NO: 28829640 NR Description: similar to Arabidopsis thaliana (Mouse-ear
  misc_feature (154)..(336): Homolog of NCBI NO: 6319504 NR Description: Hypothetical ORF; Ybr030wp [Saccharomyces
  misc_feature (33)..(129): Homolog of NCBI NO: 6319504 NR Description: Hypothetical ORF; Ybr030wp [Saccharomyces
  misc_feature (11)..(339): Homolog of NCBI NO: 19114984 NR Description: hypothetical coiled-coil protein pombe] >gi|7768489|emb|CAB90780.1| putative transcriptional SET domain; putative histone lysine methyltransferase; similar to
  misc_feature (246)..(403): Homolog of NCBI NO: 40738718 NR Description: hypothetical protein AN6568.2 [Aspergillus
  misc_feature (9)..(132): Homolog of NCBI NO: 40738718 NR Description: hypothetical protein AN6568.2 [Aspergillus
  misc_feature (198)..(286): Homolog of NCBI NO: 39586319 NR Description: Hypothetical protein CBG12079 [Caenorhabditis
MATRRLRAFKRWMQANGVDCSEALNLVDDENDGVSVRAFCDLKEGDVVANISKTACLTIKTSGAREMIESADLDGSLGLSVALMYERSLGEESPWAGYLQILPIQEDLPLVWSLEDLDSLLSGTELHKLVKEDHVLIYEDWKENILPLTSSLPQNVDSDSFGIKEYLAAKSLIASRSFEIDDYHGSGMVPLADLFNHKTGAEDVHFTHESDSEADESDNDDAANETTDEDEPSSKISSSPEQSFEEVPGENTDDEAKEEEEEEEEEEEGEEEEEGEEEEENSSMLQNDQSGLKMIMVKDVSAGAEVFNTYGLMGNAALLHRYGFTELDNPYDIVNIDLELVTEWSTSSFTSRYTRARLALWRKLGYTGCESQNSEYFEVSSTGEPQTELLILLYILLLPDDTYNKLDLAESTTGASPSKEGKRSSSYEITIGKHKFVYGESGNDILLTDGVCEALLTIVDKRESLYGSLSSLEDDIVRVKTCCLPRDRRLYHSLVLRVSERKILKKLRSYIHTQTNESSSGKRRKKMVPKS

SEQ ID NO: 71279 - protein, 519 aa, Arabidopsis thaliana
  peptide (1)..(519): Ceres Seq. ID no. 3085954
  misc_feature (70)..(305): Pfam Name: SET domain Pfam Description: SET domain
  misc_feature (1)..(519): Homolog of NCBI NO: 15228958 NR Description: putative protein; protein id: At3g56570.1
  misc_feature (248)..(515): Homolog of NCBI NO: 34907380 NR Description: P0471B04.24 [Oryza sativa (japonica
  misc_feature (1)..(259): Homolog of NCBI NO: 34907380 NR Description: P0471B04.24 [Oryza sativa (japonica
  misc_feature (9)..(391): Homolog of NCBI NO: 28829640 NR Description: similar to Arabidopsis thaliana (Mouse-ear
  misc_feature (142)..(324): Homolog of NCBI NO: 6319504 NR Description: Hypothetical ORF; Ybr030wp [Saccharomyces
  misc_feature (21)..(117): Homolog of NCBI NO: 6319504 NR Description: Hypothetical ORF; Ybr030wp [Saccharomyces
  misc_feature (1)..(327): Homolog of NCBI NO: 19114984 NR Description: hypothetical coiled-coil protein pombe] >gi|7768489|emb|CAB90780.1| putative transcriptional SET domain; putative histone lysine methyltransferase; similar to
  misc_feature (234)..(391): Homolog of NCBI NO: 40738718 NR Description: hypothetical protein AN6568.2 [Aspergillus
  misc_feature (1)..(120): Homolog of NCBI NO: 40738718 NR Description: hypothetical protein AN6568.2 [Aspergillus
  misc_feature (186)..(274): Homolog of NCBI NO: 39586319 NR Description: Hypothetical protein CBG12079 [Caenorhabditis
MQANGVDCSEALNLVDDENDGVSVRAFCDLKEGDVVANISKTACLTIKTSGAREMIESADLDGSLGLSVALMYERSLGEESPWAGYLQILPIQEDLPLVWSLEDLDSLLSGTELHKLVKEDHVLIYEDWKENILPLTSSLPQNVDSDSFGIKEYLAAKSLIASRSFEIDDYHGSGMVPLADLFNHKTGAEDVHFTHESDSEADESDNDDAANETTDEDEPSSKISSSPEQSFEEVPGENTDDEAKEEEEEEEEEEEGEEEEEGEEEEENSSMLQNDQSGLKMIMVKDVSAGAEVFNTYGLMGNAALLHRYGFTELDNPYDIVNIDLELVTEWSTSSFTSRYTRARLALWRKLGYTGCESQNSEYFEVSSTGEPQTELLILLYILLLPDDTYNKLDLAESTTGASPSKEGKRSSSYEITIGKHKFVYGESGNDILLTDGVCEALLTIVDKRESLYGSLSSLEDDIVRVKTCCLPRDRRLYHSLVLRVSERKILKKLRSYIHTQTNESSSGKRRKKMVPKS

SEQ ID NO: 71280 - protein, 465 aa, Arabidopsis thaliana
  peptide (1)..(465): Ceres Seq. ID no. 3085955
  misc_feature (16)..(251): Pfam Name: SET domain Pfam Description: SET domain
  misc_feature (1)..(465): Homolog of NCBI NO: 15228958 NR Description: putative protein; protein id: At3g56570.1
  misc_feature (194)..(461): Homolog of NCBI NO: 34907380 NR Description: P0471B04.24 [Oryza sativa (japonica
  misc_feature (1)..(205): Homolog of NCBI NO: 34907380 NR Description: P0471B04.24 [Oryza sativa (japonica
  misc_feature (1)..(337): Homolog of NCBI NO: 28829640 NR Description: similar to Arabidopsis thaliana (Mouse-ear
  misc_feature (88)..(270): Homolog of NCBI NO: 6319504 NR Description: Hypothetical ORF; Ybr030wp [Saccharomyces
  misc_feature (1)..(63): Homolog of NCBI NO: 6319504 NR Description: Hypothetical ORF; Ybr030wp [Saccharomyces
  misc_feature (1)..(273): Homolog of NCBI NO: 19114984 NR Description: hypothetical coiled-coil protein pombe] >gi|7768489|emb|CAB90780.1| putative transcriptional SET domain; putative histone lysine methyltransferase; similar to
  misc_feature (180)..(337): Homolog of NCBI NO: 40738718 NR Description: hypothetical protein AN6568.2 [Aspergillus
  misc_feature (1)..(66): Homolog of NCBI NO: 40738718 NR Description: hypothetical protein AN6568.2 [Aspergillus
  misc_feature (132)..(220): Homolog of NCBI NO: 39586319 NR Description: Hypothetical protein CBG12079 [Caenorhabditis
MIESADLDGSLGLSVALMYERSLGEESPWAGYLQILPIQEDLPLVWSLEDLDSLLSGTELHKLVKEDHVLIYEDWKENILPLTSSLPQNVDSDSFGIKEYLAAKSLIASRSFEIDDYHGSGMVPLADLFNHKTGAEDVHFTHESDSEADESDNDDAANETTDEDEPSSKISSSPEQSFEEVPGENTDDEAKEEEEEEEEEEEGEEEEEGEEEEENSSMLQNDQSGLKMIMVKDVSAGAEVFNTYGLMGNAALLHRYGFTELDNPYDIVNIDLELVTEWSTSSFTSRYTRARLALWRKLGYTGCESQNSEYFEVSSTGEPQTELLILLYILLLPDDTYNKLDLAESTTGASPSKEGKRSSSYEITIGKHKFVYGESGNDILLTDGVCEALLTIVDKRESLYGSLSSLEDDIVRVKTCCLPRDRRLYHSLVLRVSERKILKKLRSYIHTQTNESSSGKRRKKMVPKS

SEQ ID NO: 71281 - DNA, 795 bp, Arabidopsis thaliana
  misc_feature (1)..(795): Ceres Seq. ID no. 3086207
  misc_feature: MA Experiment ID: 20000184 Result: Up-regulated in Transcription
  misc_feature: MA Experiment 20000184 PARAMETER Experiment Name: At_Shoots__P Parameter: Age (day) Value: 7
  misc_feature: MA Experiment 20000184 PARAMETER Experiment Name: At_Shoots__P Parameter: Tissue Value: Shoots vs. Whole Plant
  misc_feature: MA Experiment ID: 20000264 Result: Up-regulated in Transcription
  misc_feature: MA Experiment 20000264 PARAMETER Experiment Name: At_Open_Flower_P Parameter: Age (day) Value: 21
  misc_feature: MA Experiment 20000264 PARAMETER Experiment Name: At_Open_Flower_P Parameter: Plant Line Value: WS
  misc_feature: MA Experiment 20000264 PARAMETER Experiment Name: At_Open_Flower_P Parameter: Tissue Value: Open Flower vs. Whole Plant
  misc_feature: MA Experiment ID: 20000265 Result: Up-regulated in Transcription
  misc_feature: MA Experiment 20000265 PARAMETER Experiment Name: At_Open_Flower_P Parameter: Age (day) Value: 21
  misc_feature: MA Experiment 20000265 PARAMETER Experiment Name: At_Open_Flower_P Parameter: Plant Line Value: WS
  misc_feature: MA Experiment 20000265 PARAMETER Experiment Name: At_Open_Flower_P Parameter: Tissue Value: Closed Flower vs. Whole Plant
  misc_feature: MA Experiment ID: 20000286 Result: Up-regulated in Transcription
  misc_feature: MA Experiment 20000286 PARAMETER Experiment Name: At_Open_Flower_P Parameter: Age (day) Value: 21
  misc_feature: MA Experiment 20000286 PARAMETER Experiment Name: At_Open_Flower_P Parameter: Plant Line Value: WS
  misc_feature: MA Experiment 20000286 PARAMETER Experiment Name: At_Open_Flower_P Parameter: Tissue Value: Half Open vs. Whole Plant
  misc_feature: MA Experiment ID: 20000794 Result: Up-regulated in Transcription
  misc_feature: MA Experiment 20000794 PARAMETER Experiment Name: At_Petals_P Parameter: Age (day) Value: 23-25 days
  misc_feature: MA Experiment 20000794 PARAMETER Experiment Name: At_Petals_P Parameter: Plant Line Value: WS
  misc_feature: MA Experiment 20000794 PARAMETER Experiment Name: At_Petals_P Parameter: Tissue Value: Petals vs. Whole plant
  misc_feature: MA Experiment ID: 20001910 Result: Up-regulated in Transcription
  misc_feature: MA Experiment 20001910 PARAMETER Experiment Name: At_Drought_Reproduction_P Parameter: Age (day) Value: 37
  misc_feature: MA Experiment 20001910 PARAMETER Experiment Name: At_Drought_Reproduction_P Parameter: Organism Value: A. thaliana
  misc_feature: MA Experiment 20001910 PARAMETER Experiment Name: At_Drought_Reproduction_P Parameter: Plant Line Value: WS
  misc_feature: MA Experiment 20001910 PARAMETER Experiment Name: At_Drought_Reproduction_P Parameter: Timepoint (day) Value: 7
  misc_feature: MA Experiment 20001910 PARAMETER Experiment Name: At_Drought_Reproduction_P Parameter: Tissue Value: Flowers
  misc_feature: MA Experiment 20001910 PARAMETER Experiment Name: At_Drought_Reproduction_P Parameter: Treatment Value: Drought vs. No Drought
atggcttcctcatctctcaaatgtttttcttttatcgttgttcttacaactttctttgcaatctcattgaagccatgttattgccacaataaaacccactggaacaccgccggcatcacgtggtatggcgaccgagaaggtcctggcaccacaggaggagcttgtggatatggtgatgcagtggcaaaacacccgtacagatgtatggtttcagccggaggaccttcattgttcaaagacggaaagggttgtggggcttgttacaggcttaaatgcgaccatccgttgtgcacgaaaaagccgatcaaggtgatgatatcggatgagtgtcccggctgcacgaaggagtctgtccattttgatcttagcggtaaggcctttggtgcattggccaaacgtggcaagggagatcaactacgcaaccttggagaactaaaagttagttacaaacgtgcatgttgcaaacacccgaagactatgatcgctatccatgtcgacgccggagcaaatccttactacatgtcattcgcggttaagtttgcaaacggtgatgggaacttcgcctgcattgaggtccaaccggccggaggacagtatatgaaaatggaggaaatgagatccgctgtttggagactaagccctggtgttcctttgaaaggtccgttcaacatcaggcttacctccgccgtgtccggtaagaagatcattgcgaaaggcgttatcccggaaaagtggagtcctggtgctatttaccattctaaggttaacttccccgttcaaaggaagcagaaatga

SEQ ID NO: 71282 - protein, 264 aa, Arabidopsis thaliana
  peptide (1)..(264): Ceres Seq. ID no. 3086208
  misc_feature (161)..(242): Pfam Name: Pollen allergen Pfam Description: Pollen allergen
  misc_feature (1)..(264): Homolog of NCBI NO: 22095681 NR Description: Putative beta-expansin 5 precursor (At-EXPB5)
  misc_feature (1)..(264): Homolog of NCBI NO: 15232366 NR Description: expansin family; protein id: At3g60570.1
  misc_feature (15)..(257): Homolog of NCBI NO: 15225412 NR Description: beta-expansin, putative; protein id: At2g45110.1
  misc_feature (19)..(257): Homolog of NCBI NO: 28393322 NR Description: putative beta-expansin [Arabidopsis thaliana]
  misc_feature (34)..(257): Homolog of NCBI NO: 20138423 NR Description: Putative beta-expansin 2 precursor (At-EXPB2)
  misc_feature (52)..(257): Homolog of NCBI NO: 30697231 NR Description: beta-expansin, putative (EXBP2) [Arabidopsis
  misc_feature (34)..(257): Homolog of NCBI NO: 8118428 NR Description: beta-expansin [Oryza sativa]
  misc_feature (34)..(257): Homolog of NCBI NO: 16303229 NR Description: beta-expansin 5 [Oryza sativa]
  misc_feature (154)..(257): Homolog of NCBI NO: 25404942 NR Description: protein F1E22.6 [imported] - Arabidopsis thaliana
  misc_feature (52)..(151): Homolog of NCBI NO: 25404942 NR Description: protein F1E22.6 [imported] - Arabidopsis thaliana
MASSSLKCFSFIVVLTTFFAISLKPCYCHNKTHWNTAGITWYGDREGPGTTGGACGYGDAVAKHPYRCMVSAGGPSLFKDGKGCGACYRLKCDHPLCTKKPIKVMISDECPGCTKESVHFDLSGKAFGALAKRGKGDQLRNLGELKVSYKRACCKHPKTMIAIHVDAGANPYYMSFAVKFANGDGNFACIEVQPAGGQYMKMEEMRSAVWRLSPGVPLKGPFNIRLTSAVSGKKIIAKGVIPEKWSPGAIYHSKVNFPVQRKQK

SEQ ID NO: 71283 - protein, 196 aa, Arabidopsis thaliana
  peptide (1)..(196): Ceres Seq. ID no. 3086209
  misc_feature (93)..(174): Pfam Name: Pollen allergen Pfam Description: Pollen allergen
  misc_feature (1)..(196): Homolog of NCBI NO: 22095681 NR Description: Putative beta-expansin 5 precursor (At-EXPB5)
  misc_feature (1)..(196): Homolog of NCBI NO: 15232366 NR Description: expansin family; protein id: At3g60570.1
  misc_feature (1)..(189): Homolog of NCBI NO: 15225412 NR Description: beta-expansin, putative; protein id: At2g45110.1
  misc_feature (1)..(189): Homolog of NCBI NO: 28393322 NR Description: putative beta-expansin [Arabidopsis thaliana]
  misc_feature (1)..(189): Homolog of NCBI NO: 20138423 NR Description: Putative beta-expansin 2 precursor (At-EXPB2)
  misc_feature (1)..(189): Homolog of NCBI NO: 30697231 NR Description: beta-expansin, putative (EXBP2) [Arabidopsis
  misc_feature (1)..(189): Homolog of NCBI NO: 8118428 NR Description: beta-expansin [Oryza sativa]
  misc_feature (1)..(189): Homolog of NCBI NO: 16303229 NR Description: beta-expansin 5 [Oryza sativa]
  misc_feature (86)..(189): Homolog of NCBI NO: 25404942 NR Description: protein F1E22.6 [imported] - Arabidopsis thaliana
  misc_feature (1)..(83): Homolog of NCBI NO: 25404942 NR Description: protein F1E22.6 [imported] - Arabidopsis thaliana
MVSAGGPSLFKDGKGCGACYRLKCDHPLCTKKPIKVMISDECPGCTKESVHFDLSGKAFGALAKRGKGDQLRNLGELKVSYKRACCKHPKTMIAIHVDAGANPYYMSFAVKFANGDGNFACIEVQPAGGQYMKMEEMRSAVWRLSPGVPLKGPFNIRLTSAVSGKKIIAKGVIPEKWSPGAIYHSKVNFPVQRKQK

SEQ ID NO: 71284 - protein, 160 aa, Arabidopsis thaliana
  peptide (1)..(160): Ceres Seq. ID no. 3086210
  misc_feature (57)..(138): Pfam Name: Pollen allergen Pfam Description: Pollen allergen
  misc_feature (1)..(160): Homolog of NCBI NO: 22095681 NR Description: Putative beta-expansin 5 precursor (At-EXPB5)
  misc_feature (1)..(160): Homolog of NCBI NO: 15232366 NR Description: expansin family; protein id: At3g60570.1
  misc_feature (1)..(153): Homolog of NCBI NO: 15225412 NR Description: beta-expansin, putative; protein id: At2g45110.1
  misc_feature (1)..(153): Homolog of NCBI NO: 28393322 NR Description: putative beta-expansin [Arabidopsis thaliana]
  misc_feature (1)..(153): Homolog of NCBI NO: 20138423 NR Description: Putative beta-expansin 2 precursor (At-EXPB2)
  misc_feature (1)..(153): Homolog of NCBI NO: 30697231 NR Description: beta-expansin, putative (EXBP2) [Arabidopsis
  misc_feature (1)..(153): Homolog of NCBI NO: 8118428 NR Description: beta-expansin [Oryza sativa]
  misc_feature (1)..(153): Homolog of NCBI NO: 16303229 NR Description: beta-expansin 5 [Oryza sativa]
  misc_feature (50)..(153): Homolog of NCBI NO: 25404942 NR Description: protein F1E22.6 [imported] - Arabidopsis thaliana
  misc_feature (1)..(47): Homolog of NCBI NO: 25404942 NR Description: protein F1E22.6 [imported] - Arabidopsis thaliana
MISDECPGCTKESVHFDLSGKAFGALAKRGKGDQLRNLGELKVSYKRACCKHPKTMIAIHVDAGANPYYMSFAVKFANGDGNFACIEVQPAGGQYMKMEEMRSAVWRLSPGVPLKGPFNIRLTSAVSGKKIIAKGVIPEKWSPGAIYHSKVNFPVQRKQK

SEQ ID NO: 71285 - DNA, 1452 bp, Arabidopsis thaliana
  misc_feature (1)..(1452): Ceres Seq. ID no. 3086234
  misc_feature: MA Experiment ID: 20000179 Result: Up-regulated in Transcription
  misc_feature: MA Experiment 20000179 PARAMETER Experiment Name: At_Germinating_Seeds_P Parameter: Age (hr) Value: 6 vs. 0
  misc_feature: MA Experiment 20000179 PARAMETER Experiment Name: At_Germinating_Seeds_P Parameter: Tissue Value: Germinating Seeds
  misc_feature: MA Experiment ID: 20000180 Result: Up-regulated in Transcription
  misc_feature: MA Experiment 20000180 PARAMETER Experiment Name: At_Germinating_Seeds_P Parameter: Age (hr) Value: 24 vs. 0
  misc_feature: MA Experiment 20000180 PARAMETER Experiment Name: At_Germinating_Seeds_P Parameter: Tissue Value: Germinating Seeds
  misc_feature: MA Experiment ID: 20001451 Result: Up-regulated in Transcription
  misc_feature: MA Experiment 20001451 PARAMETER Experiment Name: At_Far-red-induction_P Parameter: Age (day) Value: 7
  misc_feature: MA Experiment 20001451 PARAMETER Experiment Name: At_Far-red-induction_P Parameter: Light Value: Far-red vs. White
  misc_feature: MA Experiment 20001451 PARAMETER Experiment Name: At_Far-red-induction_P Parameter: Organism Value: A. thaliana
  misc_feature: MA Experiment 20001451 PARAMETER Experiment Name: At_Far-red-induction_P Parameter: Plant Line Value: Columbia
  misc_feature: MA Experiment 20001451 PARAMETER Experiment Name: At_Far-red-induction_P Parameter: Timepoint (hr) Value: 24
  misc_feature: MA Experiment 20001451 PARAMETER Experiment Name: At_Far-red-induction_P Parameter: Tissue Value: Whole Plant
atgcataacgcgaagggattgttgggacgaatcgttcgagataagctatggagatttggttatcggaggagcttgtgctcgcttaaattgacttccgaggatcttgattaccaggttctcgttgaaggaagtggttgttcccgtactgcgattctcaatagaccacctgctctcaatgcactcaccactcacatggtactctctactgttctctgtttgtatctttccttcactcctactagcaattgtggtctcttcgaggctggattcttcaatttcggatataggttgcagaaactttataagaattgggaagaagatccaaatattgggtttgtgatgatgaaggggagtggaagggcattttgtgctggtggtgatattgtgtctctctaccatttaagaacgagagatgaaatggcgtgggagggtagcccggatgctattagggagtttttctcgagtttgtatagttttatatacttgctaggcacatatctaaagccacatgtggcaattcttaacggtgttactatgggaggcggaactggagtttcgatacctgggacatttcgtgtagctactgatagaactctggattctagtttagttcggatgtccaacttcttggaggatgcagtaactagctcatggatattgcagatttttgctacccctgaaacaatcatcggttttcatcctgatgctggtgcttcttttaacctctcccacttacctggtcgcttaggggagtatctgggtctgactgggttaaagctcagtggggcagaaatgttggcatgtggccttgctacacattatattagaagtgaggaggttcctgtaatggaagaacagctcaagaagctgctcactgatgatccttctgttgttgagtcatgcttagaaaaatgtgcagaagttgcccatccggaaaagactggtgttattcgtaggatcgatttacttgaaaaatgctttagccatgacacagtagaagaaattattgattctttggtaagtttctttacgaatgattctgcgagtatgaccatctcggtcactagaagtaacagtgttttgggtcaccaggaaatcgaggctagtagaagaaaagatacatggtgcattacgactctacgtagacttaaagaaagctcaccgttatctttgaaggtggcattgagatctatccgggaaggaagattacaaacacttgaccaatgcttaatccgagagtacagaatgtcgctacaaggattaatcgggccaatgtccggcaatttttgtgagggagtacgagctcgattgatagacaaggatgaagcaccaaagtgggatccaccgagcttggagaaagtatcagaggacatggttgatgattacttctgtgccttgactcccacggaacctgatcttgaccttcctgtcaaactcagagaaagcatttag

SEQ ID NO: 71286 - protein, 483 aa, Arabidopsis thaliana
  peptide (1)..(483): Ceres Seq. ID no. 3086235
  misc_feature (73)..(276): Pfam Name: Enoyl-CoA hydratase/isomerase family Pfam Description: Enoyl-CoA hydratase/isomerase family
  misc_feature (1)..(483): Homolog of NCBI NO: 11357284 NR Description: enoyl-CoA-hydratase-like protein - Arabidopsis
  misc_feature (222)..(483): Homolog of NCBI NO: 30695218 NR Description: enoyl-CoA hydratase/isomerase family [Arabidopsis
  misc_feature (92)..(216): Homolog of NCBI NO: 30695218 NR Description: enoyl-CoA hydratase/isomerase family [Arabidopsis
  misc_feature (1)..(65): Homolog of NCBI NO: 30695218 NR Description: enoyl-CoA hydratase/isomerase family [Arabidopsis
  misc_feature (353)..(482): Homolog of NCBI NO: 37536724 NR Description: putative enoyl-CoA-hydratase [Oryza sativa
  misc_feature (94)..(219): Homolog of NCBI NO: 37536724 NR Description: putative enoyl-CoA-hydratase [Oryza sativa
  misc_feature (222)..(339): Homolog of NCBI NO: 37536724 NR Description: putative enoyl-CoA-hydratase [Oryza sativa
  misc_feature (23)..(65): Homolog of NCBI NO: 37536724 NR Description: putative enoyl-CoA-hydratase [Oryza sativa
  misc_feature (360)..(481): Homolog of NCBI NO: 22329062 NR Description: enoyl-CoA hydratase - like protein; protein id: supported by cDNA: gi_19424018, supported by cDNA: gi_21281144
  misc_feature (222)..(339): Homolog of NCBI NO: 22329062 NR Description: enoyl-CoA hydratase - like protein; protein id: supported by cDNA: gi_19424018, supported by cDNA: gi_21281144
MHNAKGLLGRIVRDKLWRFGYRRSLCSLKLTSEDLDYQVLVEGSGCSRTAILNRPPALNALTTHMVLSTVLCLYLSFTPTSNCGLFEAGFFNFGYRLQKLYKNWEEDPNIGFVMMKGSGRAFCAGGDIVSLYHLRTRDEMAWEGSPDAIREFFSSLYSFIYLLGTYLKPHVAILNGVTMGGGTGVSIPGTFRVATDRTLDSSLVRMSNFLEDAVTSSWILQIFATPETIIGFHPDAGASFNLSHLPGRLGEYLGLTGLKLSGAEMLACGLATHYIRSEEVPVMEEQLKKLLTDDPSVVESCLEKCAEVAHPEKTGVIRRIDLLEKCFSHDTVEEIIDSLVSFFTNDSASMTISVTRSNSVLGHQEIEASRRKDTWCITTLRRLKESSPLSLKVALRSIREGRLQTLDQCLIREYRMSLQGLIGPMSGNFCEGVRARLIDKDEAPKWDPPSLEKVSEDMVDDYFCALTPTEPDLDLPVKLRESI

SEQ ID NO: 71287 - protein, 419 aa, Arabidopsis thaliana
  peptide (1)..(419): Ceres Seq. ID no. 3086236
  misc_feature (9)..(212): Pfam Name: Enoyl-CoA hydratase/isomerase family Pfam Description: Enoyl-CoA hydratase/isomerase family
  misc_feature (1)..(419): Homolog of NCBI NO: 11357284 NR Description: enoyl-CoA-hydratase-like protein - Arabidopsis
  misc_feature (158)..(419): Homolog of NCBI NO: 30695218 NR Description: enoyl-CoA hydratase/isomerase family [Arabidopsis
  misc_feature (28)..(152): Homolog of NCBI NO: 30695218 NR Description: enoyl-CoA hydratase/isomerase family [Arabidopsis
  misc_feature (289)..(418): Homolog of NCBI NO: 37536724 NR Description: putative enoyl-CoA-hydratase [Oryza sativa
  misc_feature (30)..(155): Homolog of NCBI NO: 37536724 NR Description: putative enoyl-CoA-hydratase [Oryza sativa
  misc_feature (158)..(275): Homolog of NCBI NO: 37536724 NR Description: putative enoyl-CoA-hydratase [Oryza sativa
  misc_feature (296)..(417): Homolog of NCBI NO: 22329062 NR Description: enoyl-CoA hydratase - like protein; protein id: supported by cDNA: gi_19424018, supported by cDNA: gi_21281144
  misc_feature (158)..(275): Homolog of NCBI NO: 22329062 NR Description: enoyl-CoA hydratase - like protein; protein id: supported by cDNA: gi_19424018, supported by cDNA: gi_21281144
  misc_feature (158)..(275): Homolog of NCBI NO: 6014701 NR Description: enoyl-CoA-hydratase [Avicennia marina]
  misc_feature (301)..(414): Homolog of NCBI NO: 6014701 NR Description: enoyl-CoA-hydratase [Avicennia marina]
MVLSTVLCLYLSFTPTSNCGLFEAGFFNFGYRLQKLYKNWEEDPNIGFVMMKGSGRAFCAGGDIVSLYHLRTRDEMAWEGSPDAIREFFSSLYSFIYLLGTYLKPHVAILNGVTMGGGTGVSIPGTFRVATDRTLDSSLVRMSNFLEDAVTSSWILQIFATPETIIGFHPDAGASFNLSHLPGRLGEYLGLTGLKLSGAEMLACGLATHYIRSEEVPVMEEQLKKLLTDDPSVVESCLEKCAEVAHPEKTGVIRRIDLLEKCFSHDTVEEIIDSLVSFFTNDSASMTISVTRSNSVLGHQEIEASRRKDTWCITTLRRLKESSPLSLKVALRSIREGRLQTLDQCLIREYRMSLQGLIGPMSGNFCEGVRARLIDKDEAPKWDPPSLEKVSEDMVDDYFCALTPTEPDLDLPVKLRESI

SEQ ID NO: 71288 - protein, 370 aa, Arabidopsis thaliana
  peptide (1)..(370): Ceres Seq. ID no. 3086237
  misc_feature (1)..(163): Pfam Name: Enoyl-CoA hydratase/isomerase family Pfam Description: Enoyl-CoA hydratase/isomerase family
  misc_feature (1)..(370): Homolog of NCBI NO: 11357284 NR Description: enoyl-CoA-hydratase-like protein - Arabidopsis
  misc_feature (109)..(370): Homolog of NCBI NO: 30695218 NR Description: enoyl-CoA hydratase/isomerase family [Arabidopsis
  misc_feature (1)..(103): Homolog of NCBI NO: 30695218 NR Description: enoyl-CoA hydratase/isomerase family [Arabidopsis
  misc_feature (240)..(369): Homolog of NCBI NO: 37536724 NR Description: putative enoyl-CoA-hydratase [Oryza sativa
  misc_feature (1)..(106): Homolog of NCBI NO: 37536724 NR Description: putative enoyl-CoA-hydratase [Oryza sativa
  misc_feature (109)..(226): Homolog of NCBI NO: 37536724 NR Description: putative enoyl-CoA-hydratase [Oryza sativa
  misc_feature (247)..(368): Homolog of NCBI NO: 22329062 NR Description: enoyl-CoA hydratase - like protein; protein id: supported by cDNA: gi_19424018, supported by cDNA: gi_21281144
  misc_feature (109)..(226): Homolog of NCBI NO: 22329062 NR Description: enoyl-CoA hydratase - like protein; protein id: supported by cDNA: gi_19424018, supported by cDNA: gi_21281144
  misc_feature (109)..(226): Homolog of NCBI NO: 6014701 NR Description: enoyl-CoA-hydratase [Avicennia marina]
  misc_feature (252)..(365): Homolog of NCBI NO: 6014701 NR Description: enoyl-CoA-hydratase [Avicennia marina]
MMKGSGRAFCAGGDIVSLYHLRTRDEMAWEGSPDAIREFFSSLYSFIYLLGTYLKPHVAILNGVTMGGGTGVSIPGTFRVATDRTLDSSLVRMSNFLEDAVTSSWILQIFATPETIIGFHPDAGASFNLSHLPGRLGEYLGLTGLKLSGAEMLACGLATHYIRSEEVPVMEEQLKKLLTDDPSVVESCLEKCAEVAHPEKTGVIRRIDLLEKCFSHDTVEEIIDSLVSFFTNDSASMTISVTRSNSVLGHQEIEASRRKDTWCITTLRRLKESSPLSLKVALRSIREGRLQTLDQCLIREYRMSLQGLIGPMSGNFCEGVRARLIDKDEAPKWDPPSLEKVSEDMVDDYFCALTPTEPDLDLPVKLRESI

SEQ ID NO: 71289 - DNA, 1791 bp, Arabidopsis thaliana
  misc_feature (1)..(1791): Ceres Seq. ID no. 3087891
  misc_feature: MA Experiment ID: 108434 Result: Down-regulated in Transcription
  misc_feature: MA Experiment 108434 PARAMETER Experiment Name: At_Root_Tips_cDNA_P Parameter: Tissue Value: Root Tips
  misc_feature: MA Experiment ID: 108435 Result: Up-regulated in Transcription
  misc_feature: MA Experiment 108435 PARAMETER Experiment Name: At_stm_Mutants_cDNA_P Parameter: Plant Line Value: wt Landsburg vs stm
  misc_feature: MA Experiment 108435 PARAMETER Experiment Name: At_stm_Mutants_cDNA_P Parameter: Tissue Value: Shoot Apical Meristem Region
  misc_feature: MA Experiment ID: 108461 Result: Down-regulated in Transcription
  misc_feature: MA Experiment 108461 PARAMETER Experiment Name: At_Germinating_Seeds_cDNA_P Parameter: Age (day) Value: 1 vs. 0
  misc_feature: MA Experiment 108461 PARAMETER Experiment Name: At_Germinating_Seeds_cDNA_P Parameter: Tissue Value: Germinating Seeds
  misc_feature: MA Experiment ID: 108462 Result: Down-regulated in Transcription
  misc_feature: MA Experiment 108462 PARAMETER Experiment Name: At_Germinating_Seeds_cDNA_P Parameter: Age (day) Value: 2 vs. 0
  misc_feature: MA Experiment 108462 PARAMETER Experiment Name: At_Germinating_Seeds_cDNA_P Parameter: Tissue Value: Germinating Seeds
  misc_feature: MA Experiment ID: 108463 Result: Down-regulated in Transcription
  misc_feature: MA Experiment 108463 PARAMETER Experiment Name: At_Germinating_Seeds_cDNA_P Parameter: Age (day) Value: 3 vs. 0
  misc_feature: MA Experiment 108463 PARAMETER Experiment Name: At_Germinating_Seeds_cDNA_P Parameter: Tissue Value: Germinating Seeds
  misc_feature: MA Experiment ID: 108464 Result: Down-regulated in Transcription
  misc_feature: MA Experiment 108464 PARAMETER Experiment Name: At_Germinating_Seeds_cDNA_P Parameter: Age (day) Value: 4 vs. 0
  misc_feature: MA Experiment 108464 PARAMETER Experiment Name: At_Germinating_Seeds_cDNA_P Parameter: Tissue Value: Germinating Seeds
  misc_feature: MA Experiment ID: 108501 Result: Up-regulated in Transcription
  misc_feature: MA Experiment 108501 PARAMETER Experiment Name: At_ap2_floral_buds_cDNA_P Parameter: Plant Line Value: ap2 (Ler.)
  misc_feature: MA Experiment 108501 PARAMETER Experiment Name: At_ap2_floral_buds_cDNA_P Parameter: Tissue Value: Closed Flower
  misc_feature: MA Experiment ID: 20000111 Result: Down-regulated in Transcription
  misc_feature: MA Experiment 20000111 PARAMETER Experiment Name: At_42deg_Heat_cDNA_P Parameter: Temperature (deg C) Value: 42 vs. 22
  misc_feature: MA Experiment 20000111 PARAMETER Experiment Name: At_42deg_Heat_cDNA_P Parameter: Timepoint (hr) Value: 6
  misc_feature: MA Experiment 20000111 PARAMETER Experiment Name: At_42deg_Heat_cDNA_P Parameter: Tissue Value: Aerial
  misc_feature: MA Experiment ID: 20000112 Result: Down-regulated in Transcription
  misc_feature: MA Experiment 20000112 PARAMETER Experiment Name: At_42deg_Heat_cDNA_P Parameter: Temperature (deg C) Value: 42 vs. 22
  misc_feature: MA Experiment 20000112 PARAMETER Experiment Name: At_42deg_Heat_cDNA_P Parameter: Timepoint (hr) Value: 2
  misc_feature: MA Experiment 20000112 PARAMETER Experiment Name: At_42deg_Heat_cDNA_P Parameter: Tissue Value: Aerial
atggcgctcgcgctctcgctgtcggcatgttctcctccactccgccgcactcgtcgtgccggttttcgaacaagctgctcgatcttcgcgaatccagcacagcgagccaagaggaagctgcttgagctgatctccgaggaggatcgaggtctgagaacccagaaagaccccaagaagcgagatgaaatcgtgaacgccatcgaatccatgacggttatcgggcgcagctccatcaccacagacgactctctatctgccacgtggcggctcttgtggacgacggagaaggaacagttgttcatcatagaaaaggcaggcttgtttgggacgaccgccggagacgttttgcaggtgatcgatgtgaataaacggatcctcaataacgtcatcactttcccgccggacggggttttcttcgtacgctccgatatcgatatcgcttccccgcagagagtcaatttcagattcaatagtgcggtattgagagggaagaactgggagctcccactgccaccatttgggaagggctggtttgagaatgtgtatatggacggtgagatcagagtggccaaggacatcagaggagactacttaattgttgatcgtgctccttataactggactgaatcatttatgttggtgtccgcaagggtagagaaacaaaagcgtgttgcttatcaggggaaggcgacagtgcttgctctcggtaaggccttgccgagcaatgttgtttcccaggagaatctcgtggaggagtatctccgtgaaatcaaatgcgataacctttctatcaaagacaagctgcaacacttgtgcaaaagcacaactgtcaagacacgctacacagtcatgtcacgggagacgctgcacaaataccctgaactagcaaccgagggttccccaaccatcaaacagaggcttgagattgcaaacgatgcggttgtgcagatggcatatgaagcgagcttggtttgcatcaaggaatggggaagggcagtggaagatatcactcatcttgtctacgtttcctccagtgagttccgtttgcccggaggtgatctttacctctcggcacagctgggccttagcaacgaggttcagagagtgatgctgtattttcttggatgctatggaggtttgagtgggctgcgcgtggccaaagacattgctgagaacaacccagggagccgtgtgttgctcaccacctctgagactaccgttctggggttccgcccacccaacaaagctcgtccttacaacttagtcggggctgcactctttggagatggagcagctgccctgatcatcggagcagaccctacagagtcggaatctcctttcatggagcttcactgtgctatgcagcagttcctgccccaaacacagggggtgatcgacgggcggctgtcagaagagggcataaccttcaagctaggaagagacctccctcagaagatcgaagacaacgtggaggagttctgcaagaagctagtggcaaaggctggctctggtgcgttggagttgaatgaccttttctgggcagttcatcctggtggaccagccatcctgagcgggctggagacaaagctgaagctgaagccggaaaagctggaatgcagcagaagggcgttgatggattatgggaacgtaagcagcaacaccatcttctacataatggacaaagtcagagatgagcttgagaagaaaggcacagagggagaagagtggggtctgggcttagctttcggaccgggaatcactttcgaaggctttctcatgaggaacctctaa

SEQ ID NO: 71290 - protein, 596 aa, Arabidopsis thaliana
  peptide (1)..(596): Ceres Seq. ID no. 3087892
  misc_feature (214)..(440): Pfam Name: Chalcone and stilbene synthases, N-terminal domain Pfam Description: Chalcone and stilbene synthases, N-terminal
  misc_feature (212)..(596): Homolog of NCBI NO: 15236691 NR Description: putative chalcone synthase; protein id: supported by cDNA: 21877. [Arabidopsis thaliana]
  misc_feature (212)..(596): Homolog of NCBI NO: 21554288 NR Description: putative chalcone synthase [Arabidopsis thaliana]
  misc_feature (222)..(596): Homolog of NCBI NO: 15217605 NR Description: unknown protein; protein id: At1g02050.1
  misc_feature (235)..(596): Homolog of NCBI NO: 7433783 NR Description: anther-specific protein - wood tobacco
  misc_feature (214)..(596): Homolog of NCBI NO: 18418528 NR Description: chalcone synthase - like protein; protein id: supported by cDNA: 19658. [Arabidopsis thaliana]
  misc_feature (214)..(596): Homolog of NCBI NO: 7433787 NR Description: anther-specific protein homolog T11I11.90 -
  misc_feature (220)..(596): Homolog of NCBI NO: 7433790 NR Description: chalcone synthase homolog ChS1 - Monterey pine
  misc_feature (227)..(596): Homolog of NCBI NO: 37535500 NR Description: anther-specific protein YY2 [Oryza sativa
  misc_feature (228)..(596): Homolog of NCBI NO: 34902722 NR Description: putative chalcone synthase [Oryza sativa cultivar- group)] >gi|24060090|dbj|BAC21541.1| putative chalcone
  misc_feature (227)..(596): Homolog of NCBI NO: 7433785 NR Description: chalcone synthase homolog - rice
MALALSLSACSPPLRRTRRAGFRTSCSIFANPAQRAKRKLLELISEEDRGLRTQKDPKKRDEIVNAIESMTVIGRSSITTDDSLSATWRLLWTTEKEQLFIIEKAGLFGTTAGDVLQVIDVNKRILNNVITFPPDGVFFVRSDIDIASPQRVNFRFNSAVLRGKNWELPLPPFGKGWFENVYMDGEIRVAKDIRGDYLIVDRAPYNWTESFMLVSARVEKQKRVAYQGKATVLALGKALPSNVVSQENLVEEYLREIKCDNLSIKDKLQHLCKSTTVKTRYTVMSRETLHKYPELATEGSPTIKQRLEIANDAVVQMAYEASLVCIKEWGRAVEDITHLVYVSSSEFRLPGGDLYLSAQLGLSNEVQRVMLYFLGCYGGLSGLRVAKDIAENNPGSRVLLTTSETTVLGFRPPNKARPYNLVGAALFGDGAAALIIGADPTESESPFMELHCAMQQFLPQTQGVIDGRLSEEGITFKLGRDLPQKIEDNVEEFCKKLVAKAGSGALELNDLFWAVHPGGPAILSGLETKLKLKPEKLECSRRALMDYGNVSSNTIFYIMDKVRDELEKKGTEGEEWGLGLAFGPGITFEGFLMRNL

SEQ ID NO: 71291 - protein, 527 aa, Arabidopsis thaliana
  peptide (1)..(527): Ceres Seq. ID no. 3087893
  misc_feature (145)..(371): Pfam Name: Chalcone and stilbene synthases, N-terminal domain Pfam Description: Chalcone and stilbene synthases, N-terminal
  misc_feature (145)..(527): Homolog of NCBI NO: 7433787 NR Description: anther-specific protein homolog T11I11.90 -
  misc_feature (151)..(527): Homolog of NCBI NO: 7433790 NR Description: chalcone synthase homolog ChS1 - Monterey pine
  misc_feature (158)..(527): Homolog of NCBI NO: 37535500 NR Description: anther-specific protein YY2 [Oryza sativa
  misc_feature (143)..(527): Homolog of NCBI NO: 21554288 NR Description: putative chalcone synthase [Arabidopsis thaliana]
  misc_feature (166)..(527): Homolog of NCBI NO: 7433783 NR Description: anther-specific protein - wood tobacco
  misc_feature (145)..(527): Homolog of NCBI NO: 18418528 NR Description: chalcone synthase - like protein; protein id: supported by cDNA: 19658. [Arabidopsis thaliana]
  misc_feature (153)..(527): Homolog of NCBI NO: 15217605 NR Description: unknown protein; protein id: At1g02050.1
  misc_feature (143)..(527): Homolog of NCBI NO: 15236691 NR Description: putative chalcone synthase; protein id: supported by cDNA: 21877. [Arabidopsis thaliana]
  misc_feature (159)..(527): Homolog of NCBI NO: 34902722 NR Description: putative chalcone synthase [Oryza sativa cultivar- group)] >gi|24060090|dbj|BAC21541.1| putative chalcone
  misc_feature (158)..(527): Homolog of NCBI NO: 7433785 NR Description: chalcone synthase homolog - rice
MTVIGRSSITTDDSLSATWRLLWTTEKEQLFIIEKAGLFGTTAGDVLQVIDVNKRILNNVITFPPDGVFFVRSDIDIASPQRVNFRFNSAVLRGKNWELPLPPFGKGWFENVYMDGEIRVAKDIRGDYLIVDRAPYNWTESFMLVSARVEKQKRVAYQGKATVLALGKALPSNVVSQENLVEEYLREIKCDNLSIKDKLQHLCKSTTVKTRYTVMSRETLHKYPELATEGSPTIKQRLEIANDAVVQMAYEASLVCIKEWGRAVEDITHLVYVSSSEFRLPGGDLYLSAQLGLSNEVQRVMLYFLGCYGGLSGLRVAKDIAENNPGSRVLLTTSETTVLGFRPPNKARPYNLVGAALFGDGAAALIIGADPTESESPFMELHCAMQQFLPQTQGVIDGRLSEEGITFKLGRDLPQKIEDNVEEFCKKLVAKAGSGALELNDLFWAVHPGGPAILSGLETKLKLKPEKLECSRRALMDYGNVSSNTIFYIMDKVRDELEKKGTEGEEWGLGLAFGPGITFEGFLMRNL

SEQ ID NO: 71292 - protein, 414 aa, Arabidopsis thaliana
  peptide (1)..(414): Ceres Seq. ID no. 3087894
  misc_feature (32)..(258): Pfam Name: Chalcone and stilbene synthases, N-terminal domain Pfam Description: Chalcone and stilbene synthases, N-terminal
  misc_feature (30)..(414): Homolog of NCBI NO: 15236691 NR Description: putative chalcone synthase; protein id: supported by cDNA: 21877. [Arabidopsis thaliana]
  misc_feature (30)..(414): Homolog of NCBI NO: 21554288 NR Description: putative chalcone synthase [Arabidopsis thaliana]
  misc_feature (40)..(414): Homolog of NCBI NO: 15217605 NR Description: unknown protein; protein id: At1g02050.1
  misc_feature (53)..(414): Homolog of NCBI NO: 7433783 NR Description: anther-specific protein - wood tobacco
  misc_feature (32)..(414): Homolog of NCBI NO: 18418528 NR Description: chalcone synthase - like protein; protein id: supported by cDNA: 19658. [Arabidopsis thaliana]
  misc_feature (32)..(414): Homolog of NCBI NO: 7433787 NR Description: anther-specific protein homolog T11I11.90 -
  misc_feature (38)..(414): Homolog of NCBI NO: 7433790 NR Description: chalcone synthase homolog ChS1 - Monterey pine
  misc_feature (45)..(414): Homolog of NCBI NO: 37535500 NR Description: anther-specific protein YY2 [Oryza sativa
  misc_feature (46)..(414): Homolog of NCBI NO: 34902722 NR Description: putative chalcone synthase [Oryza sativa cultivar- group)] >gi|24060090|dbj|BAC21541.1| putative chalcone
  misc_feature (45)..(414): Homolog of NCBI NO: 7433785 NR Description: chalcone synthase homolog - rice
MDGEIRVAKDIRGDYLIVDRAPYNWTESFMLVSARVEKQKRVAYQGKATVLALGKALPSNVVSQENLVEEYLREIKCDNLSIKDKLQHLCKSTTVKTRYTVMSRETLHKYPELATEGSPTIKQRLEIANDAVVQMAYEASLVCIKEWGRAVEDITHLVYVSSSEFRLPGGDLYLSAQLGLSNEVQRVMLYFLGCYGGLSGLRVAKDIAENNPGSRVLLTTSETTVLGFRPPNKARPYNLVGAALFGDGAAALIIGADPTESESPFMELHCAMQQFLPQTQGVIDGRLSEEGITFKLGRDLPQKIEDNVEEFCKKLVAKAGSGALELNDLFWAVHPGGPAILSGLETKLKLKPEKLECSRRALMDYGNVSSNTIFYIMDKVRDELEKKGTEGEEWGLGLAFGPGITFEGFLMRNL

SEQ ID NO: 71293 - DNA, 1026 bp, Arabidopsis thaliana
  misc_feature (1)..(1026): Ceres Seq. ID no. 3088712
  misc_feature: MA Experiment ID: 20000307 Result: Down-regulated in Transcription
  misc_feature: MA Experiment 20000307 PARAMETER Experiment Name: At_Germinating_Seeds_Sub_P Parameter: Age (hr) Value: 24 vs. 0
  misc_feature: MA Experiment 20000307 PARAMETER Experiment Name: At_Germinating_Seeds_Sub_P Parameter: Organism Value: A. thaliana
  misc_feature: MA Experiment 20000307 PARAMETER Experiment Name: At_Germinating_Seeds_Sub_P Parameter: Plant Line Value: WS
  misc_feature: MA Experiment 20000307 PARAMETER Experiment Name: At_Germinating_Seeds_Sub_P Parameter: Tissue Value: Germinating Seeds
  misc_feature: MA Experiment ID: 20000355 Result: Up-regulated in Transcription
  misc_feature: MA Experiment 20000355 PARAMETER Experiment Name: At_Siliques_Sub_P Parameter: Age (day) Value: 21
  misc_feature: MA Experiment 20000355 PARAMETER Experiment Name: At_Siliques_Sub_P Parameter: Organism Value: A. thaliana
  misc_feature: MA Experiment 20000355 PARAMETER Experiment Name: At_Siliques_Sub_P Parameter: Plant Line Value: WS
  misc_feature: MA Experiment 20000355 PARAMETER Experiment Name: At_Siliques_Sub_P Parameter: Tissue Value: Less Than 5mm Siliques vs. Whole Plant
  misc_feature: MA Experiment ID: 20000440 Result: Up-regulated in Transcription
  misc_feature: MA Experiment 20000440 PARAMETER Experiment Name: At_Closed-Flower__Sub_P Parameter: Tissue Value: Closed Flower vs. Whole Plant
atggctcttgtacccaagattcgcaatcgcaccatctcggacaaaccagtctcttcgtcttgtactagaacatcgagtttcagacaaagacttctcgccagttgcaaacgatttctcaggttcaaattgttggttcgtgcttcttcagtgtcattaaaaaagaaagcagcaaggtgttcacaatctcaacaagttgttaaacataatgatgataggattgaggaacattcttctagtaatcggggttttaaagatggcaacaatttcttagtatcatcaacagaaacgaagaagcttgttgcgttttgtggtgaacctttccaaccactcaacgaggaggaagtagctctagtcaatagtgccttgtctaagagaaacagaaagaagattttggtttcgcataaaaactccaatattgacatctctggagaaactttacaatgcctaaggccgaatcaatggcttaacgatgatgtcactaatctctatctggagttgctgaaagagagacaaactagagatccgcaaaagtacttcaagtgtcatttcttcaataccttcttttacgttaagctcgtaagcggctccggttacaattacaaagctgtcagtagatggactaccaagagaaagcttggatatgatcttattgactgtgacataatatttgttccaatccacatagatatacattggaccctgggagtgattaacaatagggaacgcaagttcgtgtatcttgattcattatttactggagttggtcatacaattttgaatgctatggcaaagtacttggtggatgaagtaaaacaaaagagtcaaaagaatattgacgttagttcatggggaatggaatacgttgaagaacgtcctcagcaacagaacgggtacgactgtgggatgtttatgcttaaatacattgatttttacagtagaggattgagtctacaatttagccagaaagacatgccgtacttcaggttaagaacagctaaggagatactgagactgcgagctgactaa

SEQ ID NO: 71294 - protein, 341 aa, Arabidopsis thaliana
  peptide (1)..(341): Ceres Seq. ID no. 3088713
  misc_feature (113)..(341): Homolog of NCBI NO: 15236895 NR Description: hypothetical protein; protein id: At4g00690.1
  misc_feature (97)..(341): Homolog of NCBI NO: 18414542 NR Description: Expressed protein; protein id: At4g15880.1, by cDNA: gi_14423393, supported by cDNA: gi_20148438 [Arabidopsis >gi|14423394|gb|AAK62379.1|AF386934_1 Unknown protein
  misc_feature (97)..(341): Homolog of NCBI NO: 34787206 NR Description: SUMO protease [Arabidopsis thaliana]
  misc_feature (105)..(341): Homolog of NCBI NO: 6728998 NR Description: hypothetical protein [Arabidopsis thaliana]
  misc_feature (105)..(341): Homolog of NCBI NO: 30680058 NR Description: Ulp1 protease family [Arabidopsis thaliana]
  misc_feature (105)..(341): Homolog of NCBI NO: 26450144 NR Description: unknown protein [Arabidopsis thaliana]
  misc_feature (105)..(341): Homolog of NCBI NO: 34915036 NR Description: P0458A05.23 [Oryza sativa (japonica
  misc_feature (97)..(317): Homolog of NCBI NO: 25371728 NR Description: hypothetical protein AT4g15880 [imported] - thaliana >gi|5281021|emb|CAB45994.1| hypothetical protein thaliana] >gi|7268336|emb|CAB78630.1| hypothetical protein
  misc_feature (97)..(293): Homolog of NCBI NO: 2326343 NR Description: G14587-5 [Arabidopsis thaliana]
  misc_feature (97)..(293): Homolog of NCBI NO: 7485126 NR Description: hypothetical protein - Arabidopsis thaliana
MALVPKIRNRTISDKPVSSSCTRTSSFRQRLLASCKRFLRFKLLVRASSVSLKKKAARCSQSQQVVKHNDDRIEEHSSSNRGFKDGNNFLVSSTETKKLVAFCGEPFQPLNEEEVALVNSALSKRNRKKILVSHKNSNIDISGETLQCLRPNQWLNDDVTNLYLELLKERQTRDPQKYFKCHFFNTFFYVKLVSGSGYNYKAVSRWTTKRKLGYDLIDCDIIFVPIHIDIHWTLGVINNRERKFVYLDSLFTGVGHTILNAMAKYLVDEVKQKSQKNIDVSSWGMEYVEERPQQQNGYDCGMFMLKYIDFYSRGLSLQFSQKDMPYFRLRTAKEILRLRAD

SEQ ID NO: 71295 - DNA, 1413 bp, Arabidopsis thaliana
  misc_feature (1)..(1413): Ceres Seq. ID no. 3090318
  misc_feature: MA Experiment ID: 108463 Result: Up-regulated in Transcription
  misc_feature: MA Experiment 108463 PARAMETER Experiment Name: At_Germinating_Seeds_cDNA_P Parameter: Age (day) Value: 3 vs. 0
  misc_feature: MA Experiment 108463 PARAMETER Experiment Name: At_Germinating_Seeds_cDNA_P Parameter: Tissue Value: Germinating Seeds
  misc_feature: MA Experiment ID: 108464 Result: Up-regulated in Transcription
  misc_feature: MA Experiment 108464 PARAMETER Experiment Name: At_Germinating_Seeds_cDNA_P Parameter: Age (day) Value: 4 vs. 0
  misc_feature: MA Experiment 108464 PARAMETER Experiment Name: At_Germinating_Seeds_cDNA_P Parameter: Tissue Value: Germinating Seeds
  misc_feature: MA Experiment ID: 108569 Result: Up-regulated in Transcription
  misc_feature: MA Experiment 108569 PARAMETER Experiment Name: At_0.001%_MeJA__cDNA_P Parameter: Timepoint (hr) Value: 6
  misc_feature: MA Experiment 108569 PARAMETER Experiment Name: At_0.001%_MeJA__cDNA_P Parameter: Tissue Value: Aerial
  misc_feature: MA Experiment 108569 PARAMETER Experiment Name: At_0.001%_MeJA__cDNA_P Parameter: Treatment Value: 0.001% MeJA vs. No Treatment
  misc_feature: MA Experiment ID: 108572 Result: Up-regulated in Transcription
  misc_feature: MA Experiment 108572 PARAMETER Experiment Name: At_Drought_cDNA_P Parameter: Timepoint (hr) Value: 1
  misc_feature: MA Experiment 108572 PARAMETER Experiment Name: At_Drought_cDNA_P Parameter: Tissue Value: Aerial
  misc_feature: MA Experiment 108572 PARAMETER Experiment Name: At_Drought_cDNA_P Parameter: Treatment Value: Drought vs. No Drought
  misc_feature: MA Experiment ID: 108573 Result: Up-regulated in Transcription
  misc_feature: MA Experiment 108573 PARAMETER Experiment Name: At_Drought_cDNA_P Parameter: Timepoint (hr) Value: 6
  misc_feature: MA Experiment 108573 PARAMETER Experiment Name: At_Drought_cDNA_P Parameter: Tissue Value: Aerial
  misc_feature: MA Experiment 108573 PARAMETER Experiment Name: At_Drought_cDNA_P Parameter: Treatment Value: Drought vs. No Drought
  misc_feature: MA Experiment ID: 108574 Result: Up-regulated in Transcription
  misc_feature: MA Experiment 108574 PARAMETER Experiment Name: At_Wounding__cDNA_P Parameter: Timepoint (hr) Value: 1
  misc_feature: MA Experiment 108574 PARAMETER Experiment Name: At_Wounding__cDNA_P Parameter: Tissue Value: Aerial
  misc_feature: MA Experiment 108574 PARAMETER Experiment Name: At_Wounding__cDNA_P Parameter: Treatment Value: Wounding vs. No Wounding
  misc_feature: MA Experiment ID: 108595 Result: Up-regulated in Transcription
  misc_feature: MA Experiment 108595 PARAMETER Experiment Name: At_Ler-pi_Ovule_cDNA_P Parameter: Plant Line Value: null
  misc_feature: MA Experiment ID: 108609 Result: Up-regulated in Transcription
  misc_feature: MA Experiment 108609 PARAMETER Experiment Name: At_100uM_ABA_cDNA_P Parameter: Timepoint (hr) Value: 24
  misc_feature: MA Experiment 108609 PARAMETER Experiment Name: At_100uM_ABA_cDNA_P Parameter: Tissue Value: Aerial
  misc_feature: MA Experiment 108609 PARAMETER Experiment Name: At_100uM_ABA_cDNA_P Parameter: Treatment Value: 100uM ABA vs. No Treatment
  misc_feature: MA Experiment ID: 20000113 Result: Down-regulated in Transcription
  misc_feature: MA Experiment 20000113 PARAMETER Experiment Name: At_42deg_Heat_cDNA_P Parameter: Temperature (deg C) Value: 42 vs. 22
  misc_feature: MA Experiment 20000113 PARAMETER Experiment Name: At_42deg_Heat_cDNA_P Parameter: Timepoint (hr) Value: 8
  misc_feature: MA Experiment 20000113 PARAMETER Experiment Name: At_42deg_Heat_cDNA_P Parameter: Tissue Value: Aerial
  misc_feature: MA Experiment ID: 20000184 Result: Down-regulated in Transcription
  misc_feature: MA Experiment 20000184 PARAMETER Experiment Name: At_Shoots__P Parameter: Age (day) Value: 7
  misc_feature: MA Experiment 20000184 PARAMETER Experiment Name: At_Shoots__P Parameter: Tissue Value: Shoots vs. Whole Plant
  misc_feature: MA Experiment ID: 20000185 Result: Down-regulated in Transcription
  misc_feature: MA Experiment 20000185 PARAMETER Experiment Name: At_Roots__P Parameter: Age (day) Value: 7 vs. 21
  misc_feature: MA Experiment 20000185 PARAMETER Experiment Name: At_Roots__P Parameter: Organism Value: A. thaliana
  misc_feature: MA Experiment 20000185 PARAMETER Experiment Name: At_Roots__P Parameter: Tissue Value: Roots vs. Whole Plant
  misc_feature: MA Experiment ID: 20000224 Result: Up-regulated in Transcription
  misc_feature: MA Experiment ID: 20000234 Result: Up-regulated in Transcription
  misc_feature: MA Experiment 20000234 PARAMETER Experiment Name: At_Siliques_P Parameter: Age (day) Value: 21
  misc_feature: MA Experiment 20000234 PARAMETER Experiment Name: At_Siliques_P Parameter: Organism Value: A. thaliana
  misc_feature: MA Experiment 20000234 PARAMETER Experiment Name: At_Siliques_P Parameter: Plant Line Value: WS
  misc_feature: MA Experiment 20000234 PARAMETER Experiment Name: At_Siliques_P Parameter: Tissue Value: Less Than 5mm Siliques vs. Whole Plant
  misc_feature: MA Experiment ID: 20000264 Result: Up-regulated in Transcription
  misc_feature: MA Experiment 20000264 PARAMETER Experiment Name: At_Open_Flower_P Parameter: Age (day) Value: 21
  misc_feature: MA Experiment 20000264 PARAMETER Experiment Name: At_Open_Flower_P Parameter: Plant Line Value: WS
  misc_feature: MA Experiment 20000264 PARAMETER Experiment Name: At_Open_Flower_P Parameter: Tissue Value: Open Flower vs. Whole Plant
  misc_feature: MA Experiment ID: 20000265 Result: Up-regulated in Transcription
  misc_feature: MA Experiment 20000265 PARAMETER Experiment Name: At_Open_Flower_P Parameter: Age (day) Value: 21
  misc_feature: MA Experiment 20000265 PARAMETER Experiment Name: At_Open_Flower_P Parameter: Plant Line Value: WS
  misc_feature: MA Experiment 20000265 PARAMETER Experiment Name: At_Open_Flower_P Parameter: Tissue Value: Closed Flower vs. Whole Plant
  misc_feature: MA Experiment ID: 20000267 Result: Up-regulated in Transcription
  misc_feature: MA Experiment 20000267 PARAMETER Experiment Name: At_Drought_P Parameter: Age (day) Value: 7
  misc_feature: MA Experiment 20000267 PARAMETER Experiment Name: At_Drought_P Parameter: Organism Value: A. thaliana
  misc_feature: MA Experiment 20000267 PARAMETER Experiment Name: At_Drought_P Parameter: Plant Line Value: WS
  misc_feature: MA Experiment 20000267 PARAMETER Experiment Name: At_Drought_P Parameter: Timepoint (hr) Value: 6
  misc_feature: MA Experiment 20000267 PARAMETER Experiment Name: At_Drought_P Parameter: Tissue Value: Whole Plant
  misc_feature: MA Experiment 20000267 PARAMETER Experiment Name: At_Drought_P Parameter: Treatment Value: Drought vs. No Drought
  misc_feature: MA Experiment ID: 20000286 Result: Up-regulated in Transcription
  misc_feature: MA Experiment 20000286 PARAMETER Experiment Name: At_Open_Flower_P Parameter: Age (day) Value: 21
  misc_feature: MA Experiment 20000286 PARAMETER Experiment Name: At_Open_Flower_P Parameter: Plant Line Value: WS
  misc_feature: MA Experiment 20000286 PARAMETER Experiment Name: At_Open_Flower_P Parameter: Tissue Value: Half Open vs. Whole Plant
  misc_feature: MA Experiment ID: 20000438 Result: Down-regulated in Transcription
  misc_feature: MA Experiment 20000438 PARAMETER Experiment Name: At_Shoots__P Parameter: Age (day) Value: 14
  misc_feature: MA Experiment 20000438 PARAMETER Experiment Name: At_Shoots__P Parameter: Tissue Value: Shoots vs. Whole Plant
  misc_feature: MA Experiment ID: 20000439 Result: Down-regulated in Transcription
  misc_feature: MA Experiment 20000439 PARAMETER Experiment Name: At_Roots__P Parameter: Age (day) Value: 14 vs. 21
  misc_feature: MA Experiment 20000439 PARAMETER Experiment Name: At_Roots__P Parameter: Organism Value: A. thaliana
  misc_feature: MA Experiment 20000439 PARAMETER Experiment Name: At_Roots__P Parameter: Tissue Value: Roots vs. Whole Plant
  misc_feature: MA Experiment ID: 20000452 Result: Up-regulated in Transcription
  misc_feature: MA Experiment 20000452 PARAMETER Experiment Name: At_CS6879_Shoots-Roots_P Parameter: Age (day) Value: 14
  misc_feature: MA Experiment 20000452 PARAMETER Experiment Name: At_CS6879_Shoots-Roots_P Parameter: Organism Value: A. thaliana
  misc_feature: MA Experiment 20000452 PARAMETER Experiment Name: At_CS6879_Shoots-Roots_P Parameter: Plant Line Value: CS6879 vs. WS
  misc_feature: MA Experiment 20000452 PARAMETER Experiment Name: At_CS6879_Shoots-Roots_P Parameter: Tissue Value: Shoots
  misc_feature: MA Experiment ID: 20000453 Result: Up-regulated in Transcription
  misc_feature: MA Experiment 20000453 PARAMETER Experiment Name: At_100uM_ABA_P Parameter: Age (day) Value: 15
  misc_feature: MA Experiment 20000453 PARAMETER Experiment Name: At_100uM_ABA_P Parameter: Organism Value: A. thaliana
  misc_feature: MA Experiment 20000453 PARAMETER Experiment Name: At_100uM_ABA_P Parameter: Plant Line Value: WS
  misc_feature: MA Experiment 20000453 PARAMETER Experiment Name: At_100uM_ABA_P Parameter: Timepoint (hr) Value: 24
  misc_feature: MA Experiment 20000453 PARAMETER Experiment Name: At_100uM_ABA_P Parameter: Tissue Value: Aerial
  misc_feature: MA Experiment 20000453 PARAMETER Experiment Name: At_100uM_ABA_P Parameter: Treatment Value: 100uM ABA vs. No Treatment
  misc_feature: MA Experiment ID: 20000456 Result: Down-regulated in Transcription
  misc_feature: MA Experiment 20000456 PARAMETER Experiment Name: At_100uM_BA_P Parameter: Age (day) Value: 14
  misc_feature: MA Experiment 20000456 PARAMETER Experiment Name: At_100uM_BA_P Parameter: Organism Value: A. thaliana
  misc_feature: MA Experiment 20000456 PARAMETER Experiment Name: At_100uM_BA_P Parameter: Plant Line Value: WS
  misc_feature: MA Experiment 20000456 PARAMETER Experiment Name: At_100uM_BA_P Parameter: Timepoint (hr) Value: 6
  misc_feature: MA Experiment 20000456 PARAMETER Experiment Name: At_100uM_BA_P Parameter: Tissue Value: Aerial
  misc_feature: MA Experiment 20000456 PARAMETER Experiment Name: At_100uM_BA_P Parameter: Treatment Value: 100uM BA vs. No Treatment
  misc_feature: MA Experiment ID: 20000495 Result: Up-regulated in Transcription
  misc_feature: MA Experiment 20000495 PARAMETER Experiment Name: At_Guard_Cells_P Parameter: Harvest Date Value: 8/2/2002
  misc_feature: MA Experiment 20000495 PARAMETER Experiment Name: At_Guard_Cells_P Parameter: Organism Value: A. thaliana
  misc_feature: MA Experiment 20000495 PARAMETER Experiment Name: At_Guard_Cells_P Parameter: Tissue Value: Guard Cells vs. Leaves
  misc_feature: MA Experiment ID: 20000527 Result: Down-regulated in Transcription
  misc_feature: MA Experiment 20000527 PARAMETER Experiment Name: At_10percent_PEG_P Parameter: Age (day) Value: 20
  misc_feature: MA Experiment 20000527 PARAMETER Experiment Name: At_10percent_PEG_P Parameter: Organism Value: A. thaliana
  misc_feature: MA Experiment 20000527 PARAMETER Experiment Name: At_10percent_PEG_P Parameter: Plant Line Value: WS
  misc_feature: MA Experiment 20000527 PARAMETER Experiment Name: At_10percent_PEG_P Parameter: Timepoint (day) Value: 20
  misc_feature: MA Experiment 20000527 PARAMETER Experiment Name: At_10percent_PEG_P Parameter: Tissue Value: Whole Plant
  misc_feature: MA Experiment 20000527 PARAMETER Experiment Name: At_10percent_PEG_P Parameter: Treatment Value: 10percent PEG vs. No Treatment
  misc_feature: MA Experiment ID: 20000573 Result: Up-regulated in Transcription
  misc_feature: MA Experiment 20000573 PARAMETER Experiment Name: At_100uM_ABA_Mutants__P Parameter: Organism Value: A. thaliana
  misc_feature: MA Experiment 20000573 PARAMETER Experiment Name: At_100uM_ABA_Mutants__P Parameter: Plant Line Value: CS22 vs. Ler wt
  misc_feature: MA Experiment 20000573 PARAMETER Experiment Name: At_100uM_ABA_Mutants__P Parameter: Timepoint (hr) Value: N/A
  misc_feature: MA Experiment 20000573 PARAMETER Experiment Name: At_100uM_ABA_Mutants__P Parameter: Tissue Value: Whole Plant
  misc_feature: MA Experiment 20000573 PARAMETER Experiment Name: At_100uM_ABA_Mutants__P Parameter: Treatment Value: None
  misc_feature: MA Experiment ID: 20000574 Result: Up-regulated in Transcription
  misc_feature: MA Experiment 20000574 PARAMETER Experiment Name: At_100uM_ABA_Mutants__P Parameter: Organism Value: A. thaliana
  misc_feature: MA Experiment 20000574 PARAMETER Experiment Name: At_100uM_ABA_Mutants__P Parameter: Plant Line Value: CS23 vs. Ler wt
  misc_feature: MA Experiment 20000574 PARAMETER Experiment Name: At_100uM_ABA_Mutants__P Parameter: Timepoint (hr) Value: N/A
  misc_feature: MA Experiment 20000574 PARAMETER Experiment Name: At_100uM_ABA_Mutants__P Parameter: Tissue Value: Whole Plant
  misc_feature: MA Experiment 20000574 PARAMETER Experiment Name: At_100uM_ABA_Mutants__P Parameter: Treatment Value: None
  misc_feature: MA Experiment ID: 20001247 Result: Down-regulated in Transcription
  misc_feature: MA Experiment 20001247 PARAMETER Experiment Name: At_Far-red-induction_P Parameter: Age (day) Value: 7
  misc_feature: MA Experiment 20001247 PARAMETER Experiment Name: At_Far-red-induction_P Parameter: Light Value: Far-red vs. White
  misc_feature: MA Experiment 20001247 PARAMETER Experiment Name: At_Far-red-induction_P Parameter: Organism Value: A. thaliana
  misc_feature: MA Experiment 20001247 PARAMETER Experiment Name: At_Far-red-induction_P Parameter: Plant Line Value: Columbia
  misc_feature: MA Experiment 20001247 PARAMETER Experiment Name: At_Far-red-induction_P Parameter: Timepoint (hr) Value: 1
  misc_feature: MA Experiment 20001247 PARAMETER Experiment Name: At_Far-red-induction_P Parameter: Tissue Value: Whole Plant
  misc_feature: MA Experiment ID: 20001248 Result: Down-regulated in Transcription
  misc_feature: MA Experiment 20001248 PARAMETER Experiment Name: At_Far-red-induction_P Parameter: Age (day) Value: 7
  misc_feature: MA Experiment 20001248 PARAMETER Experiment Name: At_Far-red-induction_P Parameter: Light Value: Far-red vs. White
  misc_feature: MA Experiment 20001248 PARAMETER Experiment Name: At_Far-red-induction_P Parameter: Organism Value: A. thaliana
  misc_feature: MA Experiment 20001248 PARAMETER Experiment Name: At_Far-red-induction_P Parameter: Plant Line Value: Columbia
  misc_feature: MA Experiment 20001248 PARAMETER Experiment Name: At_Far-red-induction_P Parameter: Timepoint (hr) Value: 4
  misc_feature: MA Experiment 20001248 PARAMETER Experiment Name: At_Far-red-induction_P Parameter: Tissue Value: Whole Plant
  misc_feature: MA Experiment ID: 20001450 Result: Down-regulated in Transcription
  misc_feature: MA Experiment 20001450 PARAMETER Experiment Name: At_Far-red-induction_P Parameter: Age (day) Value: 7
  misc_feature: MA Experiment 20001450 PARAMETER Experiment Name: At_Far-red-induction_P Parameter: Light Value: Far-red vs. White
  misc_feature: MA Experiment 20001450 PARAMETER Experiment Name: At_Far-red-induction_P Parameter: Organism Value: A. thaliana
  misc_feature: MA Experiment 20001450 PARAMETER Experiment Name: At_Far-red-induction_P Parameter: Plant Line Value: Columbia
  misc_feature: MA Experiment 20001450 PARAMETER Experiment Name: At_Far-red-induction_P Parameter: Timepoint (hr) Value: 8
  misc_feature: MA Experiment 20001450 PARAMETER Experiment Name: At_Far-red-induction_P Parameter: Tissue Value: Whole Plant
  misc_feature: MA Experiment ID: 20001458 Result: Down-regulated in Transcription
  misc_feature: MA Experiment 20001458 PARAMETER Experiment Name: At_50mM_NH4NO3_L-to-H_P Parameter: Age (day) Value: Undefined
  misc_feature: MA Experiment 20001458 PARAMETER Experiment Name: At_50mM_NH4NO3_L-to-H_P Parameter: Organism Value: Undefined
  misc_feature: MA Experiment 20001458 PARAMETER Experiment Name: At_50mM_NH4NO3_L-to-H_P Parameter: Plant Line Value: Undefined
  misc_feature: MA Experiment 20001458 PARAMETER Experiment Name: At_50mM_NH4NO3_L-to-H_P Parameter: Timepoint (hr) Value: 2
  misc_feature: MA Experiment 20001458 PARAMETER Experiment Name: At_50mM_NH4NO3_L-to-H_P Parameter: Tissue Value: Siliques
  misc_feature: MA Experiment 20001458 PARAMETER Experiment Name: At_50mM_NH4NO3_L-to-H_P Parameter: Treatment Value: 50mM NH4NO3 vs. 100mM Manitol
  misc_feature: MA Experiment ID: 20001554 Result: Up-regulated in Transcription
  misc_feature: MA Experiment 20001554 PARAMETER Experiment Name: At_Drought_Soil_Dry_P Parameter: Age (day) Value: 21
  misc_feature: MA Experiment 20001554 PARAMETER Experiment Name: At_Drought_Soil_Dry_P Parameter: Organism Value: A. thaliana
  misc_feature: MA Experiment 20001554 PARAMETER Experiment Name: At_Drought_Soil_Dry_P Parameter: Plant Line Value: WS
  misc_feature: MA Experiment 20001554 PARAMETER Experiment Name: At_Drought_Soil_Dry_P Parameter: Post Timepoint (hr) Value: None
  misc_feature: MA Experiment 20001554 PARAMETER Experiment Name: At_Drought_Soil_Dry_P Parameter: Post-Treatment Value: None
  misc_feature: MA Experiment 20001554 PARAMETER Experiment Name: At_Drought_Soil_Dry_P Parameter: Timepoint (day) Value: 7
  misc_feature: MA Experiment 20001554 PARAMETER Experiment Name: At_Drought_Soil_Dry_P Parameter: Treatment Value: Drought vs. No Drought
  misc_feature: MA Experiment ID: 20001557 Result: Down-regulated in Transcription
  misc_feature: MA Experiment 20001557 PARAMETER Experiment Name: At_Drought_Soil_Dry_P Parameter: Age (day) Value: 27
  misc_feature: MA Experiment 20001557 PARAMETER Experiment Name: At_Drought_Soil_Dry_P Parameter: Organism Value: A. thaliana
  misc_feature: MA Experiment 20001557 PARAMETER Experiment Name: At_Drought_Soil_Dry_P Parameter: Plant Line Value: WS
  misc_feature: MA Experiment 20001557 PARAMETER Experiment Name: At_Drought_Soil_Dry_P Parameter: Post Timepoint (hr) Value: 3
  misc_feature: MA Experiment 20001557 PARAMETER Experiment Name: At_Drought_Soil_Dry_P Parameter: Post-Treatment Value: Re-Water vs. No Drought
  misc_feature: MA Experiment 20001557 PARAMETER Experiment Name: At_Drought_Soil_Dry_P Parameter: Timepoint (day) Value: 13
  misc_feature: MA Experiment 20001557 PARAMETER Experiment Name: At_Drought_Soil_Dry_P Parameter: Treatment Value: Drought vs. No Drought
  misc_feature: MA Experiment ID: 20001558 Result: Down-regulated in Transcription
  misc_feature: MA Experiment 20001558 PARAMETER Experiment Name: At_Drought_Soil_Dry_P Parameter: Age (day) Value: 27
  misc_feature: MA Experiment 20001558 PARAMETER Experiment Name: At_Drought_Soil_Dry_P Parameter: Organism Value: A. thaliana
  misc_feature: MA Experiment 20001558 PARAMETER Experiment Name: At_Drought_Soil_Dry_P Parameter: Plant Line Value: WS
  misc_feature: MA Experiment 20001558 PARAMETER Experiment Name: At_Drought_Soil_Dry_P Parameter: Post Timepoint (hr) Value: 6
  misc_feature: MA Experiment 20001558 PARAMETER Experiment Name: At_Drought_Soil_Dry_P Parameter: Post-Treatment Value: Re-Water vs. No Drought
  misc_feature: MA Experiment 20001558 PARAMETER Experiment Name: At_Drought_Soil_Dry_P Parameter: Timepoint (day) Value: 13
  misc_feature: MA Experiment 20001558 PARAMETER Experiment Name: At_Drought_Soil_Dry_P Parameter: Treatment Value: Drought vs. No Drought
  misc_feature: MA Experiment ID: 20001906 Result: Down-regulated in Transcription
  misc_feature: MA Experiment 20001906 PARAMETER Experiment Name: At_Drought_Reproduction_P Parameter: Age (day) Value: 35
  misc_feature: MA Experiment 20001906 PARAMETER Experiment Name: At_Drought_Reproduction_P Parameter: Organism Value: A. thaliana
  misc_feature: MA Experiment 20001906 PARAMETER Experiment Name: At_Drought_Reproduction_P Parameter: Plant Line Value: WS
  misc_feature: MA Experiment 20001906 PARAMETER Experiment Name: At_Drought_Reproduction_P Parameter: Timepoint (day) Value: 5
  misc_feature: MA Experiment 20001906 PARAMETER Experiment Name: At_Drought_Reproduction_P Parameter: Tissue Value: Siliques
  misc_feature: MA Experiment 20001906 PARAMETER Experiment Name: At_Drought_Reproduction_P Parameter: Treatment Value: Drought vs. No Drought
atggcggcgacttccccgcggccaccaccgtcaacatccctaacatctcagcagccaccatcacccccctcacagcttcccctccgtacaatgccgggatcattccaaggacccgataagtttttccggacaagagctgagaagtataagagcactgtgttccgtacaaatattcctccgacgtttcctttcttcggcaacgttaaccctaacatcgtcgccgttcttgacgtcaagtcttttagccatctttttgacatggatctagttgataaaagagatgttctcatcggagacttccggcctagccttgggttctacggcggcgttcgtgttggagtttatctcgacactactgagccaaagcacgccaagataaaaggtttcgctatggaaacactaaaacgaagctcaaaagtatggctacaagagcttcgttcaaacctaaacattttctggggaacaatcgaatccgaaatctccaaaaacggtgccgcttcatatatcttccctctccaacgttgcatcttcagtttcctctgcgcctctctcgccggcgttgacgcttccgtatcgccggacatcgctgagaacggttggaaaacaatcaatacttggcttgcgttgcaagttattcccactgctaaacttggcgtagttcctcagcctcttgaagagattttacttcatacttggccttatccttctctcttaatcgccggaaattacaaaaagctttacaatttcatcgacgagaacgccggagattgtctccggttaggtcaagaagaattcgggttgacccgagatgaggctattcaaaatcttctctttgttttaggttttaatgcctacgggggcttttccgtcttcttaccttctttgatcgggagaataaccggcgacaattccggtttacaggagaggattagaaccgaagtcaggagagtttgcggatccgggtcggatcttaatttcaagacggttaacgaaatggagctggttaaatccgtggtttacgaaacgctgcgttttagtcctccggttccgctgcaattcgcacgtgcgaggaaagattttcagataagttcacacgatgctgtttttgaggtcaagaaaggtgagcttctttgtggttatcagccgcttgtgatgagagacgctaatgtttttgacgaaccggaggaatttaaaccggaccggtatgtaggtgagaccgggtctgaattgctgaattatctctactggtctaacggtccacaaaccggtaccccgagcgcgtcgaacaaacagtgtgcagctaaggacattgtcactctcacggcttccttgctcgttgccgatttatttctccggtatgatacgattactggtgactccggttcaattaaagctgttgttaaagctaaataa

SEQ ID NO: 71296 - protein, 470 aa, Arabidopsis thaliana
  peptide (1)..(470): Ceres Seq. ID no. 3090319
  misc_feature (4)..(470): Homolog of NCBI NO: 11357336 NR Description: hydroperoxide lyase (EC 4.1.2.-) [validated] - thaliana >gi|3822403|gb|AAC69871.1| hydroperoxide lyase
  misc_feature (1)..(38): Homolog of NCBI NO: 11357336 NR Description: hydroperoxide lyase (EC 4.1.2.-) [validated] - thaliana >gi|3822403|gb|AAC69871.1| hydroperoxide lyase
  misc_feature (32)..(470): Homolog of NCBI NO: 25308880 NR Description: hydroperoxide lyase (HPOL) like protein - Arabidopsis thaliana >gi|5281016|emb|CAB45989.1| hydroperoxide (HPOL) like protein [Arabidopsis thaliana]
  misc_feature (87)..(470): Homolog of NCBI NO: 15233810 NR Description: hydroperoxide lyase (HPOL) like protein; protein
  misc_feature (1)..(455): Homolog of NCBI NO: 7488048 NR Description: probable allene oxide synthase - Arabidopsis
  misc_feature (133)..(470): Homolog of NCBI NO: 19424049 NR Description: putative hydroperoxide lyase HPOL [Arabidopsis
  misc_feature (3)..(470): Homolog of NCBI NO: 29373125 NR Description: fatty acid hydroperoxide lyase [Citrus sinensis]
  misc_feature (3)..(470): Homolog of NCBI NO: 5830465 NR Description: hydroperoxide lyase [Medicago sativa]
  misc_feature (3)..(470): Homolog of NCBI NO: 5830469 NR Description: hydroperoxide lyase [Medicago sativa]
  misc_feature (1)..(470): Homolog of NCBI NO: 5830467 NR Description: hydroperoxide lyase [Medicago sativa]
MAATSPRPPPSTSLTSQQPPSPPSQLPLRTMPGSFQGPDKFFRTRAEKYKSTVFRTNIPPTFPFFGNVNPNIVAVLDVKSFSHLFDMDLVDKRDVLIGDFRPSLGFYGGVRVGVYLDTTEPKHAKIKGFAMETLKRSSKVWLQELRSNLNIFWGTIESEISKNGAASYIFPLQRCIFSFLCASLAGVDASVSPDIAENGWKTINTWLALQVIPTAKLGVVPQPLEEILLHTWPYPSLLIAGNYKKLYNFIDENAGDCLRLGQEEFGLTRDEAIQNLLFVLGFNAYGGFSVFLPSLIGRITGDNSGLQERIRTEVRRVCGSGSDLNFKTVNEMELVKSVVYETLRFSPPVPLQFARARKDFQISSHDAVFEVKKGELLCGYQPLVMRDANVFDEPEEFKPDRYVGETGSELLNYLYWSNGPQTGTPSASNKQCAAKDIVTLTASLLVADLFLRYDTITGDSGSIKAVVKAK

SEQ ID NO: 71297 - protein, 440 aa, Arabidopsis thaliana
  peptide (1)..(440): Ceres Seq. ID no. 3090320
  misc_feature (1)..(440): Homolog of NCBI NO: 11357336 NR Description: hydroperoxide lyase (EC 4.1.2.-) [validated] - thaliana >gi|3822403|gb|AAC69871.1| hydroperoxide lyase
  misc_feature (2)..(440): Homolog of NCBI NO: 25308880 NR Description: hydroperoxide lyase (HPOL) like protein - Arabidopsis thaliana >gi|5281016|emb|CAB45989.1| hydroperoxide (HPOL) like protein [Arabidopsis thaliana]
  misc_feature (57)..(440): Homolog of NCBI NO: 15233810 NR Description: hydroperoxide lyase (HPOL) like protein; protein
  misc_feature (1)..(425): Homolog of NCBI NO: 7488048 NR Description: probable allene oxide synthase - Arabidopsis
  misc_feature (103)..(440): Homolog of NCBI NO: 19424049 NR Description: putative hydroperoxide lyase HPOL [Arabidopsis
  misc_feature (1)..(440): Homolog of NCBI NO: 29373125 NR Description: fatty acid hydroperoxide lyase [Citrus sinensis]
  misc_feature (1)..(440): Homolog of NCBI NO: 5830465 NR Description: hydroperoxide lyase [Medicago sativa]
  misc_feature (1)..(440): Homolog of NCBI NO: 5830469 NR Description: hydroperoxide lyase [Medicago sativa]
  misc_feature (1)..(440): Homolog of NCBI NO: 5830467 NR Description: hydroperoxide lyase [Medicago sativa]
  misc_feature (5)..(439): Homolog of NCBI NO: 15982240 NR Description: hydroperoxide lyase [Nicotiana attenuata]
MPGSFQGPDKFFRTRAEKYKSTVFRTNIPPTFPFFGNVNPNIVAVLDVKSFSHLFDMDLVDKRDVLIGDFRPSLGFYGGVRVGVYLDTTEPKHAKIKGFAMETLKRSSKVWLQELRSNLNIFWGTIESEISKNGAASYIFPLQRCIFSFLCASLAGVDASVSPDIAENGWKTINTWLALQVIPTAKLGVVPQPLEEILLHTWPYPSLLIAGNYKKLYNFIDENAGDCLRLGQEEFGLTRDEAIQNLLFVLGFNAYGGFSVFLPSLIGRITGDNSGLQERIRTEVRRVCGSGSDLNFKTVNEMELVKSVVYETLRFSPPVPLQFARARKDFQISSHDAVFEVKKGELLCGYQPLVMRDANVFDEPEEFKPDRYVGETGSELLNYLYWSNGPQTGTPSASNKQCAAKDIVTLTASLLVADLFLRYDTITGDSGSIKAVVKAK

SEQ ID NO: 71298 - protein, 384 aa, Arabidopsis thaliana
  peptide (1)..(384): Ceres Seq. ID no. 3090321
  misc_feature (1)..(384): Homolog of NCBI NO: 11357336 NR Description: hydroperoxide lyase (EC 4.1.2.-) [validated] - thaliana >gi|3822403|gb|AAC69871.1| hydroperoxide lyase
  misc_feature (1)..(384): Homolog of NCBI NO: 25308880 NR Description: hydroperoxide lyase (HPOL) like protein - Arabidopsis thaliana >gi|5281016|emb|CAB45989.1| hydroperoxide (HPOL) like protein [Arabidopsis thaliana]
  misc_feature (1)..(384): Homolog of NCBI NO: 15233810 NR Description: hydroperoxide lyase (HPOL) like protein; protein
  misc_feature (1)..(369): Homolog of NCBI NO: 7488048 NR Description: probable allene oxide synthase - Arabidopsis
  misc_feature (47)..(384): Homolog of NCBI NO: 19424049 NR Description: putative hydroperoxide lyase HPOL [Arabidopsis
  misc_feature (1)..(384): Homolog of NCBI NO: 29373125 NR Description: fatty acid hydroperoxide lyase [Citrus sinensis]
  misc_feature (1)..(384): Homolog of NCBI NO: 5830465 NR Description: hydroperoxide lyase [Medicago sativa]
  misc_feature (1)..(384): Homolog of NCBI NO: 5830469 NR Description: hydroperoxide lyase [Medicago sativa]
  misc_feature (1)..(384): Homolog of NCBI NO: 5830467 NR Description: hydroperoxide lyase [Medicago sativa]
  misc_feature (1)..(383): Homolog of NCBI NO: 15982240 NR Description: hydroperoxide lyase [Nicotiana attenuata]
MDLVDKRDVLIGDFRPSLGFYGGVRVGVYLDTTEPKHAKIKGFAMETLKRSSKVWLQELRSNLNIFWGTIESEISKNGAASYIFPLQRCIFSFLCASLAGVDASVSPDIAENGWKTINTWLALQVIPTAKLGVVPQPLEEILLHTWPYPSLLIAGNYKKLYNFIDENAGDCLRLGQEEFGLTRDEAIQNLLFVLGFNAYGGFSVFLPSLIGRITGDNSGLQERIRTEVRRVCGSGSDLNFKTVNEMELVKSVVYETLRFSPPVPLQFARARKDFQISSHDAVFEVKKGELLCGYQPLVMRDANVFDEPEEFKPDRYVGETGSELLNYLYWSNGPQTGTPSASNKQCAAKDIVTLTASLLVADLFLRYDTITGDSGSIKAVVKAK

SEQ ID NO: 71299 - DNA, 585 bp, Arabidopsis thaliana
  misc_feature (1)..(585): Ceres Seq. ID no. 3090424
  misc_feature: MA Experiment ID: 20000185 Result: Up-regulated in Transcription
  misc_feature: MA Experiment 20000185 PARAMETER Experiment Name: At_Roots__P Parameter: Age (day) Value: 7 vs. 21
  misc_feature: MA Experiment 20000185 PARAMETER Experiment Name: At_Roots__P Parameter: Organism Value: A. thaliana
  misc_feature: MA Experiment 20000185 PARAMETER Experiment Name: At_Roots__P Parameter: Tissue Value: Roots vs. Whole Plant
  misc_feature: MA Experiment ID: 20000227 Result: Down-regulated in Transcription
  misc_feature: MA Experiment 20000227 PARAMETER Experiment Name: At_Root-Tips-vs-Tops_P Parameter: Tissue Value: Root Tips vs. Root Tops
  misc_feature: MA Experiment ID: 20000269 Result: Down-regulated in Transcription
  misc_feature: MA Experiment 20000269 PARAMETER Experiment Name: At_1mM_KNO3_L-vs-H_Roots_P Parameter: Age (day) Value: 7,10,12
  misc_feature: MA Experiment 20000269 PARAMETER Experiment Name: At_1mM_KNO3_L-vs-H_Roots_P Parameter: Organism Value: A. thaliana
  misc_feature: MA Experiment 20000269 PARAMETER Experiment Name: At_1mM_KNO3_L-vs-H_Roots_P Parameter: Plant Line Value: WS
  misc_feature: MA Experiment 20000269 PARAMETER Experiment Name: At_1mM_KNO3_L-vs-H_Roots_P Parameter: Timepoint (day) Value: 7,10,12
  misc_feature: MA Experiment 20000269 PARAMETER Experiment Name: At_1mM_KNO3_L-vs-H_Roots_P Parameter: Tissue Value: Roots
  misc_feature: MA Experiment 20000269 PARAMETER Experiment Name: At_1mM_KNO3_L-vs-H_Roots_P Parameter: Treatment Value: 1mM KNO3 vs. 50mM KNO3
  misc_feature: MA Experiment ID: 20000286 Result: Down-regulated in Transcription
  misc_feature: MA Experiment 20000286 PARAMETER Experiment Name: At_Open_Flower_P Parameter: Age (day) Value: 21
  misc_feature: MA Experiment 20000286 PARAMETER Experiment Name: At_Open_Flower_P Parameter: Plant Line Value: WS
  misc_feature: MA Experiment 20000286 PARAMETER Experiment Name: At_Open_Flower_P Parameter: Tissue Value: Half Open vs. Whole Plant
  misc_feature: MA Experiment ID: 20000437 Result: Up-regulated in Transcription
  misc_feature: MA Experiment 20000437 PARAMETER Experiment Name: At_Drought_P Parameter: Age (day) Value: 8
  misc_feature: MA Experiment 20000437 PARAMETER Experiment Name: At_Drought_P Parameter: Organism Value: A. thaliana
  misc_feature: MA Experiment 20000437 PARAMETER Experiment Name: At_Drought_P Parameter: Plant Line Value: WS
  misc_feature: MA Experiment 20000437 PARAMETER Experiment Name: At_Drought_P Parameter: Timepoint (hr) Value: 24
  misc_feature: MA Experiment 20000437 PARAMETER Experiment Name: At_Drought_P Parameter: Tissue Value: Whole Plant
  misc_feature: MA Experiment 20000437 PARAMETER Experiment Name: At_Drought_P Parameter: Treatment Value: Drought vs. No Drought
  misc_feature: MA Experiment ID: 20000439 Result: Up-regulated in Transcription
  misc_feature: MA Experiment 20000439 PARAMETER Experiment Name: At_Roots__P Parameter: Age (day) Value: 14 vs. 21
  misc_feature: MA Experiment 20000439 PARAMETER Experiment Name: At_Roots__P Parameter: Organism Value: A. thaliana
  misc_feature: MA Experiment 20000439 PARAMETER Experiment Name: At_Roots__P Parameter: Tissue Value: Roots vs. Whole Plant
  misc_feature: MA Experiment ID: 20000496 Result: Down-regulated in Transcription
  misc_feature: MA Experiment 20000496 PARAMETER Experiment Name: At_Guard_Cells_P Parameter: Harvest Date Value: 7/19/2002
  misc_feature: MA Experiment 20000496 PARAMETER Experiment Name: At_Guard_Cells_P Parameter: Organism Value: Canola
  misc_feature: MA Experiment 20000496 PARAMETER Experiment Name: At_Guard_Cells_P Parameter: Tissue Value: Guard Cells vs. Leaves
  misc_feature: MA Experiment ID: 20000794 Result: Down-regulated in Transcription
  misc_feature: MA Experiment 20000794 PARAMETER Experiment Name: At_Petals_P Parameter: Age (day) Value: 23-25 days
  misc_feature: MA Experiment 20000794 PARAMETER Experiment Name: At_Petals_P Parameter: Plant Line Value: WS
  misc_feature: MA Experiment 20000794 PARAMETER Experiment Name: At_Petals_P Parameter: Tissue Value: Petals vs. Whole plant
atgggtcaagaatcgtttatctatagcttcgtcgccagaggaactatgatcctcgccgagtataccgaattcacaggcaatttcccgtctattgctgctcagtgtctccagaagcttccgtcctccagcaacagcaagttcacttacaactgcgatcaccataccttcaatttccttgtcgaagatgcctacgcatattgtgttgtggcgaaagattctcttagcaagcaaatctcgatcgcatttctggagcgtgtgaaagctgatttcaagaagagatatggaggtggaaaagcaagtacagctatcgccaaaagtctcaacaaggagttcgggccggtgatgaaggaacacatgaattatattgttgaccatgcagaggagattgaaaaactaataaaagtcaaggctcaggtttcagaagttaaaagtataatgttggagaatattgacaaggcaatcgacagaggggaaaatctaacagttcttactgacaagaccgagaatctacgctctcaggcgcgggaatacaagaaaaccaagggacacaggtggaggaggaaatttgtggttaccagaacatga

SEQ ID NO: 71300 - protein, 194 aa, Arabidopsis thaliana
  peptide (1)..(194): Ceres Seq. ID no. 3090425
  misc_feature (128)..(188): Pfam Name: Synaptobrevin Pfam Description: Synaptobrevin
  misc_feature (1)..(194): Homolog of NCBI NO: 22328683 NR Description: SYBL1 like protein; protein id: At4g15780.1
  misc_feature (1)..(188): Homolog of NCBI NO: 27805752 NR Description: Vesicle-associated membrane protein 724
  misc_feature (1)..(188): Homolog of NCBI NO: 33347409 NR Description: synptobrevin-related protein [Pyrus pyrifolia]
  misc_feature (1)..(188): Homolog of NCBI NO: 15220943 NR Description: synaptobrevin 7B, putative; protein id:
  misc_feature (1)..(188): Homolog of NCBI NO: 15225796 NR Description: putative synaptobrevin; protein id: At2g33120.1, by cDNA: 2443., supported by cDNA: gi_16930420, supported by
  misc_feature (1)..(188): Homolog of NCBI NO: 27805753 NR Description: Vesicle-associated membrane protein 725
  misc_feature (1)..(188): Homolog of NCBI NO: 30685375 NR Description: synaptobrevin -related [Arabidopsis thaliana] putative synaptobrevin [Arabidopsis thaliana]
  misc_feature (1)..(188): Homolog of NCBI NO: 15220315 NR Description: synaptobrevin 7B, putative; protein id:
  misc_feature (1)..(188): Homolog of NCBI NO: 29150380 NR Description: synaptobrevin-like protein [Oryza sativa
  misc_feature (1)..(188): Homolog of NCBI NO: 600710 NR Description: formerly called HAT24; synaptobrevin-related
MGQESFIYSFVARGTMILAEYTEFTGNFPSIAAQCLQKLPSSSNSKFTYNCDHHTFNFLVEDAYAYCVVAKDSLSKQISIAFLERVKADFKKRYGGGKASTAIAKSLNKEFGPVMKEHMNYIVDHAEEIEKLIKVKAQVSEVKSIMLENIDKAIDRGENLTVLTDKTENLRSQAREYKKTKGHRWRRKFVVTRT

SEQ ID NO: 71301 - protein, 179 aa, Arabidopsis thaliana
  peptide (1)..(179): Ceres Seq. ID no. 3090426
  misc_feature (113)..(173): Pfam Name: Synaptobrevin Pfam Description: Synaptobrevin
  misc_feature (1)..(179): Homolog of NCBI NO: 22328683 NR Description: SYBL1 like protein; protein id: At4g15780.1
  misc_feature (1)..(173): Homolog of NCBI NO: 27805752 NR Description: Vesicle-associated membrane protein 724
  misc_feature (1)..(173): Homolog of NCBI NO: 33347409 NR Description: synptobrevin-related protein [Pyrus pyrifolia]
  misc_feature (1)..(173): Homolog of NCBI NO: 15220943 NR Description: synaptobrevin 7B, putative; protein id:
  misc_feature (1)..(173): Homolog of NCBI NO: 15225796 NR Description: putative synaptobrevin; protein id: At2g33120.1, by cDNA: 2443., supported by cDNA: gi_16930420, supported by
  misc_feature (1)..(173): Homolog of NCBI NO: 27805753 NR Description: Vesicle-associated membrane protein 725
  misc_feature (1)..(173): Homolog of NCBI NO: 30685375 NR Description: synaptobrevin -related [Arabidopsis thaliana] putative synaptobrevin [Arabidopsis thaliana]
  misc_feature (1)..(173): Homolog of NCBI NO: 15220315 NR Description: synaptobrevin 7B, putative; protein id:
  misc_feature (1)..(173): Homolog of NCBI NO: 29150380 NR Description: synaptobrevin-like protein [Oryza sativa
  misc_feature (1)..(173): Homolog of NCBI NO: 600710 NR Description: formerly called HAT24; synaptobrevin-related
MILAEYTEFTGNFPSIAAQCLQKLPSSSNSKFTYNCDHHTFNFLVEDAYAYCVVAKDSLSKQISIAFLERVKADFKKRYGGGKASTAIAKSLNKEFGPVMKEHMNYIVDHAEEIEKLIKVKAQVSEVKSIMLENIDKAIDRGENLTVLTDKTENLRSQAREYKKTKGHRWRRKFVVTRT

SEQ ID NO: 71302 - DNA, 1446 bp, Arabidopsis thaliana
  misc_feature (1)..(1446): Ceres Seq. ID no. 3091091
  misc_feature: MA Experiment ID: 20000182 Result: Up-regulated in Transcription
  misc_feature: MA Experiment 20000182 PARAMETER Experiment Name: At_2mM_SA_P Parameter: Age (day) Value: 14
  misc_feature: MA Experiment 20000182 PARAMETER Experiment Name: At_2mM_SA_P Parameter: Organism Value: A. thaliana
  misc_feature: MA Experiment 20000182 PARAMETER Experiment Name: At_2mM_SA_P Parameter: Plant Line Value: WS
  misc_feature: MA Experiment 20000182 PARAMETER Experiment Name: At_2mM_SA_P Parameter: Timepoint (hr) Value: 6
  misc_feature: MA Experiment 20000182 PARAMETER Experiment Name: At_2mM_SA_P Parameter: Tissue Value: Aerial
  misc_feature: MA Experiment 20000182 PARAMETER Experiment Name: At_2mM_SA_P Parameter: Treatment Value: 2mM SA vs. No Treatment
  misc_feature: MA Experiment ID: 20000185 Result: Up-regulated in Transcription
  misc_feature: MA Experiment 20000185 PARAMETER Experiment Name: At_Roots__P Parameter: Age (day) Value: 7 vs. 21
  misc_feature: MA Experiment 20000185 PARAMETER Experiment Name: At_Roots__P Parameter: Organism Value: A. thaliana
  misc_feature: MA Experiment 20000185 PARAMETER Experiment Name: At_Roots__P Parameter: Tissue Value: Roots vs. Whole Plant
  misc_feature: MA Experiment ID: 20000439 Result: Up-regulated in Transcription
  misc_feature: MA Experiment 20000439 PARAMETER Experiment Name: At_Roots__P Parameter: Age (day) Value: 14 vs. 21
  misc_feature: MA Experiment 20000439 PARAMETER Experiment Name: At_Roots__P Parameter: Organism Value: A. thaliana
  misc_feature: MA Experiment 20000439 PARAMETER Experiment Name: At_Roots__P Parameter: Tissue Value: Roots vs. Whole Plant
  misc_feature: MA Experiment ID: 20000527 Result: Down-regulated in Transcription
  misc_feature: MA Experiment 20000527 PARAMETER Experiment Name: At_10percent_PEG_P Parameter: Age (day) Value: 20
  misc_feature: MA Experiment 20000527 PARAMETER Experiment Name: At_10percent_PEG_P Parameter: Organism Value: A. thaliana
  misc_feature: MA Experiment 20000527 PARAMETER Experiment Name: At_10percent_PEG_P Parameter: Plant Line Value: WS
  misc_feature: MA Experiment 20000527 PARAMETER Experiment Name: At_10percent_PEG_P Parameter: Timepoint (day) Value: 20
  misc_feature: MA Experiment 20000527 PARAMETER Experiment Name: At_10percent_PEG_P Parameter: Tissue Value: Whole Plant
  misc_feature: MA Experiment 20000527 PARAMETER Experiment Name: At_10percent_PEG_P Parameter: Treatment Value: 10percent PEG vs. No Treatment
  misc_feature: MA Experiment ID: 20001554 Result: Down-regulated in Transcription
  misc_feature: MA Experiment 20001554 PARAMETER Experiment Name: At_Drought_Soil_Dry_P Parameter: Age (day) Value: 21
  misc_feature: MA Experiment 20001554 PARAMETER Experiment Name: At_Drought_Soil_Dry_P Parameter: Organism Value: A. thaliana
  misc_feature: MA Experiment 20001554 PARAMETER Experiment Name: At_Drought_Soil_Dry_P Parameter: Plant Line Value: WS
  misc_feature: MA Experiment 20001554 PARAMETER Experiment Name: At_Drought_Soil_Dry_P Parameter: Post Timepoint (hr) Value: None
  misc_feature: MA Experiment 20001554 PARAMETER Experiment Name: At_Drought_Soil_Dry_P Parameter: Post-Treatment Value: None
  misc_feature: MA Experiment 20001554 PARAMETER Experiment Name: At_Drought_Soil_Dry_P Parameter: Timepoint (day) Value: 7
  misc_feature: MA Experiment 20001554 PARAMETER Experiment Name: At_Drought_Soil_Dry_P Parameter: Treatment Value: Drought vs. No Drought
  misc_feature: MA Experiment ID: 20001905 Result: Up-regulated in Transcription
  misc_feature: MA Experiment 20001905 PARAMETER Experiment Name: At_Drought_Reproduction_P Parameter: Age (day) Value: 40
  misc_feature: MA Experiment 20001905 PARAMETER Experiment Name: At_Drought_Reproduction_P Parameter: Organism Value: A. thaliana
  misc_feature: MA Experiment 20001905 PARAMETER Experiment Name: At_Drought_Reproduction_P Parameter: Plant Line Value: WS
  misc_feature: MA Experiment 20001905 PARAMETER Experiment Name: At_Drought_Reproduction_P Parameter: Timepoint (day) Value: 10
  misc_feature: MA Experiment 20001905 PARAMETER Experiment Name: At_Drought_Reproduction_P Parameter: Tissue Value: Rosettes
  misc_feature: MA Experiment 20001905 PARAMETER Experiment Name: At_Drought_Reproduction_P Parameter: Treatment Value: Drought vs. No Drought
atggagatgatattaatctctttgtgcttaaccaccttattagcatttctcttcctaaaaccactcctcaaacgaatcaccaccaccaaacctaagttaccaccgtctccatggcggcttccggtgattggaaacctccaccagctcggtcccaaccctcaccgctatctccattccctcagcctccggtatgggccactcatgctccttcatttcggccgtgtacctgtgcttgtggtttcttgtcctgacgtgactaatgacatcatgaaaacacacgaccttaagttcgcaaaccgcccgaaatcaaaagctattaatatatttatggaaggtggccgtgatataatctttggcccctacggagaagattggaagagtatgaagagtctgggtgtggtacatctgctcaataacaaaatggttaggtcctttgagaacctaagagaagaagagatcaaagtaatgacagagaagctggaagaagcatcttcatcttcttcatcagtaaatctaagcaaactccttatgactcttaccaacgatatcatatgcagaatcaccttgggaagaaaatataacgaagaggaaggtggaatcgatatcaagaacttagtgatgacatcctctgagttttttggcaaattcttttttggagattttattcctagtttggcatggatagactggatcagtggcatagatgataaaatgaaggacataaataacaagttagattgttttttagacagcatggtgcaagaacatgttgatgccgatcacaaagagccatcagattttattgatatgttgctactgattcaaaaggataaaaccaaacggtttaagtttgacagaagtgacttaatactcatactcaaggatatgtttttctctggaacagcaacaactgcctcacaattagaatggacaatgacagagcttatgagacatccagagtgtatgaaaaaacttcaagatgagattaattcattttcgacacataatttgaatgtaacggagaaagaagttgagaaaatgaactatttacattgcgtgattaaggaggggctacggttgcatccctctggtccactattgttcagactaccaagtgaagatgtccaattaaagggatatgacatttctgcagggacacatgtcataatcaatgcttgggcactccaacgaaaccctgcgatatgggggcttgatgccaatgaatatagaccggagagacattttgggagaagactttgccctggaatcggattttctttggttttgtccaaattggcactagccaaccttgtgaaacgattcaactggagactcaaggtcggaccagtaggagatgataagcctgatctagctgaagcatctggtattgatgtttgtcgtaagtttcctctcattgtctttccatcaattgcgcacacacattga

SEQ ID NO: 71303 - protein, 481 aa, Arabidopsis thaliana
  peptide (1)..(481): Ceres Seq. ID no. 3091092
  misc_feature (1)..(415): Homolog of NCBI NO: 21542394 NR Description: Cytochrome P450 71A27
  misc_feature (416)..(481): Homolog of NCBI NO: 21542394 NR Description: Cytochrome P450 71A27
  misc_feature (1)..(466): Homolog of NCBI NO: 22328826 NR Description: menthofuran synthase(cytochrome p450 family),
  misc_feature (1)..(453): Homolog of NCBI NO: 7430654 NR Description: probable cytochrome P450 F1C12.160 - Arabidopsis >gi|2982441|emb|CAA18249.1| cytochrome p450 like protein thaliana] >gi|7268819|emb|CAB79024.1| cytochrome p450 like
  misc_feature (3)..(419): Homolog of NCBI NO: 13878406 NR Description: Cytochrome P450 71A20 >gi|7430641|pir||T06288
  misc_feature (416)..(478): Homolog of NCBI NO: 13878406 NR Description: Cytochrome P450 71A20 >gi|7430641|pir||T06288
  misc_feature (1)..(415): Homolog of NCBI NO: 15239008 NR Description: cytochrome p450, putative; protein id: [Arabidopsis thaliana] >gi|13878374|sp|Q9FH66|C71G_ARATH P450 71A16 >gi|9759017|dbj|BAB09330.1| cytochrome P450
  misc_feature (416)..(478): Homolog of NCBI NO: 15239008 NR Description: cytochrome p450, putative; protein id: [Arabidopsis thaliana] >gi|13878374|sp|Q9FH66|C71G_ARATH P450 71A16 >gi|9759017|dbj|BAB09330.1| cytochrome P450
  misc_feature (1)..(414): Homolog of NCBI NO: 15224570 NR Description: cytochrome p450 family; protein id: At2g30770.1
  misc_feature (416)..(476): Homolog of NCBI NO: 15224570 NR Description: cytochrome p450 family; protein id: At2g30770.1
MEMILISLCLTTLLAFLFLKPLLKRITTTKPKLPPSPWRLPVIGNLHQLGPNPHRYLHSLSLRYGPLMLLHFGRVPVLVVSCPDVTNDIMKTHDLKFANRPKSKAINIFMEGGRDIIFGPYGEDWKSMKSLGVVHLLNNKMVRSFENLREEEIKVMTEKLEEASSSSSSVNLSKLLMTLTNDIICRITLGRKYNEEEGGIDIKNLVMTSSEFFGKFFFGDFIPSLAWIDWISGIDDKMKDINNKLDCFLDSMVQEHVDADHKEPSDFIDMLLLIQKDKTKRFKFDRSDLILILKDMFFSGTATTASQLEWTMTELMRHPECMKKLQDEINSFSTHNLNVTEKEVEKMNYLHCVIKEGLRLHPSGPLLFRLPSEDVQLKGYDISAGTHVIINAWALQRNPAIWGLDANEYRPERHFGRRLCPGIGFSLVLSKLALANLVKRFNWRLKVGPVGDDKPDLAEASGIDVCRKFPLIVFPSIAHTH

SEQ ID NO: 71304 - protein, 479 aa, Arabidopsis thaliana
  peptide (1)..(479): Ceres Seq. ID no. 3091093
  misc_feature (1)..(413): Homolog of NCBI NO: 21542394 NR Description: Cytochrome P450 71A27
  misc_feature (414)..(479): Homolog of NCBI NO: 21542394 NR Description: Cytochrome P450 71A27
  misc_feature (1)..(464): Homolog of NCBI NO: 22328826 NR Description: menthofuran synthase(cytochrome p450 family),
  misc_feature (1)..(451): Homolog of NCBI NO: 7430654 NR Description: probable cytochrome P450 F1C12.160 - Arabidopsis >gi|2982441|emb|CAA18249.1| cytochrome p450 like protein thaliana] >gi|7268819|emb|CAB79024.1| cytochrome p450 like
  misc_feature (1)..(417): Homolog of NCBI NO: 13878406 NR Description: Cytochrome P450 71A20 >gi|7430641|pir||T06288
  misc_feature (414)..(476): Homolog of NCBI NO: 13878406 NR Description: Cytochrome P450 71A20 >gi|7430641|pir||T06288
  misc_feature (1)..(413): Homolog of NCBI NO: 15239008 NR Description: cytochrome p450, putative; protein id: [Arabidopsis thaliana] >gi|13878374|sp|Q9FH66|C71G_ARATH P450 71A16 >gi|9759017|dbj|BAB09330.1| cytochrome P450
  misc_feature (414)..(476): Homolog of NCBI NO: 15239008 NR Description: cytochrome p450, putative; protein id: [Arabidopsis thaliana] >gi|13878374|sp|Q9FH66|C71G_ARATH P450 71A16 >gi|9759017|dbj|BAB09330.1| cytochrome P450
  misc_feature (1)..(412): Homolog of NCBI NO: 15224570 NR Description: cytochrome p450 family; protein id: At2g30770.1
  misc_feature (414)..(474): Homolog of NCBI NO: 15224570 NR Description: cytochrome p450 family; protein id: At2g30770.1
MILISLCLTTLLAFLFLKPLLKRITTTKPKLPPSPWRLPVIGNLHQLGPNPHRYLHSLSLRYGPLMLLHFGRVPVLVVSCPDVTNDIMKTHDLKFANRPKSKAINIFMEGGRDIIFGPYGEDWKSMKSLGVVHLLNNKMVRSFENLREEEIKVMTEKLEEASSSSSSVNLSKLLMTLTNDIICRITLGRKYNEEEGGIDIKNLVMTSSEFFGKFFFGDFIPSLAWIDWISGIDDKMKDINNKLDCFLDSMVQEHVDADHKEPSDFIDMLLLIQKDKTKRFKFDRSDLILILKDMFFSGTATTASQLEWTMTELMRHPECMKKLQDEINSFSTHNLNVTEKEVEKMNYLHCVIKEGLRLHPSGPLLFRLPSEDVQLKGYDISAGTHVIINAWALQRNPAIWGLDANEYRPERHFGRRLCPGIGFSLVLSKLALANLVKRFNWRLKVGPVGDDKPDLAEASGIDVCRKFPLIVFPSIAHTH

SEQ ID NO: 71305 - protein, 414 aa, Arabidopsis thaliana
  peptide (1)..(414): Ceres Seq. ID no. 3091094
  misc_feature (1)..(348): Homolog of NCBI NO: 21542394 NR Description: Cytochrome P450 71A27
  misc_feature (349)..(414): Homolog of NCBI NO: 21542394 NR Description: Cytochrome P450 71A27
  misc_feature (1)..(399): Homolog of NCBI NO: 22328826 NR Description: menthofuran synthase(cytochrome p450 family),
  misc_feature (1)..(386): Homolog of NCBI NO: 7430654 NR Description: probable cytochrome P450 F1C12.160 - Arabidopsis >gi|2982441|emb|CAA18249.1| cytochrome p450 like protein thaliana] >gi|7268819|emb|CAB79024.1| cytochrome p450 like
  misc_feature (1)..(352): Homolog of NCBI NO: 13878406 NR Description: Cytochrome P450 71A20 >gi|7430641|pir||T06288
  misc_feature (349)..(411): Homolog of NCBI NO: 13878406 NR Description: Cytochrome P450 71A20 >gi|7430641|pir||T06288
  misc_feature (1)..(348): Homolog of NCBI NO: 15239008 NR Description: cytochrome p450, putative; protein id: [Arabidopsis thaliana] >gi|13878374|sp|Q9FH66|C71G_ARATH P450 71A16 >gi|9759017|dbj|BAB09330.1| cytochrome P450
  misc_feature (349)..(411): Homolog of NCBI NO: 15239008 NR Description: cytochrome p450, putative; protein id: [Arabidopsis thaliana] >gi|13878374|sp|Q9FH66|C71G_ARATH P450 71A16 >gi|9759017|dbj|BAB09330.1| cytochrome P450
  misc_feature (1)..(347): Homolog of NCBI NO: 15224570 NR Description: cytochrome p450 family; protein id: At2g30770.1
  misc_feature (349)..(409): Homolog of NCBI NO: 15224570 NR Description: cytochrome p450 family; protein id: At2g30770.1
MLLHFGRVPVLVVSCPDVTNDIMKTHDLKFANRPKSKAINIFMEGGRDIIFGPYGEDWKSMKSLGVVHLLNNKMVRSFENLREEEIKVMTEKLEEASSSSSSVNLSKLLMTLTNDIICRITLGRKYNEEEGGIDIKNLVMTSSEFFGKFFFGDFIPSLAWIDWISGIDDKMKDINNKLDCFLDSMVQEHVDADHKEPSDFIDMLLLIQKDKTKRFKFDRSDLILILKDMFFSGTATTASQLEWTMTELMRHPECMKKLQDEINSFSTHNLNVTEKEVEKMNYLHCVIKEGLRLHPSGPLLFRLPSEDVQLKGYDISAGTHVIINAWALQRNPAIWGLDANEYRPERHFGRRLCPGIGFSLVLSKLALANLVKRFNWRLKVGPVGDDKPDLAEASGIDVCRKFPLIVFPSIAHTH

SEQ ID NO: 71306 - DNA, 1065 bp, Arabidopsis thaliana
  misc_feature (1)..(1065): Ceres Seq. ID no. 3091129
  misc_feature: MA Experiment ID: 20000269 Result: Up-regulated in Transcription
  misc_feature: MA Experiment 20000269 PARAMETER Experiment Name: At_1mM_KNO3_L-vs-H_Roots_P Parameter: Age (day) Value: 7,10,12
  misc_feature: MA Experiment 20000269 PARAMETER Experiment Name: At_1mM_KNO3_L-vs-H_Roots_P Parameter: Organism Value: A. thaliana
  misc_feature: MA Experiment 20000269 PARAMETER Experiment Name: At_1mM_KNO3_L-vs-H_Roots_P Parameter: Plant Line Value: WS
  misc_feature: MA Experiment 20000269 PARAMETER Experiment Name: At_1mM_KNO3_L-vs-H_Roots_P Parameter: Timepoint (day) Value: 7,10,12
  misc_feature: MA Experiment 20000269 PARAMETER Experiment Name: At_1mM_KNO3_L-vs-H_Roots_P Parameter: Tissue Value: Roots
  misc_feature: MA Experiment 20000269 PARAMETER Experiment Name: At_1mM_KNO3_L-vs-H_Roots_P Parameter: Treatment Value: 1mM KNO3 vs. 50mM KNO3
  misc_feature: MA Experiment ID: 20000439 Result: Up-regulated in Transcription
  misc_feature: MA Experiment 20000439 PARAMETER Experiment Name: At_Roots__P Parameter: Age (day) Value: 14 vs. 21
  misc_feature: MA Experiment 20000439 PARAMETER Experiment Name: At_Roots__P Parameter: Organism Value: A. thaliana
  misc_feature: MA Experiment 20000439 PARAMETER Experiment Name: At_Roots__P Parameter: Tissue Value: Roots vs. Whole Plant
  misc_feature: MA Experiment ID: 20000527 Result: Down-regulated in Transcription
  misc_feature: MA Experiment 20000527 PARAMETER Experiment Name: At_10percent_PEG_P Parameter: Age (day) Value: 20
  misc_feature: MA Experiment 20000527 PARAMETER Experiment Name: At_10percent_PEG_P Parameter: Organism Value: A. thaliana
  misc_feature: MA Experiment 20000527 PARAMETER Experiment Name: At_10percent_PEG_P Parameter: Plant Line Value: WS
  misc_feature: MA Experiment 20000527 PARAMETER Experiment Name: At_10percent_PEG_P Parameter: Timepoint (day) Value: 20
  misc_feature: MA Experiment 20000527 PARAMETER Experiment Name: At_10percent_PEG_P Parameter: Tissue Value: Whole Plant
  misc_feature: MA Experiment 20000527 PARAMETER Experiment Name: At_10percent_PEG_P Parameter: Treatment Value: 10percent PEG vs. No Treatment
atgaactcttctccttcttcttcttcttccccttcaagttttcttgattatggatctgcgatcggacaaaaagaagtaaagaaaatcctggttttggttctaggtttagctgcttgtcttcttctttacaaaacagcttatcctcttcatcaagagctcgatgttaacaatctcagctctcgtcctttgctcgatcacacctcttcgtcttctccactaacaagatcaaaatcgatcagttttagggaagttctggagaatgcatcaacagagaatcgaacagttattgtaacaacgttgaaccaagcatgggcagagccaaactctctgttcgatctatttcttgagagttttcgtatcggacaaggaacaaagaagttacttcaacatgtggttgtggtttgcttggattccaaggcatttgctcgctgctcacaacttcaccctaattgctactatttgaaaaccacagggactgatttctccggcgagaaactctttgctactcctgattacctcaaaatgatgtggcgaagaatcgagcttctcacacaagtgctagaaatgggatacaacttcatcttcacggatgcggatataatgtggcttcgagatccatttcctcggctgtatcctgatggagattttcaaatggcatgtgatcgattcttcggtgatcctcatgactcagacaattgggtaaacggaggattcacttacgtgaaatcaaaccacagaagcatcgagttctacaaattttggtacaattctcgtcttgattatccgaagatgcatgaccaagatgtgttcaaccaaatcaaacacaaggctttagtctcagagattggaatccaaatgagattctttgatacggtttactttggtgggttttgtcaaacgagcagagacataaacttggtgtgtaccatgcatgctaattgttgtgtaggattagcgaagaagcttcatgatcttaatcttgttcttgatgactggagaaactatttgtctttgtctgaaccagttaaaaacacaacttggagtgttcctatgaagtgtacatga

SEQ ID NO: 71307 - protein, 354 aa, Arabidopsis thaliana
  peptide (1)..(354): Ceres Seq. ID no. 3091130
  misc_feature (201)..(353): Homolog of NCBI NO: 15241586 NR Description: putative protein; protein id: At5g44810.1 thaliana] >gi|2660668|gb|AAC79139.1| unknown protein [Arabidopsis >gi|9758385|dbj|BAB08834.1|
  misc_feature (92)..(353): Homolog of NCBI NO: 6063544 NR Description: similar to Arabidopsis thaliana chromosome 2, BAC
  misc_feature (1)..(354): Homolog of NCBI NO: 15235236 NR Description: hypothetical protein common family; protein id:
  misc_feature (2)..(353): Homolog of NCBI NO: 21536907 NR Description: regulatory protein [Arabidopsis thaliana]
  misc_feature (26)..(354): Homolog of NCBI NO: 18395292 NR Description: unknown protein; protein id: At2g02060.1
  misc_feature (8)..(350): Homolog of NCBI NO: 15235236 NR Description: hypothetical protein common family; protein id:
  misc_feature (76)..(354): Homolog of NCBI NO: 38344278 NR Description: OSJNBa0013K16.10 [Oryza sativa (japonica
  misc_feature (38)..(354): Homolog of NCBI NO: 15223826 NR Description: hypothetical protein common family; protein id:
  misc_feature (83)..(353): Homolog of NCBI NO: 18414558 NR Description: hypothetical protein common family; protein id:
  misc_feature (51)..(354): Homolog of NCBI NO: 23306127 NR Description: Putataive InsB from Escherichia coli [Oryza
MNSSPSSSSSPSSFLDYGSAIGQKEVKKILVLVLGLAACLLLYKTAYPLHQELDVNNLSSRPLLDHTSSSSPLTRSKSISFREVLENASTENRTVIVTTLNQAWAEPNSLFDLFLESFRIGQGTKKLLQHVVVVCLDSKAFARCSQLHPNCYYLKTTGTDFSGEKLFATPDYLKMMWRRIELLTQVLEMGYNFIFTDADIMWLRDPFPRLYPDGDFQMACDRFFGDPHDSDNWVNGGFTYVKSNHRSIEFYKFWYNSRLDYPKMHDQDVFNQIKHKALVSEIGIQMRFFDTVYFGGFCQTSRDINLVCTMHANCCVGLAKKLHDLNLVLDDWRNYLSLSEPVKNTTWSVPMKCT

SEQ ID NO: 71308 - protein, 180 aa, Arabidopsis thaliana
  peptide (1)..(180): Ceres Seq. ID no. 3091131
  misc_feature (1)..(180): Homolog of NCBI NO: 15235236 NR Description: hypothetical protein common family; protein id:
  misc_feature (1)..(179): Homolog of NCBI NO: 21536907 NR Description: regulatory protein [Arabidopsis thaliana]
  misc_feature (1)..(180): Homolog of NCBI NO: 18395292 NR Description: unknown protein; protein id: At2g02060.1
  misc_feature (1)..(176): Homolog of NCBI NO: 15235236 NR Description: hypothetical protein common family; protein id:
  misc_feature (1)..(180): Homolog of NCBI NO: 38344278 NR Description: OSJNBa0013K16.10 [Oryza sativa (japonica
  misc_feature (1)..(180): Homolog of NCBI NO: 15223826 NR Description: hypothetical protein common family; protein id:
  misc_feature (1)..(179): Homolog of NCBI NO: 18414558 NR Description: hypothetical protein common family; protein id:
  misc_feature (1)..(180): Homolog of NCBI NO: 23306127 NR Description: Putataive InsB from Escherichia coli [Oryza
  misc_feature (27)..(179): Homolog of NCBI NO: 15241586 NR Description: putative protein; protein id: At5g44810.1 thaliana] >gi|2660668|gb|AAC79139.1| unknown protein [Arabidopsis >gi|9758385|dbj|BAB08834.1|
  misc_feature (1)..(179): Homolog of NCBI NO: 6063544 NR Description: similar to Arabidopsis thaliana chromosome 2, BAC
MMWRRIELLTQVLEMGYNFIFTDADIMWLRDPFPRLYPDGDFQMACDRFFGDPHDSDNWVNGGFTYVKSNHRSIEFYKFWYNSRLDYPKMHDQDVFNQIKHKALVSEIGIQMRFFDTVYFGGFCQTSRDINLVCTMHANCCVGLAKKLHDLNLVLDDWRNYLSLSEPVKNTTWSVPMKCT

SEQ ID NO: 71309 - protein, 179 aa, Arabidopsis thaliana
  peptide (1)..(179): Ceres Seq. ID no. 3091132
  misc_feature (1)..(179): Homolog of NCBI NO: 15235236 NR Description: hypothetical protein common family; protein id:
  misc_feature (1)..(178): Homolog of NCBI NO: 21536907 NR Description: regulatory protein [Arabidopsis thaliana]
  misc_feature (1)..(179): Homolog of NCBI NO: 18395292 NR Description: unknown protein; protein id: At2g02060.1
  misc_feature (1)..(175): Homolog of NCBI NO: 15235236 NR Description: hypothetical protein common family; protein id:
  misc_feature (1)..(179): Homolog of NCBI NO: 38344278 NR Description: OSJNBa0013K16.10 [Oryza sativa (japonica
  misc_feature (1)..(179): Homolog of NCBI NO: 15223826 NR Description: hypothetical protein common family; protein id:
  misc_feature (1)..(178): Homolog of NCBI NO: 18414558 NR Description: hypothetical protein common family; protein id:
  misc_feature (1)..(179): Homolog of NCBI NO: 23306127 NR Description: Putataive InsB from Escherichia coli [Oryza
  misc_feature (26)..(178): Homolog of NCBI NO: 15241586 NR Description: putative protein; protein id: At5g44810.1 thaliana] >gi|2660668|gb|AAC79139.1| unknown protein [Arabidopsis >gi|9758385|dbj|BAB08834.1|
  misc_feature (1)..(178): Homolog of NCBI NO: 6063544 NR Description: similar to Arabidopsis thaliana chromosome 2, BAC
MWRRIELLTQVLEMGYNFIFTDADIMWLRDPFPRLYPDGDFQMACDRFFGDPHDSDNWVNGGFTYVKSNHRSIEFYKFWYNSRLDYPKMHDQDVFNQIKHKALVSEIGIQMRFFDTVYFGGFCQTSRDINLVCTMHANCCVGLAKKLHDLNLVLDDWRNYLSLSEPVKNTTWSVPMKCT

SEQ ID NO: 71310 - DNA, 966 bp, Arabidopsis thaliana
  misc_feature (1)..(966): Ceres Seq. ID no. 3091140
  misc_feature: MA Experiment ID: 20000347 Result: Up-regulated in Transcription
  misc_feature: MA Experiment 20000347 PARAMETER Experiment Name: At_2mM_SA_Sub_P Parameter: Age (day) Value: 14
  misc_feature: MA Experiment 20000347 PARAMETER Experiment Name: At_2mM_SA_Sub_P Parameter: Organism Value: A. thaliana
  misc_feature: MA Experiment 20000347 PARAMETER Experiment Name: At_2mM_SA_Sub_P Parameter: Plant Line Value: WS
  misc_feature: MA Experiment 20000347 PARAMETER Experiment Name: At_2mM_SA_Sub_P Parameter: Timepoint (hr) Value: 6
  misc_feature: MA Experiment 20000347 PARAMETER Experiment Name: At_2mM_SA_Sub_P Parameter: Tissue Value: Aerial
  misc_feature: MA Experiment 20000347 PARAMETER Experiment Name: At_2mM_SA_Sub_P Parameter: Treatment Value: 2mM SA vs. No Treatment
  misc_feature: MA Experiment ID: 20000355 Result: Down-regulated in Transcription
  misc_feature: MA Experiment 20000355 PARAMETER Experiment Name: At_Siliques_Sub_P Parameter: Age (day) Value: 21
  misc_feature: MA Experiment 20000355 PARAMETER Experiment Name: At_Siliques_Sub_P Parameter: Organism Value: A. thaliana
  misc_feature: MA Experiment 20000355 PARAMETER Experiment Name: At_Siliques_Sub_P Parameter: Plant Line Value: WS
  misc_feature: MA Experiment 20000355 PARAMETER Experiment Name: At_Siliques_Sub_P Parameter: Tissue Value: Less Than 5mm Siliques vs. Whole Plant
atggatcttgccccagaggagcttcaatttctcaacaaaagaggaattctacgtgaatcaacatcaatcccacaatattctctaaaaaccttttacctcataaccctaaccctaattttccctctctccttcgcaatcctagcccattctctcttcacacaaccaatcttagctcagatcgatacatacccacaagccgatcaatctcaactccaacatgaatggaccgtcctcctcgttttccaattctgctacatcatcttcctcttcgccttctctcttctctccacagccgccgttgtcttcaccgtcgcttctctttacaccggaaagcctgtttctttctcctccacaatgtcagcgatacctctcgtcctcaaaagattgttcataacattcctctgggtctctcttttgatgcttgcgtacaacaccgtgttcttgatcttcttggtcacgttaatcgtagctgttgatttacagaacgtggttttagctgtgttttcgttggtagtgatctttgttctgtttcttgtagttcatgtttatatgacagctttgtggcatttagctagtgtagtctctgttcttgaaccgatttacggtttggctgcgatgaagaagagttatgagttgcttaaagggaagactcttatggcttgttcgatggttttcatctatcttgttcattgtggattcattgctggagtttttggagcagtggtggttcgtggtggtgatgattacggaattttcgctagaatcgtcgctggtggattcttggttggtgttcttgtgatagtgaatctaattggactgcttgtgcagagtgtgttttactatgtttgcaagagttttcatcatcaggagattgataaatccgctttgcacgatcatctcggtgggtatctcggtgaatatgtgcctcttaagagcaacattcaaatggagaactttgaagtttga

SEQ ID NO: 71311 - protein, 321 aa, Arabidopsis thaliana
  peptide (1)..(321): Ceres Seq. ID no. 3091141
  misc_feature (1)..(321): Homolog of NCBI NO: 30684945 NR Description: expressed protein [Arabidopsis thaliana]
  misc_feature (1)..(321): Homolog of NCBI NO: 7485737 NR Description: hypothetical protein F18F4.50 - Arabidopsis >gi|2827649|emb|CAA16603.1| putative protein [Arabidopsis >gi|7268790|emb|CAB78995.1| putative protein [Arabidopsis
  misc_feature (1)..(321): Homolog of NCBI NO: 15241607 NR Description: putative protein; protein id: At5g44860.1, by cDNA: 31042. [Arabidopsis thaliana] >gi|2660664|gb|AAC79135.1| protein [Arabidopsis thaliana] >gi|10177476|dbj|BAB10867.1|
  misc_feature (1)..(321): Homolog of NCBI NO: 18397813 NR Description: expressed protein; protein id: At1g31130.1, by cDNA: 151489., supported by cDNA: gi_13272450, supported by gi_19698822 [Arabidopsis thaliana] >gi|25513746|pir||H86436
  misc_feature (1)..(320): Homolog of NCBI NO: 34908936 NR Description: P0691E06.20 [Oryza sativa (japonica
  misc_feature (11)..(292): Homolog of NCBI NO: 15222319 NR Description: unknown protein; protein id: At1g69430.1 thaliana] >gi|12597781|gb|AAG60093.1|AC073178_4 unknown protein
  misc_feature (12)..(293): Homolog of NCBI NO: 9295718 NR Description: T24P13.3 [Arabidopsis thaliana]
  misc_feature (1)..(292): Homolog of NCBI NO: 18398818 NR Description: expressed protein; protein id: At2g18690.1, by cDNA: gi_14517479 [Arabidopsis thaliana]
  misc_feature (70)..(292): Homolog of NCBI NO: 27817928 NR Description: P0453E05.2 [Oryza sativa (japonica
  misc_feature (26)..(290): Homolog of NCBI NO: 25370705 NR Description: hypothetical protein At2g18680 [imported] -
MDLAPEELQFLNKRGILRESTSIPQYSLKTFYLITLTLIFPLSFAILAHSLFTQPILAQIDTYPQADQSQLQHEWTVLLVFQFCYIIFLFAFSLLSTAAVVFTVASLYTGKPVSFSSTMSAIPLVLKRLFITFLWVSLLMLAYNTVFLIFLVTLIVAVDLQNVVLAVFSLVVIFVLFLVVHVYMTALWHLASVVSVLEPIYGLAAMKKSYELLKGKTLMACSMVFIYLVHCGFIAGVFGAVVVRGGDDYGIFARIVAGGFLVGVLVIVNLIGLLVQSVFYYVCKSFHHQEIDKSALHDHLGGYLGEYVPLKSNIQMENFEV

SEQ ID NO: 71312 - protein, 203 aa, Arabidopsis thaliana
  peptide (1)..(203): Ceres Seq. ID no. 3091142
  misc_feature (1)..(203): Homolog of NCBI NO: 30684945 NR Description: expressed protein [Arabidopsis thaliana]
  misc_feature (1)..(203): Homolog of NCBI NO: 7485737 NR Description: hypothetical protein F18F4.50 - Arabidopsis >gi|2827649|emb|CAA16603.1| putative protein [Arabidopsis >gi|7268790|emb|CAB78995.1| putative protein [Arabidopsis
  misc_feature (1)..(203): Homolog of NCBI NO: 15241607 NR Description: putative protein; protein id: At5g44860.1, by cDNA: 31042. [Arabidopsis thaliana] >gi|2660664|gb|AAC79135.1| protein [Arabidopsis thaliana] >gi|10177476|dbj|BAB10867.1|
  misc_feature (1)..(203): Homolog of NCBI NO: 18397813 NR Description: expressed protein; protein id: At1g31130.1, by cDNA: 151489., supported by cDNA: gi_13272450, supported by gi_19698822 [Arabidopsis thaliana] >gi|25513746|pir||H86436
  misc_feature (1)..(202): Homolog of NCBI NO: 34908936 NR Description: P0691E06.20 [Oryza sativa (japonica
  misc_feature (1)..(174): Homolog of NCBI NO: 15222319 NR Description: unknown protein; protein id: At1g69430.1 thaliana] >gi|12597781|gb|AAG60093.1|AC073178_4 unknown protein
  misc_feature (1)..(175): Homolog of NCBI NO: 9295718 NR Description: T24P13.3 [Arabidopsis thaliana]
  misc_feature (1)..(174): Homolog of NCBI NO: 18398818 NR Description: expressed protein; protein id: At2g18690.1, by cDNA: gi_14517479 [Arabidopsis thaliana]
  misc_feature (1)..(174): Homolog of NCBI NO: 27817928 NR Description: P0453E05.2 [Oryza sativa (japonica
  misc_feature (1)..(172): Homolog of NCBI NO: 25370705 NR Description: hypothetical protein At2g18680 [imported] -
MSAIPLVLKRLFITFLWVSLLMLAYNTVFLIFLVTLIVAVDLQNVVLAVFSLVVIFVLFLVVHVYMTALWHLASVVSVLEPIYGLAAMKKSYELLKGKTLMACSMVFIYLVHCGFIAGVFGAVVVRGGDDYGIFARIVAGGFLVGVLVIVNLIGLLVQSVFYYVCKSFHHQEIDKSALHDHLGGYLGEYVPLKSNIQMENFEV

SEQ ID NO: 71313 - protein, 182 aa, Arabidopsis thaliana
  peptide (1)..(182): Ceres Seq. ID no. 3091143
  misc_feature (1)..(182): Homolog of NCBI NO: 30684945 NR Description: expressed protein [Arabidopsis thaliana]
  misc_feature (1)..(182): Homolog of NCBI NO: 7485737 NR Description: hypothetical protein F18F4.50 - Arabidopsis >gi|2827649|emb|CAA16603.1| putative protein [Arabidopsis >gi|7268790|emb|CAB78995.1| putative protein [Arabidopsis
  misc_feature (1)..(182): Homolog of NCBI NO: 15241607 NR Description: putative protein; protein id: At5g44860.1, by cDNA: 31042. [Arabidopsis thaliana] >gi|2660664|gb|AAC79135.1| protein [Arabidopsis thaliana] >gi|10177476|dbj|BAB10867.1|
  misc_feature (1)..(182): Homolog of NCBI NO: 18397813 NR Description: expressed protein; protein id: At1g31130.1, by cDNA: 151489., supported by cDNA: gi_13272450, supported by gi_19698822 [Arabidopsis thaliana] >gi|25513746|pir||H86436
  misc_feature (1)..(181): Homolog of NCBI NO: 34908936 NR Description: P0691E06.20 [Oryza sativa (japonica
  misc_feature (1)..(153): Homolog of NCBI NO: 15222319 NR Description: unknown protein; protein id: At1g69430.1 thaliana] >gi|12597781|gb|AAG60093.1|AC073178_4 unknown protein
  misc_feature (1)..(154): Homolog of NCBI NO: 9295718 NR Description: T24P13.3 [Arabidopsis thaliana]
  misc_feature (1)..(153): Homolog of NCBI NO: 18398818 NR Description: expressed protein; protein id: At2g18690.1, by cDNA: gi_14517479 [Arabidopsis thaliana]
  misc_feature (1)..(153): Homolog of NCBI NO: 27817928 NR Description: P0453E05.2 [Oryza sativa (japonica
  misc_feature (1)..(151): Homolog of NCBI NO: 25370705 NR Description: hypothetical protein At2g18680 [imported] -
MLAYNTVFLIFLVTLIVAVDLQNVVLAVFSLVVIFVLFLVVHVYMTALWHLASVVSVLEPIYGLAAMKKSYELLKGKTLMACSMVFIYLVHCGFIAGVFGAVVVRGGDDYGIFARIVAGGFLVGVLVIVNLIGLLVQSVFYYVCKSFHHQEIDKSALHDHLGGYLGEYVPLKSNIQMENFEV

SEQ ID NO: 71314 - DNA, 1545 bp, Arabidopsis thaliana
  misc_feature (1)..(1545): Ceres Seq. ID no. 3091930
  misc_feature: MA Experiment ID: 20000180 Result: Down-regulated in Transcription
  misc_feature: MA Experiment 20000180 PARAMETER Experiment Name: At_Germinating_Seeds_P Parameter: Age (hr) Value: 24 vs. 0
  misc_feature: MA Experiment 20000180 PARAMETER Experiment Name: At_Germinating_Seeds_P Parameter: Tissue Value: Germinating Seeds
atgcggtggtcgattgcgactgcgattgcttcaacggctaaggggtttcttcatcttcatcaccattttctgaagaacagtaatcctgggattgttctttctccgtcgttgagatttcgtttctgggtacgagctttttctggtactactattgattatcgagaggtattgagaagtgggcttcacaatattaagttcgacgatgcatttcatttgttcgtactcatggcttattcttaccctctaccttcaattgttgaattcaataaagtattgactgctattgctaagatgcagatgtatgatgttgtgattaatctctggaaacgtattgagaatgctgaaggtattgaaatttcacctgatctctatacttgtaacattttggtgaattgtttctgccgctgctttcaaccctcttcggctttatcttatcttgggaagatgatgaagcttggtattgagcctgacattgtgactgctagctcgctggtcaatggattctgtctcagtaatagtattaaggatgctgtttatgtggctggccaaatggagaaaatgggaatcaaacgtgatgttgtagtcgataccatactcattgatactctttgcaaaaatagacttgtggttcccgcgctggaggttctcaaacgtatgaaagacagaggaatttcaccgaatgttgttacctacagctctctcataactggcctttgtaaatccggtagattggctgacgccgagagacgactgcacgaaatggactccaagaaaatcaaccctaatgttatcactttcagtgcattaatcgatgcatatgcaaaacgtgggaaactgtcgaaggttgatagtgtgtacaagatgatgatccaaatgtctatagatcctaatgttttcacttacagttcacttatctacgggctttgcatgcacaatcgtgtagacgaggccattaaaatgcttgacttgatgataagcaaggggtgcaccccaaatgtagtcacttacagtactcttgcaaatggatttttcaagtcgtcgagggtagatgatgggattaaacttttagacgacatgcctcaaagaggcgtggctgcaaacacagtctcttgcaacactcttatcaagggctattttcaagcaggcaagatagatctcgctctaggagtttttggatatatgacttctaatggtctgattcccaatattaggagctacaacattgtgttagctggtctatttgctaatggggaggtagagaaagcattgagcagattcgagcatatgcaaaagactagaaatgatcttgatattattacatatactatcatgattcatgggatgtgcaaggcttgtatggtgaaagaagcatatgatttgttctataaactcaagttcaaaagagtggagcccgattttaaagcatacacgataatgatcgcagaattgaatagggctggcatgcggactgaagcagatgccttgaatagattttaccaaaagcacgttcgccaaaacgaaagcgcaccagctgaagtatcctag

SEQ ID NO: 71315 - protein, 514 aa, Arabidopsis thaliana
  peptide (1)..(514): Ceres Seq. ID no. 3091931
  misc_feature (124)..(158): Pfam Name: PPR repeat Pfam Description: PPR repeat
  misc_feature (76)..(514): Homolog of NCBI NO: 15236878 NR Description: putative protein; protein id: At4g26800.1
  misc_feature (1)..(507): Homolog of NCBI NO: 6630464 NR Description: F23N19.4 [Arabidopsis thaliana]
  misc_feature (12)..(507): Homolog of NCBI NO: 15221550 NR Description: PPR-repeat protein; protein id: At1g62680.1
  misc_feature (1)..(508): Homolog of NCBI NO: 11994626 NR Description: contains similarity to salt-inducible
  misc_feature (8)..(497): Homolog of NCBI NO: 15237384 NR Description: putative protein; protein id: At5g16640.1 thaliana] >gi|10176973|dbj|BAB10191.1|
  misc_feature (13)..(498): Homolog of NCBI NO: 15237575 NR Description: salt-inducible protein-like; protein id:
  misc_feature (1)..(501): Homolog of NCBI NO: 15221540 NR Description: hypothetical protein; protein id: At1g06580.1 thaliana] >gi|6692678|gb|AAF24812.1|AC007592_5 F12K11.8
  misc_feature (1)..(497): Homolog of NCBI NO: 15217683 NR Description: hypothetical protein; protein id: At1g64580.1
  misc_feature (1)..(497): Homolog of NCBI NO: 25404938 NR Description: protein F1N19.15 [imported] - Arabidopsis >gi|6633829|gb|AAF19688.1|AC009519_22 F1N19.15 [Arabidopsis
  misc_feature (44)..(497): Homolog of NCBI NO: 15217683 NR Description: hypothetical protein; protein id: At1g64580.1
MRWSIATAIASTAKGFLHLHHHFLKNSNPGIVLSPSLRFRFWVRAFSGTTIDYREVLRSGLHNIKFDDAFHLFVLMAYSYPLPSIVEFNKVLTAIAKMQMYDVVINLWKRIENAEGIEISPDLYTCNILVNCFCRCFQPSSALSYLGKMMKLGIEPDIVTASSLVNGFCLSNSIKDAVYVAGQMEKMGIKRDVVVDTILIDTLCKNRLVVPALEVLKRMKDRGISPNVVTYSSLITGLCKSGRLADAERRLHEMDSKKINPNVITFSALIDAYAKRGKLSKVDSVYKMMIQMSIDPNVFTYSSLIYGLCMHNRVDEAIKMLDLMISKGCTPNVVTYSTLANGFFKSSRVDDGIKLLDDMPQRGVAANTVSCNTLIKGYFQAGKIDLALGVFGYMTSNGLIPNIRSYNIVLAGLFANGEVEKALSRFEHMQKTRNDLDIITYTIMIHGMCKACMVKEAYDLFYKLKFKRVEPDFKAYTIMIAELNRAGMRTEADALNRFYQKHVRQNESAPAEVS

SEQ ID NO: 71316 - protein, 439 aa, Arabidopsis thaliana
  peptide (1)..(439): Ceres Seq. ID no. 3091932
  misc_feature (49)..(83): Pfam Name: PPR repeat Pfam Description: PPR repeat
  misc_feature (1)..(439): Homolog of NCBI NO: 15236878 NR Description: putative protein; protein id: At4g26800.1
  misc_feature (1)..(432): Homolog of NCBI NO: 6630464 NR Description: F23N19.4 [Arabidopsis thaliana]
  misc_feature (1)..(432): Homolog of NCBI NO: 15221550 NR Description: PPR-repeat protein; protein id: At1g62680.1
  misc_feature (1)..(433): Homolog of NCBI NO: 11994626 NR Description: contains similarity to salt-inducible
  misc_feature (1)..(422): Homolog of NCBI NO: 15237384 NR Description: putative protein; protein id: At5g16640.1 thaliana] >gi|10176973|dbj|BAB10191.1|
  misc_feature (1)..(423): Homolog of NCBI NO: 15237575 NR Description: salt-inducible protein-like; protein id:
  misc_feature (1)..(426): Homolog of NCBI NO: 15221540 NR Description: hypothetical protein; protein id: At1g06580.1 thaliana] >gi|6692678|gb|AAF24812.1|AC007592_5 F12K11.8
  misc_feature (1)..(422): Homolog of NCBI NO: 15217683 NR Description: hypothetical protein; protein id: At1g64580.1
  misc_feature (1)..(422): Homolog of NCBI NO: 25404938 NR Description: protein F1N19.15 [imported] - Arabidopsis >gi|6633829|gb|AAF19688.1|AC009519_22 F1N19.15 [Arabidopsis
  misc_feature (1)..(422): Homolog of NCBI NO: 15217683 NR Description: hypothetical protein; protein id: At1g64580.1
MAYSYPLPSIVEFNKVLTAIAKMQMYDVVINLWKRIENAEGIEISPDLYTCNILVNCFCRCFQPSSALSYLGKMMKLGIEPDIVTASSLVNGFCLSNSIKDAVYVAGQMEKMGIKRDVVVDTILIDTLCKNRLVVPALEVLKRMKDRGISPNVVTYSSLITGLCKSGRLADAERRLHEMDSKKINPNVITFSALIDAYAKRGKLSKVDSVYKMMIQMSIDPNVFTYSSLIYGLCMHNRVDEAIKMLDLMISKGCTPNVVTYSTLANGFFKSSRVDDGIKLLDDMPQRGVAANTVSCNTLIKGYFQAGKIDLALGVFGYMTSNGLIPNIRSYNIVLAGLFANGEVEKALSRFEHMQKTRNDLDIITYTIMIHGMCKACMVKEAYDLFYKLKFKRVEPDFKAYTIMIAELNRAGMRTEADALNRFYQKHVRQNESAPAEVS

SEQ ID NO: 71317 - protein, 417 aa, Arabidopsis thaliana
  peptide (1)..(417): Ceres Seq. ID no. 3091933
  misc_feature (27)..(61): Pfam Name: PPR repeat Pfam Description: PPR repeat
  misc_feature (1)..(417): Homolog of NCBI NO: 15236878 NR Description: putative protein; protein id: At4g26800.1
  misc_feature (1)..(410): Homolog of NCBI NO: 6630464 NR Description: F23N19.4 [Arabidopsis thaliana]
  misc_feature (1)..(410): Homolog of NCBI NO: 15221550 NR Description: PPR-repeat protein; protein id: At1g62680.1
  misc_feature (1)..(411): Homolog of NCBI NO: 11994626 NR Description: contains similarity to salt-inducible
  misc_feature (1)..(400): Homolog of NCBI NO: 15237384 NR Description: putative protein; protein id: At5g16640.1 thaliana] >gi|10176973|dbj|BAB10191.1|
  misc_feature (1)..(401): Homolog of NCBI NO: 15237575 NR Description: salt-inducible protein-like; protein id:
  misc_feature (1)..(404): Homolog of NCBI NO: 15221540 NR Description: hypothetical protein; protein id: At1g06580.1 thaliana] >gi|6692678|gb|AAF24812.1|AC007592_5 F12K11.8
  misc_feature (1)..(400): Homolog of NCBI NO: 15217683 NR Description: hypothetical protein; protein id: At1g64580.1
  misc_feature (1)..(400): Homolog of NCBI NO: 25404938 NR Description: protein F1N19.15 [imported] - Arabidopsis >gi|6633829|gb|AAF19688.1|AC009519_22 F1N19.15 [Arabidopsis
  misc_feature (1)..(400): Homolog of NCBI NO: 15217683 NR Description: hypothetical protein; protein id: At1g64580.1
MQMYDVVINLWKRIENAEGIEISPDLYTCNILVNCFCRCFQPSSALSYLGKMMKLGIEPDIVTASSLVNGFCLSNSIKDAVYVAGQMEKMGIKRDVVVDTILIDTLCKNRLVVPALEVLKRMKDRGISPNVVTYSSLITGLCKSGRLADAERRLHEMDSKKINPNVITFSALIDAYAKRGKLSKVDSVYKMMIQMSIDPNVFTYSSLIYGLCMHNRVDEAIKMLDLMISKGCTPNVVTYSTLANGFFKSSRVDDGIKLLDDMPQRGVAANTVSCNTLIKGYFQAGKIDLALGVFGYMTSNGLIPNIRSYNIVLAGLFANGEVEKALSRFEHMQKTRNDLDIITYTIMIHGMCKACMVKEAYDLFYKLKFKRVEPDFKAYTIMIAELNRAGMRTEADALNRFYQKHVRQNESAPAEVS

SEQ ID NO: 71318 - DNA, 1428 bp, Arabidopsis thaliana
  misc_feature (1)..(1428): Ceres Seq. ID no. 3091938
  misc_feature: MA Experiment ID: 20000307 Result: Up-regulated in Transcription
  misc_feature: MA Experiment 20000307 PARAMETER Experiment Name: At_Germinating_Seeds_Sub_P Parameter: Age (hr) Value: 24 vs. 0
  misc_feature: MA Experiment 20000307 PARAMETER Experiment Name: At_Germinating_Seeds_Sub_P Parameter: Organism Value: A. thaliana
  misc_feature: MA Experiment 20000307 PARAMETER Experiment Name: At_Germinating_Seeds_Sub_P Parameter: Plant Line Value: WS
  misc_feature: MA Experiment 20000307 PARAMETER Experiment Name: At_Germinating_Seeds_Sub_P Parameter: Tissue Value: Germinating Seeds
  misc_feature: MA Experiment ID: 20000440 Result: Up-regulated in Transcription
  misc_feature: MA Experiment 20000440 PARAMETER Experiment Name: At_Closed-Flower__Sub_P Parameter: Tissue Value: Closed Flower vs. Whole Plant
atggcaatggagaaagatctcagtccaaattctccacggattagaaagctaagggatactagttaccctactacaccaacgtctcgaatgaatactaataaccagagagataaccattatcccaacattcctaattcaccaagggattacaattatactcctagctctccaacagctcgcattcgacaccgcaggcgatcaagcgagaatttagctgaggtgaacagaagcaatgtaagcagagtaagcaatttgttacttggtgataagaacaagtacagatcaatgtggataaggacatgctcatctctctggatgctcggtggagttgtgtttataatctacatgggtcatctctacatttgggctatggttgtggttatacagatattcatggccaaagagctcttctttcttcgcagaagagctcatgaagaacgtcgcttacccggtttctggctcttgaattggcacttcttcttcacggctatgttgtttgtctatggacgcatcattcaacagcagctagtcaacacggtttcttcagatagattcatatacaagcttgtgagtggtcttatcaagtaccagatggttatttgctacttcttgtacatcgcaggtctcatatggtttatccttacattgaagaataagatgtataagtatcagtttgggcaatacgcttggacacatatgatccttatcgttgtctttactcaatcttctttcaccgtcgccaatatttttgaagggatcttctggtttcttctaccagcagcactgattgctatgaacgatgtagcagcttacttcttcggtttctatttcgggaaaactccgctcatcaagttgtctccaaagaaaacatgggaaggtttcatcggagcatcagttgcaactataatctctgcatttatttttgctaatgtcttaggccagttccaatggcttacatgtccaaggaaggatttttcaactggttggcttcattgtgatccaggccctctcttcaggccagagtattacccatttccctcttggattactccattttctccatggaaagggatctcgaccctgcctgtccaatggcatgctttttctctcggtctattcgcatccattatggcgccttttggtggcttcttcgcaagcggtttcaaaagagctttcaagatcaaggatttcggagacagcataccaggacatggaggatttactgacagaatggattgccaaatggttatggcggttttcgcatacatctacatccaatctttcattgttaatcgggactacagtgtcgagatgatcctagaccagatatcgaggagcctgggacacgaggagcagaaaatgctttatgaaaagctcggagacattcttcaacataagttgcaagggagcttctttctctatggttag

SEQ ID NO: 71319 - protein, 475 aa, Arabidopsis thaliana
  peptide (1)..(475): Ceres Seq. ID no. 3091939
  misc_feature (30)..(471): Homolog of NCBI NO: 15236874 NR Description: putative CDP-diacylglycerol synthetase; protein
  misc_feature (53)..(463): Homolog of NCBI NO: 20303635 NR Description: putative CDP-diacylglycerol synthetase [Oryza
  misc_feature (54)..(469): Homolog of NCBI NO: 3121837 NR Description: Phosphatidate cytidylyltransferase
  misc_feature (53)..(467): Homolog of NCBI NO: 30696710 NR Description: phosphatidate cytidylyltransferase (CDS) thaliana] >gi|3121836|sp|O04928|CDS1_ARATH Phosphatidate
  misc_feature (53)..(467): Homolog of NCBI NO: 7484839 NR Description: CDP-diacylglycerol synthetase homolog F24O1.17 -
  misc_feature (54)..(470): Homolog of NCBI NO: 15235611 NR Description: CDP-diacylglycerol synthetase-like protein; id: At4g22340.1, supported by cDNA: 112115., supported by cDNA:
  misc_feature (53)..(181): Homolog of NCBI NO: 37532798 NR Description: putative phosphatidate cytidylyltransferase
  misc_feature (324)..(414): Homolog of NCBI NO: 37532798 NR Description: putative phosphatidate cytidylyltransferase
  misc_feature (432)..(463): Homolog of NCBI NO: 37532798 NR Description: putative phosphatidate cytidylyltransferase
  misc_feature (86)..(459): Homolog of NCBI NO: 7676150 NR Description: PHOSPHATIDATE CYTIDYLYLTRANSFERASE 1
MAMEKDLSPNSPRIRKLRDTSYPTTPTSRMNTNNQRDNHYPNIPNSPRDYNYTPSSPTARIRHRRRSSENLAEVNRSNVSRVSNLLLGDKNKYRSMWIRTCSSLWMLGGVVFIIYMGHLYIWAMVVVIQIFMAKELFFLRRRAHEERRLPGFWLLNWHFFFTAMLFVYGRIIQQQLVNTVSSDRFIYKLVSGLIKYQMVICYFLYIAGLIWFILTLKNKMYKYQFGQYAWTHMILIVVFTQSSFTVANIFEGIFWFLLPAALIAMNDVAAYFFGFYFGKTPLIKLSPKKTWEGFIGASVATIISAFIFANVLGQFQWLTCPRKDFSTGWLHCDPGPLFRPEYYPFPSWITPFSPWKGISTLPVQWHAFSLGLFASIMAPFGGFFASGFKRAFKIKDFGDSIPGHGGFTDRMDCQMVMAVFAYIYIQSFIVNRDYSVEMILDQISRSLGHEEQKMLYEKLGDILQHKLQGSFFLYG

SEQ ID NO: 71320 - protein, 473 aa, Arabidopsis thaliana
  peptide (1)..(473): Ceres Seq. ID no. 3091940
  misc_feature (28)..(469): Homolog of NCBI NO: 15236874 NR Description: putative CDP-diacylglycerol synthetase; protein
  misc_feature (51)..(461): Homolog of NCBI NO: 20303635 NR Description: putative CDP-diacylglycerol synthetase [Oryza
  misc_feature (52)..(467): Homolog of NCBI NO: 3121837 NR Description: Phosphatidate cytidylyltransferase
  misc_feature (51)..(465): Homolog of NCBI NO: 30696710 NR Description: phosphatidate cytidylyltransferase (CDS) thaliana] >gi|3121836|sp|O04928|CDS1_ARATH Phosphatidate
  misc_feature (51)..(465): Homolog of NCBI NO: 7484839 NR Description: CDP-diacylglycerol synthetase homolog F24O1.17 -
  misc_feature (52)..(468): Homolog of NCBI NO: 15235611 NR Description: CDP-diacylglycerol synthetase-like protein; id: At4g22340.1, supported by cDNA: 112115., supported by cDNA:
  misc_feature (51)..(179): Homolog of NCBI NO: 37532798 NR Description: putative phosphatidate cytidylyltransferase
  misc_feature (322)..(412): Homolog of NCBI NO: 37532798 NR Description: putative phosphatidate cytidylyltransferase
  misc_feature (430)..(461): Homolog of NCBI NO: 37532798 NR Description: putative phosphatidate cytidylyltransferase
  misc_feature (84)..(457): Homolog of NCBI NO: 7676150 NR Description: PHOSPHATIDATE CYTIDYLYLTRANSFERASE 1
MEKDLSPNSPRIRKLRDTSYPTTPTSRMNTNNQRDNHYPNIPNSPRDYNYTPSSPTARIRHRRRSSENLAEVNRSNVSRVSNLLLGDKNKYRSMWIRTCSSLWMLGGVVFIIYMGHLYIWAMVVVIQIFMAKELFFLRRRAHEERRLPGFWLLNWHFFFTAMLFVYGRIIQQQLVNTVSSDRFIYKLVSGLIKYQMVICYFLYIAGLIWFILTLKNKMYKYQFGQYAWTHMILIVVFTQSSFTVANIFEGIFWFLLPAALIAMNDVAAYFFGFYFGKTPLIKLSPKKTWEGFIGASVATIISAFIFANVLGQFQWLTCPRKDFSTGWLHCDPGPLFRPEYYPFPSWITPFSPWKGISTLPVQWHAFSLGLFASIMAPFGGFFASGFKRAFKIKDFGDSIPGHGGFTDRMDCQMVMAVFAYIYIQSFIVNRDYSVEMILDQISRSLGHEEQKMLYEKLGDILQHKLQGSFFLYG

SEQ ID NO: 71321 - protein, 446 aa, Arabidopsis thaliana
  peptide (1)..(446): Ceres Seq. ID no. 3091941
  misc_feature (1)..(442): Homolog of NCBI NO: 15236874 NR Description: putative CDP-diacylglycerol synthetase; protein
  misc_feature (24)..(434): Homolog of NCBI NO: 20303635 NR Description: putative CDP-diacylglycerol synthetase [Oryza
  misc_feature (25)..(440): Homolog of NCBI NO: 3121837 NR Description: Phosphatidate cytidylyltransferase
  misc_feature (24)..(438): Homolog of NCBI NO: 30696710 NR Description: phosphatidate cytidylyltransferase (CDS) thaliana] >gi|3121836|sp|O04928|CDS1_ARATH Phosphatidate
  misc_feature (24)..(438): Homolog of NCBI NO: 7484839 NR Description: CDP-diacylglycerol synthetase homolog F24O1.17 -
  misc_feature (25)..(441): Homolog of NCBI NO: 15235611 NR Description: CDP-diacylglycerol synthetase-like protein; id: At4g22340.1, supported by cDNA: 112115., supported by cDNA:
  misc_feature (24)..(152): Homolog of NCBI NO: 37532798 NR Description: putative phosphatidate cytidylyltransferase
  misc_feature (295)..(385): Homolog of NCBI NO: 37532798 NR Description: putative phosphatidate cytidylyltransferase
  misc_feature (403)..(434): Homolog of NCBI NO: 37532798 NR Description: putative phosphatidate cytidylyltransferase
  misc_feature (57)..(430): Homolog of NCBI NO: 7676150 NR Description: PHOSPHATIDATE CYTIDYLYLTRANSFERASE 1
MNTNNQRDNHYPNIPNSPRDYNYTPSSPTARIRHRRRSSENLAEVNRSNVSRVSNLLLGDKNKYRSMWIRTCSSLWMLGGVVFIIYMGHLYIWAMVVVIQIFMAKELFFLRRRAHEERRLPGFWLLNWHFFFTAMLFVYGRIIQQQLVNTVSSDRFIYKLVSGLIKYQMVICYFLYIAGLIWFILTLKNKMYKYQFGQYAWTHMILIVVFTQSSFTVANIFEGIFWFLLPAALIAMNDVAAYFFGFYFGKTPLIKLSPKKTWEGFIGASVATIISAFIFANVLGQFQWLTCPRKDFSTGWLHCDPGPLFRPEYYPFPSWITPFSPWKGISTLPVQWHAFSLGLFASIMAPFGGFFASGFKRAFKIKDFGDSIPGHGGFTDRMDCQMVMAVFAYIYIQSFIVNRDYSVEMILDQISRSLGHEEQKMLYEKLGDILQHKLQGSFFLYG

SEQ ID NO: 71322 - DNA, 1344 bp, Arabidopsis thaliana
  misc_feature (1)..(1344): Ceres Seq. ID no. 3092078
  misc_feature: MA Experiment ID: 20000307 Result: Up-regulated in Transcription
  misc_feature: MA Experiment 20000307 PARAMETER Experiment Name: At_Germinating_Seeds_Sub_P Parameter: Age (hr) Value: 24 vs. 0
  misc_feature: MA Experiment 20000307 PARAMETER Experiment Name: At_Germinating_Seeds_Sub_P Parameter: Organism Value: A. thaliana
  misc_feature: MA Experiment 20000307 PARAMETER Experiment Name: At_Germinating_Seeds_Sub_P Parameter: Plant Line Value: WS
  misc_feature: MA Experiment 20000307 PARAMETER Experiment Name: At_Germinating_Seeds_Sub_P Parameter: Tissue Value: Germinating Seeds
  misc_feature: MA Experiment ID: 20000314 Result: Up-regulated in Transcription
  misc_feature: MA Experiment 20000314 PARAMETER Experiment Name: At_14day_Shoots-Roots_Sub_P Parameter: Age (day) Value: 14
  misc_feature: MA Experiment 20000314 PARAMETER Experiment Name: At_14day_Shoots-Roots_Sub_P Parameter: Organism Value: A. thaliana
  misc_feature: MA Experiment 20000314 PARAMETER Experiment Name: At_14day_Shoots-Roots_Sub_P Parameter: Plant Line Value: WS
  misc_feature: MA Experiment 20000314 PARAMETER Experiment Name: At_14day_Shoots-Roots_Sub_P Parameter: Tissue Value: Roots vs. Whole Plant
atgagtcaacacatgaaccttctcctgccttcatttgaaacggacaaagaggaatacgatgaacgcaagacaacagaccacggaggcatcggtggcagcgtctggaggttcaaaggcaacaaagcggccaaggaagcggctagtgtctcaatgaaaggtacacttgctaggttattcgactgctgcagcaaagacgtcaaaaagactattttgcctctgggtcacggcgacccctccgtctacccttgcttccaaacgtccgttgacgctgaggaagcggtggttgaatccttacggtctggagctgcaaactcttacgcccccggggtcggtattttaccggccagaagggcggttgcaaattatctgaaccgggaccttccacataagatacattcagatgatatatttatgacggtggggtgttgccaagggatagagacaatgattcatgccctcgccggaccaaaggccaatatcttgctaccgactctaatttatcccctctacaacagtcacgcaatccatagcctagtcgagattcgcaagtacaatctccttcccgatctagactgggagatagatcttcaaggtgttgaggccatggcagacgaaaataccattgctgtggtgataatgaatcctcacaacccgtgtggaaatgtctatacatatgaacatctaaagaaagtggctgaggtggcgagaaagctaggaataatggtgatttctgatgaagtttataaccaaactatttatggagagaataaatttgtcccgatggggatattttcatccattactcctgtggttacactcgggtccatatccaagggatggctcgttcccggctggcgaataggttggatcgcaatgaacgatcccaaaaacgttttcaaaacaactagggtcgttgaatccatcaaggaacatctcgacataagtccagatccatcaacaatcctacagtttgcacttccaaacatcttggagaagacgaagaaagaattcttcgagaagaataactcgatcctgagtcaaaacgtagattttgcgttcgatgccctcaaggacattccttgcctcacctgccccaagaaaccggagtcgtgtacttacttagtgacaaaattggatctgtccctcttggaggacatcacgaatgattttgatttctgcatgaagctggcccaagaggaaaatctcgtctttctacctggagaggtactaggactgaagaattgggtgagattctctatcggagtggagaggtctatgctggaagatgcattcatgaggctcaaaggcttcttcgctcgccatactaaaacacaactcacttaa

SEQ ID NO: 71323 - protein, 447 aa, Arabidopsis thaliana
  peptide (1)..(447): Ceres Seq. ID no. 3092079
  misc_feature (121)..(437): Pfam Name: Aminotransferase class I and II Pfam Description: Aminotransferase class I and II
  misc_feature (4)..(443): Homolog of NCBI NO: 11527943 NR Description: ROOTY/SUPERROOT1 [Arabidopsis thaliana]
  misc_feature (4)..(443): Homolog of NCBI NO: 11527941 NR Description: ROOTY/SUPERROOT1 [Arabidopsis thaliana]
  misc_feature (33)..(441): Homolog of NCBI NO: 21553462 NR Description: putative tyrosine aminotransferase [Arabidopsis
  misc_feature (33)..(441): Homolog of NCBI NO: 15224631 NR Description: putative tyrosine aminotransferase; protein id: supported by cDNA: 14570. [Arabidopsis thaliana]
  misc_feature (4)..(443): Homolog of NCBI NO: 15809874 NR Description: At2g20610/F23N11.7 [Arabidopsis thaliana]
  misc_feature (4)..(443): Homolog of NCBI NO: 15225387 NR Description: putative tyrosine aminotransferase; protein id: supported by cDNA: gi_11527938, supported by cDNA: gi_11527940,
  misc_feature (1)..(383): Homolog of NCBI NO: 15235287 NR Description: tyrosine transaminase-like protein; protein id: [Arabidopsis thaliana] >gi|7488404|pir||T04612 tyrosine
  misc_feature (35)..(442): Homolog of NCBI NO: 22328891 NR Description: tyrosine transaminase like protein; protein id: supported by cDNA: gi_17979318 [Arabidopsis thaliana] putative tyrosine transaminase [Arabidopsis thaliana]
  misc_feature (43)..(445): Homolog of NCBI NO: 15239521 NR Description: tyrosine aminotransferase; protein id: [Arabidopsis thaliana] >gi|10177259|dbj|BAB10727.1| tyrosine [Arabidopsis thaliana] >gi|25054842|gb|AAN71911.1| putative
  misc_feature (35)..(442): Homolog of NCBI NO: 15236533 NR Description: tyrosine transaminase like protein; protein id: supported by cDNA: gi_20466689 [Arabidopsis thaliana]
MSQHMNLLLPSFETDKEEYDERKTTDHGGIGGSVWRFKGNKAAKEAASVSMKGTLARLFDCCSKDVKKTILPLGHGDPSVYPCFQTSVDAEEAVVESLRSGAANSYAPGVGILPARRAVANYLNRDLPHKIHSDDIFMTVGCCQGIETMIHALAGPKANILLPTLIYPLYNSHAIHSLVEIRKYNLLPDLDWEIDLQGVEAMADENTIAVVIMNPHNPCGNVYTYEHLKKVAEVARKLGIMVISDEVYNQTIYGENKFVPMGIFSSITPVVTLGSISKGWLVPGWRIGWIAMNDPKNVFKTTRVVESIKEHLDISPDPSTILQFALPNILEKTKKEFFEKNNSILSQNVDFAFDALKDIPCLTCPKKPESCTYLVTKLDLSLLEDITNDFDFCMKLAQEENLVFLPGEVLGLKNWVRFSIGVERSMLEDAFMRLKGFFARHTKTQLT

SEQ ID NO: 71324 - protein, 443 aa, Arabidopsis thaliana
  peptide (1)..(443): Ceres Seq. ID no. 3092080
  misc_feature (117)..(433): Pfam Name: Aminotransferase class I and II Pfam Description: Aminotransferase class I and II
  misc_feature (1)..(439): Homolog of NCBI NO: 15809874 NR Description: At2g20610/F23N11.7 [Arabidopsis thaliana]
  misc_feature (1)..(439): Homolog of NCBI NO: 15225387 NR Description: putative tyrosine aminotransferase; protein id: supported by cDNA: gi_11527938, supported by cDNA: gi_11527940,
  misc_feature (1)..(439): Homolog of NCBI NO: 11527943 NR Description: ROOTY/SUPERROOT1 [Arabidopsis thaliana]
  misc_feature (1)..(439): Homolog of NCBI NO: 11527941 NR Description: ROOTY/SUPERROOT1 [Arabidopsis thaliana]
  misc_feature (29)..(437): Homolog of NCBI NO: 21553462 NR Description: putative tyrosine aminotransferase [Arabidopsis
  misc_feature (29)..(437): Homolog of NCBI NO: 15224631 NR Description: putative tyrosine aminotransferase; protein id: supported by cDNA: 14570. [Arabidopsis thaliana]
  misc_feature (1)..(379): Homolog of NCBI NO: 15235287 NR Description: tyrosine transaminase-like protein; protein id: [Arabidopsis thaliana] >gi|7488404|pir||T04612 tyrosine
  misc_feature (31)..(438): Homolog of NCBI NO: 22328891 NR Description: tyrosine transaminase like protein; protein id: supported by cDNA: gi_17979318 [Arabidopsis thaliana] putative tyrosine transaminase [Arabidopsis thaliana]
  misc_feature (39)..(441): Homolog of NCBI NO: 15239521 NR Description: tyrosine aminotransferase; protein id: [Arabidopsis thaliana] >gi|10177259|dbj|BAB10727.1| tyrosine [Arabidopsis thaliana] >gi|25054842|gb|AAN71911.1| putative
  misc_feature (31)..(438): Homolog of NCBI NO: 15236533 NR Description: tyrosine transaminase like protein; protein id: supported by cDNA: gi_20466689 [Arabidopsis thaliana]
MNLLLPSFETDKEEYDERKTTDHGGIGGSVWRFKGNKAAKEAASVSMKGTLARLFDCCSKDVKKTILPLGHGDPSVYPCFQTSVDAEEAVVESLRSGAANSYAPGVGILPARRAVANYLNRDLPHKIHSDDIFMTVGCCQGIETMIHALAGPKANILLPTLIYPLYNSHAIHSLVEIRKYNLLPDLDWEIDLQGVEAMADENTIAVVIMNPHNPCGNVYTYEHLKKVAEVARKLGIMVISDEVYNQTIYGENKFVPMGIFSSITPVVTLGSISKGWLVPGWRIGWIAMNDPKNVFKTTRVVESIKEHLDISPDPSTILQFALPNILEKTKKEFFEKNNSILSQNVDFAFDALKDIPCLTCPKKPESCTYLVTKLDLSLLEDITNDFDFCMKLAQEENLVFLPGEVLGLKNWVRFSIGVERSMLEDAFMRLKGFFARHTKTQLT

SEQ ID NO: 71325 - protein, 397 aa, Arabidopsis thaliana
  peptide (1)..(397): Ceres Seq. ID no. 3092081
  misc_feature (71)..(387): Pfam Name: Aminotransferase class I and II Pfam Description: Aminotransferase class I and II
  misc_feature (1)..(393): Homolog of NCBI NO: 15809874 NR Description: At2g20610/F23N11.7 [Arabidopsis thaliana]
  misc_feature (1)..(393): Homolog of NCBI NO: 15225387 NR Description: putative tyrosine aminotransferase; protein id: supported by cDNA: gi_11527938, supported by cDNA: gi_11527940,
  misc_feature (1)..(393): Homolog of NCBI NO: 11527943 NR Description: ROOTY/SUPERROOT1 [Arabidopsis thaliana]
  misc_feature (1)..(393): Homolog of NCBI NO: 11527941 NR Description: ROOTY/SUPERROOT1 [Arabidopsis thaliana]
  misc_feature (1)..(391): Homolog of NCBI NO: 21553462 NR Description: putative tyrosine aminotransferase [Arabidopsis
  misc_feature (1)..(391): Homolog of NCBI NO: 15224631 NR Description: putative tyrosine aminotransferase; protein id: supported by cDNA: 14570. [Arabidopsis thaliana]
  misc_feature (1)..(333): Homolog of NCBI NO: 15235287 NR Description: tyrosine transaminase-like protein; protein id: [Arabidopsis thaliana] >gi|7488404|pir||T04612 tyrosine
  misc_feature (1)..(392): Homolog of NCBI NO: 22328891 NR Description: tyrosine transaminase like protein; protein id: supported by cDNA: gi_17979318 [Arabidopsis thaliana] putative tyrosine transaminase [Arabidopsis thaliana]
  misc_feature (1)..(395): Homolog of NCBI NO: 15239521 NR Description: tyrosine aminotransferase; protein id: [Arabidopsis thaliana] >gi|10177259|dbj|BAB10727.1| tyrosine [Arabidopsis thaliana] >gi|25054842|gb|AAN71911.1| putative
  misc_feature (1)..(392): Homolog of NCBI NO: 15236533 NR Description: tyrosine transaminase like protein; protein id: supported by cDNA: gi_20466689 [Arabidopsis thaliana]
MKGTLARLFDCCSKDVKKTILPLGHGDPSVYPCFQTSVDAEEAVVESLRSGAANSYAPGVGILPARRAVANYLNRDLPHKIHSDDIFMTVGCCQGIETMIHALAGPKANILLPTLIYPLYNSHAIHSLVEIRKYNLLPDLDWEIDLQGVEAMADENTIAVVIMNPHNPCGNVYTYEHLKKVAEVARKLGIMVISDEVYNQTIYGENKFVPMGIFSSITPVVTLGSISKGWLVPGWRIGWIAMNDPKNVFKTTRVVESIKEHLDISPDPSTILQFALPNILEKTKKEFFEKNNSILSQNVDFAFDALKDIPCLTCPKKPESCTYLVTKLDLSLLEDITNDFDFCMKLAQEENLVFLPGEVLGLKNWVRFSIGVERSMLEDAFMRLKGFFARHTKTQLT

SEQ ID NO: 71326 - DNA, 1497 bp, Arabidopsis thaliana
  misc_feature (1)..(1497): Ceres Seq. ID no. 3092344
  misc_feature: MA Experiment ID: 20000184 Result: Down-regulated in Transcription
  misc_feature: MA Experiment 20000184 PARAMETER Experiment Name: At_Shoots__P Parameter: Age (day) Value: 7
  misc_feature: MA Experiment 20000184 PARAMETER Experiment Name: At_Shoots__P Parameter: Tissue Value: Shoots vs. Whole Plant
  misc_feature: MA Experiment ID: 20000264 Result: Down-regulated in Transcription
  misc_feature: MA Experiment 20000264 PARAMETER Experiment Name: At_Open_Flower_P Parameter: Age (day) Value: 21
  misc_feature: MA Experiment 20000264 PARAMETER Experiment Name: At_Open_Flower_P Parameter: Plant Line Value: WS
  misc_feature: MA Experiment 20000264 PARAMETER Experiment Name: At_Open_Flower_P Parameter: Tissue Value: Open Flower vs. Whole Plant
  misc_feature: MA Experiment ID: 20000265 Result: Down-regulated in Transcription
  misc_feature: MA Experiment 20000265 PARAMETER Experiment Name: At_Open_Flower_P Parameter: Age (day) Value: 21
  misc_feature: MA Experiment 20000265 PARAMETER Experiment Name: At_Open_Flower_P Parameter: Plant Line Value: WS
  misc_feature: MA Experiment 20000265 PARAMETER Experiment Name: At_Open_Flower_P Parameter: Tissue Value: Closed Flower vs. Whole Plant
  misc_feature: MA Experiment ID: 20000438 Result: Down-regulated in Transcription
  misc_feature: MA Experiment 20000438 PARAMETER Experiment Name: At_Shoots__P Parameter: Age (day) Value: 14
  misc_feature: MA Experiment 20000438 PARAMETER Experiment Name: At_Shoots__P Parameter: Tissue Value: Shoots vs. Whole Plant
atgaacaagagtaatcctgctggttcggtgactggttcggatataatagacgccaagatcgaagaacatcaactttgtggatccaagaagtgtcctagctgcggccacaagctcgaaggcaaaccacaggattgggttggtttaccagcaggagtgaaatttgacccaacggatcaagaattgatagaacatttagaagcgaaagtgttagctaaagacttcaaatctcaccctctcattgacgaattcatcccaaccattgaaggcgaagacggcatttgctacactcatcccgagaaacttcctggagtgactagagatggtttaagccgacacttctttcatagaccatcaaaggcgtacacgacgggaacaagaaagcgaagaaagattcaaacagaatgtgacaataatttgcaaggaagtagtagctccggtgagacgaggtggcataagaccggtaagacaagaccggttatggtaaacggtaagcaaaaaggttgtaagaagattttggttttgtataccaattttggtaagaatcgaaaaccggagaaaaccaattgggtaatgcatcaatatcatttggggacacatgaggaagagaaagaaggagaacttgttgtgtctaagatcttttatcaaactcagcctaggcaatgcaactggtcgtcttctacatcgagcttgaacgctataggtggtggcggcggtgaagcgagtagcggcggaggcggcggagagtatcatatgaggagagatagtgggactactagtggtgggagttgttcttcgtctagagaaattattaatgttaatcctccgaatcgatccgatgaaataggcggcgttggtggtggcgttatggccgtagcagctgcggctgcggcggttgcagctgggcttccgagttatgcaatggatcagctcagctttgttccgtttatgaaaagctttgatgaggtggcgaggagggaaactcctcagactgggcacgctacatgtgaggatgtaatggcagaacaacatcgtcatcgtcatcaaccatcatcatcaacatcacatcatatggctcatgatcatcaccatcatcatcatcaacaacaacaacaacggcatcatgcattcaacataagccagcctacacatccgatatcaaccattatttctccatctacttcgcttcaccatgcctccattaatattcttgacgataatccttatcatgttcatagaatcttgctccccaatgaaaattaccagacacaacagcaactacgtcaagaaggagaagaagaacataatgatgggaagatgggaggaaggtcagcttccggattggaagaactcataatgggctgcacttcttctaccactcatcatgatgtaaaagatgggtcatcatcaatggggaaccaacaagaagcagaatggttgaagtactcaacgttttggccagcccctgactcttctgacaaccaagatcatcatgggtaa

SEQ ID NO: 71327 - protein, 498 aa, Arabidopsis thaliana
  peptide (1)..(498): Ceres Seq. ID no. 3092345
  misc_feature (48)..(197): Pfam Name: No apical meristem (NAM) protein Pfam Description: No apical meristem (NAM) protein
  misc_feature (1)..(498): Homolog of NCBI NO: 15233497 NR Description: putative protein; protein id: At4g29230.1
  misc_feature (14)..(242): Homolog of NCBI NO: 15241889 NR Description: putative protein; protein id: At5g56620.1 thaliana] >gi|10176766|dbj|BAB09880.1|
  misc_feature (279)..(399): Homolog of NCBI NO: 15241889 NR Description: putative protein; protein id: At5g56620.1 thaliana] >gi|10176766|dbj|BAB09880.1|
  misc_feature (51)..(354): Homolog of NCBI NO: 34906416 NR Description: P0710E05.22 [Oryza sativa (japonica
  misc_feature (29)..(262): Homolog of NCBI NO: 15235314 NR Description: similar to NAM protein, putative; protein id:
  misc_feature (29)..(261): Homolog of NCBI NO: 34911014 NR Description: OJ1125_C04.12 [Oryza sativa (japonica
  misc_feature (17)..(221): Homolog of NCBI NO: 21554371 NR Description: NAM protein, putative [Arabidopsis thaliana]
  misc_feature (31)..(221): Homolog of NCBI NO: 18396807 NR Description: NAM protein, putative; protein id: At1g28470.1,
  misc_feature (40)..(221): Homolog of NCBI NO: 6560767 NR Description: F3M18.9 [Arabidopsis thaliana]
  misc_feature (28)..(220): Homolog of NCBI NO: 25518116 NR Description: hypothetical protein F2J7.1 - Arabidopsis >gi|12321499|gb|AAG50802.1|AC079281_4 hypothetical protein
MNKSNPAGSVTGSDIIDAKIEEHQLCGSKKCPSCGHKLEGKPQDWVGLPAGVKFDPTDQELIEHLEAKVLAKDFKSHPLIDEFIPTIEGEDGICYTHPEKLPGVTRDGLSRHFFHRPSKAYTTGTRKRRKIQTECDNNLQGSSSSGETRWHKTGKTRPVMVNGKQKGCKKILVLYTNFGKNRKPEKTNWVMHQYHLGTHEEEKEGELVVSKIFYQTQPRQCNWSSSTSSLNAIGGGGGEASSGGGGGEYHMRRDSGTTSGGSCSSSREIINVNPPNRSDEIGGVGGGVMAVAAAAAAVAAGLPSYAMDQLSFVPFMKSFDEVARRETPQTGHATCEDVMAEQHRHRHQPSSSTSHHMAHDHHHHHHQQQQQRHHAFNISQPTHPISTIISPSTSLHHASINILDDNPYHVHRILLPNENYQTQQQLRQEGEEEHNDGKMGGRSASGLEELIMGCTSSTTHHDVKDGSSSMGNQQEAEWLKYSTFWPAPDSSDNQDHHG

SEQ ID NO: 71328 - protein, 339 aa, Arabidopsis thaliana
  peptide (1)..(339): Ceres Seq. ID no. 3092346
  misc_feature (1)..(339): Homolog of NCBI NO: 15233497 NR Description: putative protein; protein id: At4g29230.1
  misc_feature (1)..(83): Homolog of NCBI NO: 15241889 NR Description: putative protein; protein id: At5g56620.1 thaliana] >gi|10176766|dbj|BAB09880.1|
  misc_feature (120)..(240): Homolog of NCBI NO: 15241889 NR Description: putative protein; protein id: At5g56620.1 thaliana] >gi|10176766|dbj|BAB09880.1|
  misc_feature (1)..(195): Homolog of NCBI NO: 34906416 NR Description: P0710E05.22 [Oryza sativa (japonica
  misc_feature (1)..(103): Homolog of NCBI NO: 15235314 NR Description: similar to NAM protein, putative; protein id:
  misc_feature (1)..(102): Homolog of NCBI NO: 34911014 NR Description: OJ1125_C04.12 [Oryza sativa (japonica
  misc_feature (1)..(62): Homolog of NCBI NO: 21554371 NR Description: NAM protein, putative [Arabidopsis thaliana]
  misc_feature (1)..(62): Homolog of NCBI NO: 18396807 NR Description: NAM protein, putative; protein id: At1g28470.1,
  misc_feature (1)..(62): Homolog of NCBI NO: 6560767 NR Description: F3M18.9 [Arabidopsis thaliana]
  misc_feature (1)..(61): Homolog of NCBI NO: 25518116 NR Description: hypothetical protein F2J7.1 - Arabidopsis >gi|12321499|gb|AAG50802.1|AC079281_4 hypothetical protein
MVNGKQKGCKKILVLYTNFGKNRKPEKTNWVMHQYHLGTHEEEKEGELVVSKIFYQTQPRQCNWSSSTSSLNAIGGGGGEASSGGGGGEYHMRRDSGTTSGGSCSSSREIINVNPPNRSDEIGGVGGGVMAVAAAAAAVAAGLPSYAMDQLSFVPFMKSFDEVARRETPQTGHATCEDVMAEQHRHRHQPSSSTSHHMAHDHHHHHHQQQQQRHHAFNISQPTHPISTIISPSTSLHHASINILDDNPYHVHRILLPNENYQTQQQLRQEGEEEHNDGKMGGRSASGLEELIMGCTSSTTHHDVKDGSSSMGNQQEAEWLKYSTFWPAPDSSDNQDHHG

SEQ ID NO: 71329 - protein, 308 aa, Arabidopsis thaliana
  peptide (1)..(308): Ceres Seq. ID no. 3092347
  misc_feature (1)..(308): Homolog of NCBI NO: 15233497 NR Description: putative protein; protein id: At4g29230.1
  misc_feature (1)..(52): Homolog of NCBI NO: 15241889 NR Description: putative protein; protein id: At5g56620.1 thaliana] >gi|10176766|dbj|BAB09880.1|
  misc_feature (89)..(209): Homolog of NCBI NO: 15241889 NR Description: putative protein; protein id: At5g56620.1 thaliana] >gi|10176766|dbj|BAB09880.1|
  misc_feature (1)..(164): Homolog of NCBI NO: 34906416 NR Description: P0710E05.22 [Oryza sativa (japonica
  misc_feature (1)..(72): Homolog of NCBI NO: 15235314 NR Description: similar to NAM protein, putative; protein id:
  misc_feature (1)..(71): Homolog of NCBI NO: 34911014 NR Description: OJ1125_C04.12 [Oryza sativa (japonica
  misc_feature (1)..(31): Homolog of NCBI NO: 21554371 NR Description: NAM protein, putative [Arabidopsis thaliana]
  misc_feature (1)..(31): Homolog of NCBI NO: 18396807 NR Description: NAM protein, putative; protein id: At1g28470.1,
  misc_feature (1)..(31): Homolog of NCBI NO: 6560767 NR Description: F3M18.9 [Arabidopsis thaliana]
  misc_feature (1)..(30): Homolog of NCBI NO: 25518116 NR Description: hypothetical protein F2J7.1 - Arabidopsis >gi|12321499|gb|AAG50802.1|AC079281_4 hypothetical protein
MHQYHLGTHEEEKEGELVVSKIFYQTQPRQCNWSSSTSSLNAIGGGGGEASSGGGGGEYHMRRDSGTTSGGSCSSSREIINVNPPNRSDEIGGVGGGVMAVAAAAAAVAAGLPSYAMDQLSFVPFMKSFDEVARRETPQTGHATCEDVMAEQHRHRHQPSSSTSHHMAHDHHHHHHQQQQQRHHAFNISQPTHPISTIISPSTSLHHASINILDDNPYHVHRILLPNENYQTQQQLRQEGEEEHNDGKMGGRSASGLEELIMGCTSSTTHHDVKDGSSSMGNQQEAEWLKYSTFWPAPDSSDNQDHHG

SEQ ID NO: 71330 - DNA, 1260 bp, Arabidopsis thaliana
  misc_feature (1)..(1260): Ceres Seq. ID no. 3092832
  misc_feature: MA Experiment ID: 108462 Result: Up-regulated in Transcription
  misc_feature: MA Experiment 108462 PARAMETER Experiment Name: At_Germinating_Seeds_cDNA_P Parameter: Age (day) Value: 2 vs. 0
  misc_feature: MA Experiment 108462 PARAMETER Experiment Name: At_Germinating_Seeds_cDNA_P Parameter: Tissue Value: Germinating Seeds
  misc_feature: MA Experiment ID: 108463 Result: Up-regulated in Transcription
  misc_feature: MA Experiment 108463 PARAMETER Experiment Name: At_Germinating_Seeds_cDNA_P Parameter: Age (day) Value: 3 vs. 0
  misc_feature: MA Experiment 108463 PARAMETER Experiment Name: At_Germinating_Seeds_cDNA_P Parameter: Tissue Value: Germinating Seeds
  misc_feature: MA Experiment ID: 108464 Result: Up-regulated in Transcription
  misc_feature: MA Experiment 108464 PARAMETER Experiment Name: At_Germinating_Seeds_cDNA_P Parameter: Age (day) Value: 4 vs. 0
  misc_feature: MA Experiment 108464 PARAMETER Experiment Name: At_Germinating_Seeds_cDNA_P Parameter: Tissue Value: Germinating Seeds
  misc_feature: MA Experiment ID: 108561 Result: Down-regulated in Transcription
  misc_feature: MA Experiment 108561 PARAMETER Experiment Name: At_100uM_ABA_cDNA_P Parameter: Timepoint (hr) Value: 6
  misc_feature: MA Experiment 108561 PARAMETER Experiment Name: At_100uM_ABA_cDNA_P Parameter: Tissue Value: Aerial
  misc_feature: MA Experiment 108561 PARAMETER Experiment Name: At_100uM_ABA_cDNA_P Parameter: Treatment Value: 100uM ABA vs. No Treatment
  misc_feature: MA Experiment ID: 20000113 Result: Down-regulated in Transcription
  misc_feature: MA Experiment 20000113 PARAMETER Experiment Name: At_42deg_Heat_cDNA_P Parameter: Temperature (deg C) Value: 42 vs. 22
  misc_feature: MA Experiment 20000113 PARAMETER Experiment Name: At_42deg_Heat_cDNA_P Parameter: Timepoint (hr) Value: 8
  misc_feature: MA Experiment 20000113 PARAMETER Experiment Name: At_42deg_Heat_cDNA_P Parameter: Tissue Value: Aerial
  misc_feature: MA Experiment ID: 20000173 Result: Down-regulated in Transcription
  misc_feature: MA Experiment 20000173 PARAMETER Experiment Name: At_42deg_Heat_P Parameter: Age (day) Value: 14
  misc_feature: MA Experiment 20000173 PARAMETER Experiment Name: At_42deg_Heat_P Parameter: Organism Value: A. thaliana
  misc_feature: MA Experiment 20000173 PARAMETER Experiment Name: At_42deg_Heat_P Parameter: Plant Line Value: WS
  misc_feature: MA Experiment 20000173 PARAMETER Experiment Name: At_42deg_Heat_P Parameter: Temperature (deg C) Value: 42 vs. 22
  misc_feature: MA Experiment 20000173 PARAMETER Experiment Name: At_42deg_Heat_P Parameter: Timepoint (hr) Value: 6
  misc_feature: MA Experiment 20000173 PARAMETER Experiment Name: At_42deg_Heat_P Parameter: Tissue Value: Aerial
  misc_feature: MA Experiment ID: 20000180 Result: Up-regulated in Transcription
  misc_feature: MA Experiment 20000180 PARAMETER Experiment Name: At_Germinating_Seeds_P Parameter: Age (hr) Value: 24 vs. 0
  misc_feature: MA Experiment 20000180 PARAMETER Experiment Name: At_Germinating_Seeds_P Parameter: Tissue Value: Germinating Seeds
  misc_feature: MA Experiment ID: 20000185 Result: Down-regulated in Transcription
  misc_feature: MA Experiment 20000185 PARAMETER Experiment Name: At_Roots__P Parameter: Age (day) Value: 7 vs. 21
  misc_feature: MA Experiment 20000185 PARAMETER Experiment Name: At_Roots__P Parameter: Organism Value: A. thaliana
  misc_feature: MA Experiment 20000185 PARAMETER Experiment Name: At_Roots__P Parameter: Tissue Value: Roots vs. Whole Plant
  misc_feature: MA Experiment ID: 20000235 Result: Up-regulated in Transcription
  misc_feature: MA Experiment 20000235 PARAMETER Experiment Name: At_Siliques_P Parameter: Age (day) Value: 21
  misc_feature: MA Experiment 20000235 PARAMETER Experiment Name: At_Siliques_P Parameter: Organism Value: A. thaliana
  misc_feature: MA Experiment 20000235 PARAMETER Experiment Name: At_Siliques_P Parameter: Plant Line Value: WS
  misc_feature: MA Experiment 20000235 PARAMETER Experiment Name: At_Siliques_P Parameter: Tissue Value: 5-10mm Siliques vs. Whole Plant
  misc_feature: MA Experiment ID: 20000265 Result: Up-regulated in Transcription
  misc_feature: MA Experiment 20000265 PARAMETER Experiment Name: At_Open_Flower_P Parameter: Age (day) Value: 21
  misc_feature: MA Experiment 20000265 PARAMETER Experiment Name: At_Open_Flower_P Parameter: Plant Line Value: WS
  misc_feature: MA Experiment 20000265 PARAMETER Experiment Name: At_Open_Flower_P Parameter: Tissue Value: Closed Flower vs. Whole Plant
  misc_feature: MA Experiment ID: 20000437 Result: Down-regulated in Transcription
  misc_feature: MA Experiment 20000437 PARAMETER Experiment Name: At_Drought_P Parameter: Age (day) Value: 8
  misc_feature: MA Experiment 20000437 PARAMETER Experiment Name: At_Drought_P Parameter: Organism Value: A. thaliana
  misc_feature: MA Experiment 20000437 PARAMETER Experiment Name: At_Drought_P Parameter: Plant Line Value: WS
  misc_feature: MA Experiment 20000437 PARAMETER Experiment Name: At_Drought_P Parameter: Timepoint (hr) Value: 24
  misc_feature: MA Experiment 20000437 PARAMETER Experiment Name: At_Drought_P Parameter: Tissue Value: Whole Plant
  misc_feature: MA Experiment 20000437 PARAMETER Experiment Name: At_Drought_P Parameter: Treatment Value: Drought vs. No Drought
  misc_feature: MA Experiment ID: 20000441 Result: Down-regulated in Transcription
  misc_feature: MA Experiment 20000441 PARAMETER Experiment Name: At_1uM_BR-BRZ__P Parameter: Tissue Value: Shoot Apices
  misc_feature: MA Experiment 20000441 PARAMETER Experiment Name: At_1uM_BR-BRZ__P Parameter: Treatment Value: 1uM BR vs. No Treatment
  misc_feature: MA Experiment ID: 20000443 Result: Down-regulated in Transcription
  misc_feature: MA Experiment 20000443 PARAMETER Experiment Name: At_1uM_BR-BRZ__P Parameter: Tissue Value: Shoot Apices
  misc_feature: MA Experiment 20000443 PARAMETER Experiment Name: At_1uM_BR-BRZ__P Parameter: Treatment Value: 1uM BRZ vs. No Treatment
  misc_feature: MA Experiment ID: 20000794 Result: Up-regulated in Transcription
  misc_feature: MA Experiment 20000794 PARAMETER Experiment Name: At_Petals_P Parameter: Age (day) Value: 23-25 days
  misc_feature: MA Experiment 20000794 PARAMETER Experiment Name: At_Petals_P Parameter: Plant Line Value: WS
  misc_feature: MA Experiment 20000794 PARAMETER Experiment Name: At_Petals_P Parameter: Tissue Value: Petals vs. Whole plant
  misc_feature: MA Experiment ID: 20001911 Result: Down-regulated in Transcription
  misc_feature: MA Experiment 20001911 PARAMETER Experiment Name: At_Drought_Reproduction_P Parameter: Age (day) Value: 40
  misc_feature: MA Experiment 20001911 PARAMETER Experiment Name: At_Drought_Reproduction_P Parameter: Organism Value: A. thaliana
  misc_feature: MA Experiment 20001911 PARAMETER Experiment Name: At_Drought_Reproduction_P Parameter: Plant Line Value: WS
  misc_feature: MA Experiment 20001911 PARAMETER Experiment Name: At_Drought_Reproduction_P Parameter: Timepoint (day) Value: 10
  misc_feature: MA Experiment 20001911 PARAMETER Experiment Name: At_Drought_Reproduction_P Parameter: Tissue Value: Flowers
  misc_feature: MA Experiment 20001911 PARAMETER Experiment Name: At_Drought_Reproduction_P Parameter: Treatment Value: Drought vs. No Drought
atgggaaagattcttcatcttcttcttcttcttcttaaggtctctgttcttgaattcatcattagtgtttctgcttttacttcacctgcttcacagccttctctttctcctgtttacacttccatggcttccttttctccagggatccacatgggcaaaggccaagaacacaagttagatgcacacaagaaacttctaatcgctctcataatcacctcatcttctctaggactaatacttgtatcttgtttatgcttttgggtttattggtctaagaaatctcccaaaaacaccaagaactcaggtgagagtaggatttcattatccaagaagggctttgtgcagtccttcgattacaagacactagagaaagcaacaggcggtttcaaagacggtaatcttataggacgaggcgggttcggagatgtttacaaggcctgtttaggcaacaacactctagcagcagtcaaaaagatcgaaaacgttagtcaagaagcaaaacgagaatttcagaatgaagttgatttgttgagcaagattcaccacccgaacatcatctcattgtttggatatggaaatgaactcagttcgagttttatcgtctacgagctgatggaaagcggatcattggatacacagttacacggaccttctcggggatcggctttaacatggcacatgcggatgaagattgctcttgatacagcaagagctgttgagtatctccacgagcgttgtcgtcctccggttatccacagagatcttaaatcgtcaaatattctccttgattcttccttcaacgccaagatttcggattttggtcttgcggtaatggtgggggctcacggcaaaaacaacattaaactatcaggaacacttggttatgttgctccagaatatctcctagatggaaaattgacggataagagtgatgtttatgcgtttggtgtggttttacttgaactcttgttaggaagacggccggttgagaaattgagttcggttcagtgtcaatctcttgtcacttgggcaatgccccaacttacggatagatcaaagcttccgaaaatcgtggatccggttatcaaagatacaatggatcataagcacttataccaggtggcagccgtggcagtgctttgtgtacaaccagaaccgagttatcgaccgttgataaccgatgttcttcactcactagttccattggttccggtagagctaggagggactctccgtttgatctctgattgctttgagtaa

SEQ ID NO: 71331 - protein, 419 aa, Arabidopsis thaliana
  peptide (1)..(419): Ceres Seq. ID no. 3092833
  misc_feature (129)..(328): Pfam Name: Protein kinase domain Pfam Description: Protein kinase domain
  misc_feature (1)..(171): Homolog of NCBI NO: 30689231 NR Description: protein kinase family [Arabidopsis thaliana]
  misc_feature (239)..(382): Homolog of NCBI NO: 30689231 NR Description: protein kinase family [Arabidopsis thaliana]
  misc_feature (239)..(382): Homolog of NCBI NO: 7434336 NR Description: hypothetical protein F10N7.190 - Arabidopsis >gi|3858939|emb|CAA16589.1| serine/threonine protein kinase like
  misc_feature (1)..(111): Homolog of NCBI NO: 7434336 NR Description: hypothetical protein F10N7.190 - Arabidopsis >gi|3858939|emb|CAA16589.1| serine/threonine protein kinase like
  misc_feature (102)..(171): Homolog of NCBI NO: 7434336 NR Description: hypothetical protein F10N7.190 - Arabidopsis >gi|3858939|emb|CAA16589.1| serine/threonine protein kinase like
  misc_feature (64)..(414): Homolog of NCBI NO: 30683447 NR Description: protein kinase family [Arabidopsis thaliana]
  misc_feature (111)..(414): Homolog of NCBI NO: 11259774 NR Description: ser/thr specific protein kinase-like protein -
  misc_feature (111)..(414): Homolog of NCBI NO: 11358833 NR Description: ser/thr specific protein kinase-like protein -
  misc_feature (26)..(414): Homolog of NCBI NO: 15220195 NR Description: putative protein kinase; protein id: At1g80640.1
  misc_feature (230)..(366): Homolog of NCBI NO: 15224692 NR Description: hypothetical protein; protein id: At2g25220.1
MGKILHLLLLLLKVSVLEFIISVSAFTSPASQPSLSPVYTSMASFSPGIHMGKGQEHKLDAHKKLLIALIITSSSLGLILVSCLCFWVYWSKKSPKNTKNSGESRISLSKKGFVQSFDYKTLEKATGGFKDGNLIGRGGFGDVYKACLGNNTLAAVKKIENVSQEAKREFQNEVDLLSKIHHPNIISLFGYGNELSSSFIVYELMESGSLDTQLHGPSRGSALTWHMRMKIALDTARAVEYLHERCRPPVIHRDLKSSNILLDSSFNAKISDFGLAVMVGAHGKNNIKLSGTLGYVAPEYLLDGKLTDKSDVYAFGVVLLELLLGRRPVEKLSSVQCQSLVTWAMPQLTDRSKLPKIVDPVIKDTMDHKHLYQVAAVAVLCVQPEPSYRPLITDVLHSLVPLVPVELGGTLRLISDCFE

SEQ ID NO: 71332 - protein, 378 aa, Arabidopsis thaliana
  peptide (1)..(378): Ceres Seq. ID no. 3092834
  misc_feature (88)..(287): Pfam Name: Protein kinase domain Pfam Description: Protein kinase domain
  misc_feature (1)..(130): Homolog of NCBI NO: 30689231 NR Description: protein kinase family [Arabidopsis thaliana]
  misc_feature (198)..(341): Homolog of NCBI NO: 30689231 NR Description: protein kinase family [Arabidopsis thaliana]
  misc_feature (198)..(341): Homolog of NCBI NO: 7434336 NR Description: hypothetical protein F10N7.190 - Arabidopsis >gi|3858939|emb|CAA16589.1| serine/threonine protein kinase like
  misc_feature (1)..(70): Homolog of NCBI NO: 7434336 NR Description: hypothetical protein F10N7.190 - Arabidopsis >gi|3858939|emb|CAA16589.1| serine/threonine protein kinase like
  misc_feature (61)..(130): Homolog of NCBI NO: 7434336 NR Description: hypothetical protein F10N7.190 - Arabidopsis >gi|3858939|emb|CAA16589.1| serine/threonine protein kinase like
  misc_feature (23)..(373): Homolog of NCBI NO: 30683447 NR Description: protein kinase family [Arabidopsis thaliana]
  misc_feature (70)..(373): Homolog of NCBI NO: 11259774 NR Description: ser/thr specific protein kinase-like protein -
  misc_feature (70)..(373): Homolog of NCBI NO: 11358833 NR Description: ser/thr specific protein kinase-like protein -
  misc_feature (1)..(373): Homolog of NCBI NO: 15220195 NR Description: putative protein kinase; protein id: At1g80640.1
  misc_feature (189)..(325): Homolog of NCBI NO: 15224692 NR Description: hypothetical protein; protein id: At2g25220.1
MASFSPGIHMGKGQEHKLDAHKKLLIALIITSSSLGLILVSCLCFWVYWSKKSPKNTKNSGESRISLSKKGFVQSFDYKTLEKATGGFKDGNLIGRGGFGDVYKACLGNNTLAAVKKIENVSQEAKREFQNEVDLLSKIHHPNIISLFGYGNELSSSFIVYELMESGSLDTQLHGPSRGSALTWHMRMKIALDTARAVEYLHERCRPPVIHRDLKSSNILLDSSFNAKISDFGLAVMVGAHGKNNIKLSGTLGYVAPEYLLDGKLTDKSDVYAFGVVLLELLLGRRPVEKLSSVQCQSLVTWAMPQLTDRSKLPKIVDPVIKDTMDHKHLYQVAAVAVLCVQPEPSYRPLITDVLHSLVPLVPVELGGTLRLISDCFE

SEQ ID NO: 71333 - protein, 369 aa, Arabidopsis thaliana
  peptide (1)..(369): Ceres Seq. ID no. 3092835
  misc_feature (79)..(278): Pfam Name: Protein kinase domain Pfam Description: Protein kinase domain
  misc_feature (1)..(121): Homolog of NCBI NO: 30689231 NR Description: protein kinase family [Arabidopsis thaliana]
  misc_feature (189)..(332): Homolog of NCBI NO: 30689231 NR Description: protein kinase family [Arabidopsis thaliana]
  misc_feature (189)..(332): Homolog of NCBI NO: 7434336 NR Description: hypothetical protein F10N7.190 - Arabidopsis >gi|3858939|emb|CAA16589.1| serine/threonine protein kinase like
  misc_feature (1)..(61): Homolog of NCBI NO: 7434336 NR Description: hypothetical protein F10N7.190 - Arabidopsis >gi|3858939|emb|CAA16589.1| serine/threonine protein kinase like
  misc_feature (52)..(121): Homolog of NCBI NO: 7434336 NR Description: hypothetical protein F10N7.190 - Arabidopsis >gi|3858939|emb|CAA16589.1| serine/threonine protein kinase like
  misc_feature (14)..(364): Homolog of NCBI NO: 30683447 NR Description: protein kinase family [Arabidopsis thaliana]
  misc_feature (61)..(364): Homolog of NCBI NO: 11259774 NR Description: ser/thr specific protein kinase-like protein -
  misc_feature (61)..(364): Homolog of NCBI NO: 11358833 NR Description: ser/thr specific protein kinase-like protein -
  misc_feature (1)..(364): Homolog of NCBI NO: 15220195 NR Description: putative protein kinase; protein id: At1g80640.1
  misc_feature (180)..(316): Homolog of NCBI NO: 15224692 NR Description: hypothetical protein; protein id: At2g25220.1
MGKGQEHKLDAHKKLLIALIITSSSLGLILVSCLCFWVYWSKKSPKNTKNSGESRISLSKKGFVQSFDYKTLEKATGGFKDGNLIGRGGFGDVYKACLGNNTLAAVKKIENVSQEAKREFQNEVDLLSKIHHPNIISLFGYGNELSSSFIVYELMESGSLDTQLHGPSRGSALTWHMRMKIALDTARAVEYLHERCRPPVIHRDLKSSNILLDSSFNAKISDFGLAVMVGAHGKNNIKLSGTLGYVAPEYLLDGKLTDKSDVYAFGVVLLELLLGRRPVEKLSSVQCQSLVTWAMPQLTDRSKLPKIVDPVIKDTMDHKHLYQVAAVAVLCVQPEPSYRPLITDVLHSLVPLVPVELGGTLRLISDCFE

SEQ ID NO: 71334 - DNA, 1254 bp, Arabidopsis thaliana
  misc_feature (1)..(1254): Ceres Seq. ID no. 3093503
  misc_feature: MA Experiment ID: 20000180 Result: Up-regulated in Transcription
  misc_feature: MA Experiment 20000180 PARAMETER Experiment Name: At_Germinating_Seeds_P Parameter: Age (hr) Value: 24 vs. 0
  misc_feature: MA Experiment 20000180 PARAMETER Experiment Name: At_Germinating_Seeds_P Parameter: Tissue Value: Germinating Seeds
  misc_feature: MA Experiment ID: 20000437 Result: Down-regulated in Transcription
  misc_feature: MA Experiment 20000437 PARAMETER Experiment Name: At_Drought_P Parameter: Age (day) Value: 8
  misc_feature: MA Experiment 20000437 PARAMETER Experiment Name: At_Drought_P Parameter: Organism Value: A. thaliana
  misc_feature: MA Experiment 20000437 PARAMETER Experiment Name: At_Drought_P Parameter: Plant Line Value: WS
  misc_feature: MA Experiment 20000437 PARAMETER Experiment Name: At_Drought_P Parameter: Timepoint (hr) Value: 24
  misc_feature: MA Experiment 20000437 PARAMETER Experiment Name: At_Drought_P Parameter: Tissue Value: Whole Plant
  misc_feature: MA Experiment 20000437 PARAMETER Experiment Name: At_Drought_P Parameter: Treatment Value: Drought vs. No Drought
  misc_feature: MA Experiment ID: 20001560 Result: Up-regulated in Transcription
  misc_feature: MA Experiment 20001560 PARAMETER Experiment Name: At_Drought_Soil_Dry_P Parameter: Age (day) Value: 28
  misc_feature: MA Experiment 20001560 PARAMETER Experiment Name: At_Drought_Soil_Dry_P Parameter: Organism Value: A. thaliana
  misc_feature: MA Experiment 20001560 PARAMETER Experiment Name: At_Drought_Soil_Dry_P Parameter: Plant Line Value: WS
  misc_feature: MA Experiment 20001560 PARAMETER Experiment Name: At_Drought_Soil_Dry_P Parameter: Post Timepoint (hr) Value: None
  misc_feature: MA Experiment 20001560 PARAMETER Experiment Name: At_Drought_Soil_Dry_P Parameter: Post-Treatment Value: None
  misc_feature: MA Experiment 20001560 PARAMETER Experiment Name: At_Drought_Soil_Dry_P Parameter: Timepoint (day) Value: 14
  misc_feature: MA Experiment 20001560 PARAMETER Experiment Name: At_Drought_Soil_Dry_P Parameter: Treatment Value: Drought vs. No Drought
  misc_feature: MA Experiment ID: 20001911 Result: Down-regulated in Transcription
  misc_feature: MA Experiment 20001911 PARAMETER Experiment Name: At_Drought_Reproduction_P Parameter: Age (day) Value: 40
  misc_feature: MA Experiment 20001911 PARAMETER Experiment Name: At_Drought_Reproduction_P Parameter: Organism Value: A. thaliana
  misc_feature: MA Experiment 20001911 PARAMETER Experiment Name: At_Drought_Reproduction_P Parameter: Plant Line Value: WS
  misc_feature: MA Experiment 20001911 PARAMETER Experiment Name: At_Drought_Reproduction_P Parameter: Timepoint (day) Value: 10
  misc_feature: MA Experiment 20001911 PARAMETER Experiment Name: At_Drought_Reproduction_P Parameter: Tissue Value: Flowers
  misc_feature: MA Experiment 20001911 PARAMETER Experiment Name: At_Drought_Reproduction_P Parameter: Treatment Value: Drought vs. No Drought
atgcctgtggtgagaacgagagcgaaatgttcgattcccgtcacaaaccctaatccaacagtcggaggaggaaactcaaacgtctcgatctacgagaaatgcagagaagacaggatcaaggagaatcttcagaggatgaagaatctcggaatcatggatctctctctcaaactcaaatccgagatccgacccgccaaaaggcgttacggtaactctaatgccaatccgggtcgagaaacatctcctattcagctttccgtctcctctagacgatcctcaagattgaagcaggagccgccagtttctcggagatcctcgagattgaagaacgctacaccagtttcctacgcagaggaacctgaactgaagaagggtaaagtgtctaaagaagagattgttttgtgggtaggagaaggcgtaaggccagagatttacactgaggagcatgagaaactgttaggtaacacagaacgaacttgggagctttttgttgatggttgtgacaaaaatgggaaacggatttatgaccctgttagaggaaagtgttgccaccagtgcaggcagaagacgctaggttatcatacccaatgcagccagtgtaaccattctgttcgaggtcaattctgtggagattgtttatacatgagatatggagaacatgttcttgaagctctggaaaatccggactggatttgtccagtctgtcgcgatatctgcaactgcagtttctgtcgtacaaaaaaagggtggctcccaactggtgcagcttacaggaagatacataaactcgggtataagtctgttgcacattatctgattcaaaccaaccaacagtcagaaacaagtgaggatgatgaaactgatgctcctgcagatagtcaagcttcagaaggagatcatctccttctcataactgatgggattcaggacaatcaaattgacgaaaatctcgatgatgatgatggctcaaacaagaatccggattcagctagaaagtcattatgcttcttgtcgtctgggaacaaccaaacttcagtgactgatggtgatctcaagccattagatgtgaaagaggtggatccagcaactcctgtgatcatcgatcttgaggctcagtgcagtgaaactgagaggatggctaactctgcaaacaaagagaaccgagaaacaagaagcaagcgaaagatgtctgctgaaccaaacccaaatagtattggtggaagactgagacagcgtcgtaagattcaagcttga

SEQ ID NO: 71335 - protein, 417 aa, Arabidopsis thaliana
  peptide (1)..(417): Ceres Seq. ID no. 3093504
  misc_feature (1)..(417): Homolog of NCBI NO: 30690864 NR Description: expressed protein [Arabidopsis thaliana]
  misc_feature (183)..(417): Homolog of NCBI NO: 25407788 NR Description: hypothetical protein AT4g37110 [imported] - thaliana >gi|4006866|emb|CAB16784.1| putative protein thaliana] >gi|7270660|emb|CAB80377.1| putative protein
  misc_feature (1)..(197): Homolog of NCBI NO: 25407788 NR Description: hypothetical protein AT4g37110 [imported] - thaliana >gi|4006866|emb|CAB16784.1| putative protein thaliana] >gi|7270660|emb|CAB80377.1| putative protein
  misc_feature (79)..(328): Homolog of NCBI NO: 15227848 NR Description: hypothetical protein; protein id: At2g23530.1
  misc_feature (355)..(414): Homolog of NCBI NO: 15227848 NR Description: hypothetical protein; protein id: At2g23530.1
  misc_feature (4)..(101): Homolog of NCBI NO: 15227848 NR Description: hypothetical protein; protein id: At2g23530.1
  misc_feature (14)..(280): Homolog of NCBI NO: 22027514 NR Description: cell division cycle associated protein 7 isoform
  misc_feature (70)..(280): Homolog of NCBI NO: 15929382 NR Description: Unknown (protein for IMAGE:3829029) [Homo sapiens]
  misc_feature (173)..(285): Homolog of NCBI NO: 11360288 NR Description: hypothetical protein DKFZp762L0311.1 - human
  misc_feature (14)..(280): Homolog of NCBI NO: 21362008 NR Description: cell division cycle associated protein 7 isoform c-Myc target JPO1 [Homo sapiens] >gi|14042437|dbj|BAB55245.1|
MPVVRTRAKCSIPVTNPNPTVGGGNSNVSIYEKCREDRIKENLQRMKNLGIMDLSLKLKSEIRPAKRRYGNSNANPGRETSPIQLSVSSRRSSRLKQEPPVSRRSSRLKNATPVSYAEEPELKKGKVSKEEIVLWVGEGVRPEIYTEEHEKLLGNTERTWELFVDGCDKNGKRIYDPVRGKCCHQCRQKTLGYHTQCSQCNHSVRGQFCGDCLYMRYGEHVLEALENPDWICPVCRDICNCSFCRTKKGWLPTGAAYRKIHKLGYKSVAHYLIQTNQQSETSEDDETDAPADSQASEGDHLLLITDGIQDNQIDENLDDDDGSNKNPDSARKSLCFLSSGNNQTSVTDGDLKPLDVKEVDPATPVIIDLEAQCSETERMANSANKENRETRSKRKMSAEPNPNSIGGRLRQRRKIQA

SEQ ID NO: 71336 - protein, 372 aa, Arabidopsis thaliana
  peptide (1)..(372): Ceres Seq. ID no. 3093505
  misc_feature (34)..(283): Homolog of NCBI NO: 15227848 NR Description: hypothetical protein; protein id: At2g23530.1
  misc_feature (310)..(369): Homolog of NCBI NO: 15227848 NR Description: hypothetical protein; protein id: At2g23530.1
  misc_feature (1)..(56): Homolog of NCBI NO: 15227848 NR Description: hypothetical protein; protein id: At2g23530.1
  misc_feature (1)..(235): Homolog of NCBI NO: 22027514 NR Description: cell division cycle associated protein 7 isoform
  misc_feature (25)..(235): Homolog of NCBI NO: 15929382 NR Description: Unknown (protein for IMAGE:3829029) [Homo sapiens]
  misc_feature (128)..(240): Homolog of NCBI NO: 11360288 NR Description: hypothetical protein DKFZp762L0311.1 - human
  misc_feature (1)..(235): Homolog of NCBI NO: 21362008 NR Description: cell division cycle associated protein 7 isoform c-Myc target JPO1 [Homo sapiens] >gi|14042437|dbj|BAB55245.1|
  misc_feature (1)..(372): Homolog of NCBI NO: 30690864 NR Description: expressed protein [Arabidopsis thaliana]
  misc_feature (138)..(372): Homolog of NCBI NO: 25407788 NR Description: hypothetical protein AT4g37110 [imported] - thaliana >gi|4006866|emb|CAB16784.1| putative protein thaliana] >gi|7270660|emb|CAB80377.1| putative protein
  misc_feature (1)..(152): Homolog of NCBI NO: 25407788 NR Description: hypothetical protein AT4g37110 [imported] - thaliana >gi|4006866|emb|CAB16784.1| putative protein thaliana] >gi|7270660|emb|CAB80377.1| putative protein
MKNLGIMDLSLKLKSEIRPAKRRYGNSNANPGRETSPIQLSVSSRRSSRLKQEPPVSRRSSRLKNATPVSYAEEPELKKGKVSKEEIVLWVGEGVRPEIYTEEHEKLLGNTERTWELFVDGCDKNGKRIYDPVRGKCCHQCRQKTLGYHTQCSQCNHSVRGQFCGDCLYMRYGEHVLEALENPDWICPVCRDICNCSFCRTKKGWLPTGAAYRKIHKLGYKSVAHYLIQTNQQSETSEDDETDAPADSQASEGDHLLLITDGIQDNQIDENLDDDDGSNKNPDSARKSLCFLSSGNNQTSVTDGDLKPLDVKEVDPATPVIIDLEAQCSETERMANSANKENRETRSKRKMSAEPNPNSIGGRLRQRRKIQA

SEQ ID NO: 71337 - protein, 366 aa, Arabidopsis thaliana
  peptide (1)..(366): Ceres Seq. ID no. 3093506
  misc_feature (1)..(366): Homolog of NCBI NO: 30690864 NR Description: expressed protein [Arabidopsis thaliana]
  misc_feature (132)..(366): Homolog of NCBI NO: 25407788 NR Description: hypothetical protein AT4g37110 [imported] - thaliana >gi|4006866|emb|CAB16784.1| putative protein thaliana] >gi|7270660|emb|CAB80377.1| putative protein
  misc_feature (1)..(146): Homolog of NCBI NO: 25407788 NR Description: hypothetical protein AT4g37110 [imported] - thaliana >gi|4006866|emb|CAB16784.1| putative protein thaliana] >gi|7270660|emb|CAB80377.1| putative protein
  misc_feature (28)..(277): Homolog of NCBI NO: 15227848 NR Description: hypothetical protein; protein id: At2g23530.1
  misc_feature (304)..(363): Homolog of NCBI NO: 15227848 NR Description: hypothetical protein; protein id: At2g23530.1
  misc_feature (1)..(50): Homolog of NCBI NO: 15227848 NR Description: hypothetical protein; protein id: At2g23530.1
  misc_feature (1)..(229): Homolog of NCBI NO: 22027514 NR Description: cell division cycle associated protein 7 isoform
  misc_feature (19)..(229): Homolog of NCBI NO: 15929382 NR Description: Unknown (protein for IMAGE:3829029) [Homo sapiens]
  misc_feature (122)..(234): Homolog of NCBI NO: 11360288 NR Description: hypothetical protein DKFZp762L0311.1 - human
  misc_feature (1)..(229): Homolog of NCBI NO: 21362008 NR Description: cell division cycle associated protein 7 isoform c-Myc target JPO1 [Homo sapiens] >gi|14042437|dbj|BAB55245.1|
MDLSLKLKSEIRPAKRRYGNSNANPGRETSPIQLSVSSRRSSRLKQEPPVSRRSSRLKNATPVSYAEEPELKKGKVSKEEIVLWVGEGVRPEIYTEEHEKLLGNTERTWELFVDGCDKNGKRIYDPVRGKCCHQCRQKTLGYHTQCSQCNHSVRGQFCGDCLYMRYGEHVLEALENPDWICPVCRDICNCSFCRTKKGWLPTGAAYRKIHKLGYKSVAHYLIQTNQQSETSEDDETDAPADSQASEGDHLLLITDGIQDNQIDENLDDDDGSNKNPDSARKSLCFLSSGNNQTSVTDGDLKPLDVKEVDPATPVIIDLEAQCSETERMANSANKENRETRSKRKMSAEPNPNSIGGRLRQRRKIQA

SEQ ID NO: 71338 - DNA, 1227 bp, Arabidopsis thaliana
  misc_feature (1)..(1227): Ceres Seq. ID no. 3094514
  misc_feature: MA Experiment ID: 20000184 Result: Up-regulated in Transcription
  misc_feature: MA Experiment 20000184 PARAMETER Experiment Name: At_Shoots__P Parameter: Age (day) Value: 7
  misc_feature: MA Experiment 20000184 PARAMETER Experiment Name: At_Shoots__P Parameter: Tissue Value: Shoots vs. Whole Plant
atggcttctctttggctgaagttaatctccataagtctaatatacctcaatgttatcgctaaatcaactccgcatcaagaaagcgaattcgaatgtgtctctatagacaaacaatctgcactacaacatcctctaatgaagaatcatcgcatacagactagaccaagtcgagagcttctatcaatactctctacgtccaatggtaacatactcagagagattgatttgaagggatcagaagaatgtccaaagggacaagtaccgattcataaacaaaaaaccaacttaaccaatagtcttattcatccccaacaaattcatagagcaggccgtatcctgaaacaaagtcgcagggataaaaagaagaaaaagaacaatcgacgtaaaaaaaataaaaataaactcatgatcccttctgcattgttgtctcaaaaaaataagattcctcaccaccagccaaaattatttacagagacacatctacattatgcaattgttaggacatttgaaaacacgacaaagaaatggcgtggagcacaagcattgttcaatattaacaagccccgagtggtgcaaaatcaatttagtaaggcttggatttggcttaattacattcaaggaagcttaatgagcagcatccagtttggttgggctgtgcatacgaatttatattcagacgatcgtccaagactaactacgttttggatgtcagatcagcatccaaaaggatgttacaatgcgttatgtccaggaggttatgttcaaattcataaatcaatctaccccggtttggtgtatgataaagttaatgctctaggaggaaaacagaacactgtccatctttctgttgctgaggatccagtgaccaaaaattgggtattgacgataggatccataatgataggctattggccacgtcaaagtcagatggtagatggagcttctgaagtatacttcggtggatttgcaggaaacactgcatcgtctcaaccgacgacaagcccaccaatgggaactggagagtttccgacaaaagatttgagtcggtcttgtttcatgaaacagcttaaatatgttctttcggattattcagttgtggatattaatgccaacgaggtagaacagtatgtggatagtcgtaagtgttatggtgtaatgtttctcaagtatgtagattatgattccagagagactcttacgtttggaggacctggtggacaatgttga

SEQ ID NO: 71339 - protein, 408 aa, Arabidopsis thaliana
  peptide (1)..(408): Ceres Seq. ID no. 3094515
  misc_feature (176)..(367): Pfam Name: Arabidopsis proteins of unknown function Pfam Description: Arabidopsis proteins of unknown function
  misc_feature (1)..(408): Homolog of NCBI NO: 15237394 NR Description: putative protein; protein id: At5g46200.1
  misc_feature (219)..(408): Homolog of NCBI NO: 15236686 NR Description: putative protein; protein id: At4g17860.1
  misc_feature (26)..(106): Homolog of NCBI NO: 15236686 NR Description: putative protein; protein id: At4g17860.1
  misc_feature (150)..(408): Homolog of NCBI NO: 15237510 NR Description: putative protein; protein id: At5g46810.1
  misc_feature (22)..(121): Homolog of NCBI NO: 15237510 NR Description: putative protein; protein id: At5g46810.1
  misc_feature (145)..(408): Homolog of NCBI NO: 15237511 NR Description: putative protein; protein id: At5g46820.1
  misc_feature (26)..(99): Homolog of NCBI NO: 15237511 NR Description: putative protein; protein id: At5g46820.1
  misc_feature (147)..(405): Homolog of NCBI NO: 15236547 NR Description: putative protein; protein id: At4g17505.1
  misc_feature (11)..(56): Homolog of NCBI NO: 15236547 NR Description: putative protein; protein id: At4g17505.1
  misc_feature (139)..(405): Homolog of NCBI NO: 15238835 NR Description: putative protein; protein id: At5g18460.1, by cDNA: 119256. [Arabidopsis thaliana]
MASLWLKLISISLIYLNVIAKSTPHQESEFECVSIDKQSALQHPLMKNHRIQTRPSRELLSILSTSNGNILREIDLKGSEECPKGQVPIHKQKTNLTNSLIHPQQIHRAGRILKQSRRDKKKKKNNRRKKNKNKLMIPSALLSQKNKIPHHQPKLFTETHLHYAIVRTFENTTKKWRGAQALFNINKPRVVQNQFSKAWIWLNYIQGSLMSSIQFGWAVHTNLYSDDRPRLTTFWMSDQHPKGCYNALCPGGYVQIHKSIYPGLVYDKVNALGGKQNTVHLSVAEDPVTKNWVLTIGSIMIGYWPRQSQMVDGASEVYFGGFAGNTASSQPTTSPPMGTGEFPTKDLSRSCFMKQLKYVLSDYSVVDINANEVEQYVDSRKCYGVMFLKYVDYDSRETLTFGGPGGQC

SEQ ID NO: 71340 - protein, 363 aa, Arabidopsis thaliana
  peptide (1)..(363): Ceres Seq. ID no. 3094516
  misc_feature (131)..(322): Pfam Name: Arabidopsis proteins of unknown function Pfam Description: Arabidopsis proteins of unknown function
  misc_feature (1)..(363): Homolog of NCBI NO: 15237394 NR Description: putative protein; protein id: At5g46200.1
  misc_feature (174)..(363): Homolog of NCBI NO: 15236686 NR Description: putative protein; protein id: At4g17860.1
  misc_feature (1)..(61): Homolog of NCBI NO: 15236686 NR Description: putative protein; protein id: At4g17860.1
  misc_feature (105)..(363): Homolog of NCBI NO: 15237510 NR Description: putative protein; protein id: At5g46810.1
  misc_feature (1)..(76): Homolog of NCBI NO: 15237510 NR Description: putative protein; protein id: At5g46810.1
  misc_feature (100)..(363): Homolog of NCBI NO: 15237511 NR Description: putative protein; protein id: At5g46820.1
  misc_feature (1)..(54): Homolog of NCBI NO: 15237511 NR Description: putative protein; protein id: At5g46820.1
  misc_feature (102)..(360): Homolog of NCBI NO: 15236547 NR Description: putative protein; protein id: At4g17505.1
  misc_feature (1)..(11): Homolog of NCBI NO: 15236547 NR Description: putative protein; protein id: At4g17505.1
  misc_feature (94)..(360): Homolog of NCBI NO: 15238835 NR Description: putative protein; protein id: At5g18460.1, by cDNA: 119256. [Arabidopsis thaliana]
MKNHRIQTRPSRELLSILSTSNGNILREIDLKGSEECPKGQVPIHKQKTNLTNSLIHPQQIHRAGRILKQSRRDKKKKKNNRRKKNKNKLMIPSALLSQKNKIPHHQPKLFTETHLHYAIVRTFENTTKKWRGAQALFNINKPRVVQNQFSKAWIWLNYIQGSLMSSIQFGWAVHTNLYSDDRPRLTTFWMSDQHPKGCYNALCPGGYVQIHKSIYPGLVYDKVNALGGKQNTVHLSVAEDPVTKNWVLTIGSIMIGYWPRQSQMVDGASEVYFGGFAGNTASSQPTTSPPMGTGEFPTKDLSRSCFMKQLKYVLSDYSVVDINANEVEQYVDSRKCYGVMFLKYVDYDSRETLTFGGPGGQC

SEQ ID NO: 71341 - protein, 273 aa, Arabidopsis thaliana
  peptide (1)..(273): Ceres Seq. ID no. 3094517
  misc_feature (41)..(232): Pfam Name: Arabidopsis proteins of unknown function Pfam Description: Arabidopsis proteins of unknown function
  misc_feature (1)..(273): Homolog of NCBI NO: 15237394 NR Description: putative protein; protein id: At5g46200.1
  misc_feature (84)..(273): Homolog of NCBI NO: 15236686 NR Description: putative protein; protein id: At4g17860.1
  misc_feature (15)..(273): Homolog of NCBI NO: 15237510 NR Description: putative protein; protein id: At5g46810.1
  misc_feature (10)..(273): Homolog of NCBI NO: 15237511 NR Description: putative protein; protein id: At5g46820.1
  misc_feature (12)..(270): Homolog of NCBI NO: 15236547 NR Description: putative protein; protein id: At4g17505.1
  misc_feature (4)..(270): Homolog of NCBI NO: 15238835 NR Description: putative protein; protein id: At5g18460.1, by cDNA: 119256. [Arabidopsis thaliana]
  misc_feature (1)..(273): Homolog of NCBI NO: 30687450 NR Description: expressed protein [Arabidopsis thaliana]
  misc_feature (18)..(270): Homolog of NCBI NO: 34393554 NR Description: putative carboxyl-terminal proteinase [Oryza
  misc_feature (40)..(270): Homolog of NCBI NO: 34393299 NR Description: putative DD1A protein [Oryza sativa (japonica
  misc_feature (1)..(273): Homolog of NCBI NO: 15226935 NR Description: hypothetical protein; protein id: At2g35250.1
MIPSALLSQKNKIPHHQPKLFTETHLHYAIVRTFENTTKKWRGAQALFNINKPRVVQNQFSKAWIWLNYIQGSLMSSIQFGWAVHTNLYSDDRPRLTTFWMSDQHPKGCYNALCPGGYVQIHKSIYPGLVYDKVNALGGKQNTVHLSVAEDPVTKNWVLTIGSIMIGYWPRQSQMVDGASEVYFGGFAGNTASSQPTTSPPMGTGEFPTKDLSRSCFMKQLKYVLSDYSVVDINANEVEQYVDSRKCYGVMFLKYVDYDSRETLTFGGPGGQC

SEQ ID NO: 71342 - DNA, 768 bp, Arabidopsis thaliana
  misc_feature (1)..(768): Ceres Seq. ID no. 3094772
  misc_feature: MA Experiment ID: 20000355 Result: Down-regulated in Transcription
  misc_feature: MA Experiment 20000355 PARAMETER Experiment Name: At_Siliques_Sub_P Parameter: Age (day) Value: 21
  misc_feature: MA Experiment 20000355 PARAMETER Experiment Name: At_Siliques_Sub_P Parameter: Organism Value: A. thaliana
  misc_feature: MA Experiment 20000355 PARAMETER Experiment Name: At_Siliques_Sub_P Parameter: Plant Line Value: WS
  misc_feature: MA Experiment 20000355 PARAMETER Experiment Name: At_Siliques_Sub_P Parameter: Tissue Value: Less Than 5mm Siliques vs. Whole Plant
  misc_feature: MA Experiment ID: 20000440 Result: Up-regulated in Transcription
  misc_feature: MA Experiment 20000440 PARAMETER Experiment Name: At_Closed-Flower__Sub_P Parameter: Tissue Value: Closed Flower vs. Whole Plant
atgtcttcaaatatattggccatggtggccatgcaactcctccttatacgcatagtttcttcccaaaacgttacgaatgagtatttgaaccaccaatgcaacaacacacaagggacatacacgcggggtagtacgtttgagaagaatctcaaccaagtcatccgtaacatctctcacctccatcttcgctacggttacacctacaactccaatgttgaggcttacgaagttagtaaagatcccaacattgtcttcgttttgctccagtgtcgtggtgactcttacgggtccaagtgccactcctgcctccacacagccttctctgggcttcgtgagagatgtcggggaaacaaaggagcaataatatggtacgaccaatgtgttttggagatttcttccgtgaataccaaggggaggattcgttacgatagttttttcaatatgaccaacgtgaagaatgtgagcagcaatgcggagcagtttaaaaataaaaggaaggatctcttccacaagctattgttgggagccaccaaggatgtaagcgacagcaatgatgcgtacgcagtgggggagacgaggataggaagaaataagatgtatgcaatgatgcagtgtgcactagacttaacgacgaatggatgctatgtgtgtctagaatggattataggcaggtatgatagcttctactttgaccgtagacaaggaacgagagttttgagtaggagttgtagcttaagatatgagctttacccttttcttaggaggtaa

SEQ ID NO: 71343 - protein, 255 aa, Arabidopsis thaliana
  peptide (1)..(255): Ceres Seq. ID no. 3094773
  misc_feature (199)..(254): Pfam Name: Domain of unknown function DUF26 Pfam Description: Domain of unknown function DUF26
  misc_feature (1)..(255): Homolog of NCBI NO: 11994708 NR Description: contains similarity to serine/threonine
  misc_feature (8)..(255): Homolog of NCBI NO: 15228583 NR Description: receptor kinase, putative; protein id:
  misc_feature (5)..(255): Homolog of NCBI NO: 15233228 NR Description: hypothetical protein; protein id: At3g21970.1
  misc_feature (5)..(247): Homolog of NCBI NO: 9279753 NR Description: emb|CAB45833.1~gene_id:MZN24.14~similar to
  misc_feature (2)..(254): Homolog of NCBI NO: 15233235 NR Description: receptor kinase common family, putative; protein At3g21990.1 [Arabidopsis thaliana] >gi|9279756|dbj|BAB01382.1| similarity to receptor kinase~gene_id:MZN24.17 [Arabidopsis
  misc_feature (2)..(254): Homolog of NCBI NO: 15233366 NR Description: pollen coat receptor kinase, putative; protein At4g20670.1 [Arabidopsis thaliana] >gi|7485931|pir||T10609
  misc_feature (19)..(253): Homolog of NCBI NO: 9279746 NR Description: contains similarity to receptor protein
  misc_feature (4)..(253): Homolog of NCBI NO: 15233201 NR Description: hypothetical protein; protein id: At3g21910.1 thaliana] >gi|9279742|dbj|BAB01368.1| contains similarity to
  misc_feature (8)..(255): Homolog of NCBI NO: 9279762 NR Description: emb|CAB45834.1~gene_id:MZN24.23~similar to
  misc_feature (5)..(253): Homolog of NCBI NO: 15233204 NR Description: pollen coat receptor kinase, putative; protein At3g21920.1 [Arabidopsis thaliana] >gi|9279743|dbj|BAB01369.1| similarity to receptor protein kinase~gene_id:MZN24.4
MSSNILAMVAMQLLLIRIVSSQNVTNEYLNHQCNNTQGTYTRGSTFEKNLNQVIRNISHLHLRYGYTYNSNVEAYEVSKDPNIVFVLLQCRGDSYGSKCHSCLHTAFSGLRERCRGNKGAIIWYDQCVLEISSVNTKGRIRYDSFFNMTNVKNVSSNAEQFKNKRKDLFHKLLLGATKDVSDSNDAYAVGETRIGRNKMYAMMQCALDLTTNGCYVCLEWIIGRYDSFYFDRRQGTRVLSRSCSLRYELYPFLRR

SEQ ID NO: 71344 - protein, 248 aa, Arabidopsis thaliana
  peptide (1)..(248): Ceres Seq. ID no. 3094774
  misc_feature (192)..(247): Pfam Name: Domain of unknown function DUF26 Pfam Description: Domain of unknown function DUF26
  misc_feature (1)..(248): Homolog of NCBI NO: 11994708 NR Description: contains similarity to serine/threonine
  misc_feature (1)..(248): Homolog of NCBI NO: 15228583 NR Description: receptor kinase, putative; protein id:
  misc_feature (1)..(248): Homolog of NCBI NO: 15233228 NR Description: hypothetical protein; protein id: At3g21970.1
  misc_feature (1)..(240): Homolog of NCBI NO: 9279753 NR Description: emb|CAB45833.1~gene_id:MZN24.14~similar to
  misc_feature (1)..(247): Homolog of NCBI NO: 15233235 NR Description: receptor kinase common family, putative; protein At3g21990.1 [Arabidopsis thaliana] >gi|9279756|dbj|BAB01382.1| similarity to receptor kinase~gene_id:MZN24.17 [Arabidopsis
  misc_feature (1)..(247): Homolog of NCBI NO: 15233366 NR Description: pollen coat receptor kinase, putative; protein At4g20670.1 [Arabidopsis thaliana] >gi|7485931|pir||T10609
  misc_feature (12)..(246): Homolog of NCBI NO: 9279746 NR Description: contains similarity to receptor protein
  misc_feature (1)..(246): Homolog of NCBI NO: 15233201 NR Description: hypothetical protein; protein id: At3g21910.1 thaliana] >gi|9279742|dbj|BAB01368.1| contains similarity to
  misc_feature (1)..(248): Homolog of NCBI NO: 9279762 NR Description: emb|CAB45834.1~gene_id:MZN24.23~similar to
  misc_feature (1)..(246): Homolog of NCBI NO: 15233204 NR Description: pollen coat receptor kinase, putative; protein At3g21920.1 [Arabidopsis thaliana] >gi|9279743|dbj|BAB01369.1| similarity to receptor protein kinase~gene_id:MZN24.4
MVAMQLLLIRIVSSQNVTNEYLNHQCNNTQGTYTRGSTFEKNLNQVIRNISHLHLRYGYTYNSNVEAYEVSKDPNIVFVLLQCRGDSYGSKCHSCLHTAFSGLRERCRGNKGAIIWYDQCVLEISSVNTKGRIRYDSFFNMTNVKNVSSNAEQFKNKRKDLFHKLLLGATKDVSDSNDAYAVGETRIGRNKMYAMMQCALDLTTNGCYVCLEWIIGRYDSFYFDRRQGTRVLSRSCSLRYELYPFLRR

SEQ ID NO: 71345 - protein, 245 aa, Arabidopsis thaliana
  peptide (1)..(245): Ceres Seq. ID no. 3094776
  misc_feature (189)..(244): Pfam Name: Domain of unknown function DUF26 Pfam Description: Domain of unknown function DUF26
  misc_feature (1)..(245): Homolog of NCBI NO: 11994708 NR Description: contains similarity to serine/threonine
  misc_feature (1)..(245): Homolog of NCBI NO: 15228583 NR Description: receptor kinase, putative; protein id:
  misc_feature (1)..(245): Homolog of NCBI NO: 15233228 NR Description: hypothetical protein; protein id: At3g21970.1
  misc_feature (1)..(237): Homolog of NCBI NO: 9279753 NR Description: emb|CAB45833.1~gene_id:MZN24.14~similar to
  misc_feature (1)..(244): Homolog of NCBI NO: 15233235 NR Description: receptor kinase common family, putative; protein At3g21990.1 [Arabidopsis thaliana] >gi|9279756|dbj|BAB01382.1| similarity to receptor kinase~gene_id:MZN24.17 [Arabidopsis
  misc_feature (1)..(244): Homolog of NCBI NO: 15233366 NR Description: pollen coat receptor kinase, putative; protein At4g20670.1 [Arabidopsis thaliana] >gi|7485931|pir||T10609
  misc_feature (9)..(243): Homolog of NCBI NO: 9279746 NR Description: contains similarity to receptor protein
  misc_feature (1)..(243): Homolog of NCBI NO: 15233201 NR Description: hypothetical protein; protein id: At3g21910.1 thaliana] >gi|9279742|dbj|BAB01368.1| contains similarity to
  misc_feature (1)..(245): Homolog of NCBI NO: 9279762 NR Description: emb|CAB45834.1~gene_id:MZN24.23~similar to
  misc_feature (1)..(243): Homolog of NCBI NO: 15233204 NR Description: pollen coat receptor kinase, putative; protein At3g21920.1 [Arabidopsis thaliana] >gi|9279743|dbj|BAB01369.1| similarity to receptor protein kinase~gene_id:MZN24.4
MQLLLIRIVSSQNVTNEYLNHQCNNTQGTYTRGSTFEKNLNQVIRNISHLHLRYGYTYNSNVEAYEVSKDPNIVFVLLQCRGDSYGSKCHSCLHTAFSGLRERCRGNKGAIIWYDQCVLEISSVNTKGRIRYDSFFNMTNVKNVSSNAEQFKNKRKDLFHKLLLGATKDVSDSNDAYAVGETRIGRNKMYAMMQCALDLTTNGCYVCLEWIIGRYDSFYFDRRQGTRVLSRSCSLRYELYPFLRR

SEQ ID NO: 71346 - DNA, 1080 bp, Arabidopsis thaliana
  misc_feature (1)..(1080): Ceres Seq. ID no. 3094823
  misc_feature: MA Experiment ID: 20000171 Result: Up-regulated in Transcription
  misc_feature: MA Experiment 20000171 PARAMETER Experiment Name: At_42deg_Heat_P Parameter: Age (day) Value: 14
  misc_feature: MA Experiment 20000171 PARAMETER Experiment Name: At_42deg_Heat_P Parameter: Organism Value: A. thaliana
  misc_feature: MA Experiment 20000171 PARAMETER Experiment Name: At_42deg_Heat_P Parameter: Plant Line Value: WS
  misc_feature: MA Experiment 20000171 PARAMETER Experiment Name: At_42deg_Heat_P Parameter: Temperature (deg C) Value: 42 vs. 22
  misc_feature: MA Experiment 20000171 PARAMETER Experiment Name: At_42deg_Heat_P Parameter: Timepoint (hr) Value: 1
  misc_feature: MA Experiment 20000171 PARAMETER Experiment Name: At_42deg_Heat_P Parameter: Tissue Value: Aerial
  misc_feature: MA Experiment ID: 20000185 Result: Down-regulated in Transcription
  misc_feature: MA Experiment 20000185 PARAMETER Experiment Name: At_Roots__P Parameter: Age (day) Value: 7 vs. 21
  misc_feature: MA Experiment 20000185 PARAMETER Experiment Name: At_Roots__P Parameter: Organism Value: A. thaliana
  misc_feature: MA Experiment 20000185 PARAMETER Experiment Name: At_Roots__P Parameter: Tissue Value: Roots vs. Whole Plant
  misc_feature: MA Experiment ID: 20000265 Result: Up-regulated in Transcription
  misc_feature: MA Experiment 20000265 PARAMETER Experiment Name: At_Open_Flower_P Parameter: Age (day) Value: 21
  misc_feature: MA Experiment 20000265 PARAMETER Experiment Name: At_Open_Flower_P Parameter: Plant Line Value: WS
  misc_feature: MA Experiment 20000265 PARAMETER Experiment Name: At_Open_Flower_P Parameter: Tissue Value: Closed Flower vs. Whole Plant
  misc_feature: MA Experiment ID: 20000438 Result: Up-regulated in Transcription
  misc_feature: MA Experiment 20000438 PARAMETER Experiment Name: At_Shoots__P Parameter: Age (day) Value: 14
  misc_feature: MA Experiment 20000438 PARAMETER Experiment Name: At_Shoots__P Parameter: Tissue Value: Shoots vs. Whole Plant
atgtataagaatcagttgcaagagcttgcacagaggagttgtttcagtctcccatcatatacatgcacaagagaaggaccagatcatgctccaagattcaaagctagtgtaaacttcaatggtgagatatttgaaagcccaacttactgttctactctcagacaagctgagcattcagctgctgaagttgctcttagtgctctctcttccaaaggtccttcaaagtctctaactgctagagttctagatgagactgggatctacaagaatctgcttcaagagacagcacacagagctggtcttgatctaccggtttacacaagtgtgagatcaggacctggtcacatcccaacattctcttgtactgtggagcttgctggaatgagttttaatggagaatcagcaaagactaagaaacaagctgagaagaatgcagccattgcagcttggttctccttgagaaaaatgccaagattggacccattgagaggtgaagagaaggaacaagagatagttgcaagagtcctctcaagatttagacccaaagaagtgaaaagaagagaaccaaaccagtcaagaagaagaacagtcatcagaacaattcgccaaaacacaacaacaacaacaacaaccacaggagacttgttgtgtgagaaactcagatccatcaatctatataccaatgaagcttcatcatcatcaccaccaccacagagattctggccttcaagaacaaatctcacacaagaacaatccaaagtcaaatcattgctagagaaatgtcaagaatatgcagagaagaaacagagcctagatgatcctaagccagagatgagaatcaaaacatcatcaccatcaccattatcatcatcagtggagagaaactgttatagtaagctcttaccctttccaagttttgtgttaaaccatcagaaactagctccagcagttcacatcagatcagtgatcccagtttgttcagctcctccaccaaaacctaaccctaaccctaattcatcaccgttcatcacaagggagctgggaaatggaagccaagagaagaagtcattaccaaattag

SEQ ID NO: 71347 - protein, 359 aa, Arabidopsis thaliana; identical to SEQ ID NO: 50007
  peptide (1)..(359): Ceres Seq. ID no. 3094824
  misc_feature (2)..(68): Pfam Name: Double-stranded RNA binding motif Pfam Description: Double-stranded RNA binding motif
  misc_feature (1)..(359): Homolog of NCBI NO: 11994159 NR Description: gb|AAD20688.1~gene_id:MQP17.5~similar to unknown
  misc_feature (1)..(359): Homolog of NCBI NO: 15231653 NR Description: hypothetical protein; protein id: At3g26932.1
  misc_feature (1)..(340): Homolog of NCBI NO: 30693732 NR Description: expressed protein [Arabidopsis thaliana]
  misc_feature (1)..(340): Homolog of NCBI NO: 9759153 NR Description: gb|AAD20688.1~gene_id:MEE6.14~similar to unknown
  misc_feature (1)..(183): Homolog of NCBI NO: 18401724 NR Description: expressed protein; protein id: At2g28380.1, by cDNA: gi_14334605, supported by cDNA: gi_17065633 [Arabidopsis >gi|25407980|pir||B84684 hypothetical protein At2g28380
  misc_feature (1)..(183): Homolog of NCBI NO: 37535422 NR Description: putative extensin [Oryza sativa (japonica
  misc_feature (1)..(143): Homolog of NCBI NO: 40788412 NR Description: hypothetical protein [Oryza sativa (japonica
  misc_feature (1)..(184): Homolog of NCBI NO: 18389232 NR Description: unknown protein [Arabidopsis thaliana]
  misc_feature (1)..(184): Homolog of NCBI NO: 22331912 NR Description: putative protein; protein id: At3g62800.1, by cDNA: gi_18389231 [Arabidopsis thaliana]
  misc_feature (88)..(184): Homolog of NCBI NO: 11283535 NR Description: hypothetical protein F26K9.230 - Arabidopsis >gi|7362760|emb|CAB83130.1| putative protein [Arabidopsis

SEQ ID NO: 71348 - protein, 232 aa, Arabidopsis thaliana; identical to SEQ ID NO: 50008
  peptide (1)..(232): Ceres Seq. ID no. 3094825
  misc_feature (1)..(232): Homolog of NCBI NO: 11994159 NR Description: gb|AAD20688.1~gene_id:MQP17.5~similar to unknown
  misc_feature (1)..(232): Homolog of NCBI NO: 15231653 NR Description: hypothetical protein; protein id: At3g26932.1
  misc_feature (1)..(213): Homolog of NCBI NO: 30693732 NR Description: expressed protein [Arabidopsis thaliana]
  misc_feature (1)..(213): Homolog of NCBI NO: 9759153 NR Description: gb|AAD20688.1~gene_id:MEE6.14~similar to unknown
  misc_feature (1)..(56): Homolog of NCBI NO: 18401724 NR Description: expressed protein; protein id: At2g28380.1, by cDNA: gi_14334605, supported by cDNA: gi_17065633 [Arabidopsis >gi|25407980|pir||B84684 hypothetical protein At2g28380
  misc_feature (1)..(56): Homolog of NCBI NO: 37535422 NR Description: putative extensin [Oryza sativa (japonica
  misc_feature (1)..(16): Homolog of NCBI NO: 40788412 NR Description: hypothetical protein [Oryza sativa (japonica
  misc_feature (1)..(57): Homolog of NCBI NO: 18389232 NR Description: unknown protein [Arabidopsis thaliana]
  misc_feature (1)..(57): Homolog of NCBI NO: 22331912 NR Description: putative protein; protein id: At3g62800.1, by cDNA: gi_18389231 [Arabidopsis thaliana]
  misc_feature (1)..(57): Homolog of NCBI NO: 11283535 NR Description: hypothetical protein F26K9.230 - Arabidopsis >gi|7362760|emb|CAB83130.1| putative protein [Arabidopsis

SEQ ID NO: 71349 - protein, 204 aa, Arabidopsis thaliana; identical to SEQ ID NO: 50009
  peptide (1)..(204): Ceres Seq. ID no. 3094826
  misc_feature (1)..(29): Homolog of NCBI NO: 11283535 NR Description: hypothetical protein F26K9.230 - Arabidopsis >gi|7362760|emb|CAB83130.1| putative protein [Arabidopsis
  misc_feature (1)..(45): Homolog of NCBI NO: 27262831 NR Description: dsRNA-binding protein [Brassica oleracea var.
  misc_feature (1)..(204): Homolog of NCBI NO: 11994159 NR Description: gb|AAD20688.1~gene_id:MQP17.5~similar to unknown
  misc_feature (1)..(204): Homolog of NCBI NO: 15231653 NR Description: hypothetical protein; protein id: At3g26932.1
  misc_feature (1)..(185): Homolog of NCBI NO: 30693732 NR Description: expressed protein [Arabidopsis thaliana]
  misc_feature (1)..(185): Homolog of NCBI NO: 9759153 NR Description: gb|AAD20688.1~gene_id:MEE6.14~similar to unknown
  misc_feature (1)..(28): Homolog of NCBI NO: 18401724 NR Description: expressed protein; protein id: At2g28380.1, by cDNA: gi_14334605, supported by cDNA: gi_17065633 [Arabidopsis >gi|25407980|pir||B84684 hypothetical protein At2g28380
  misc_feature (1)..(28): Homolog of NCBI NO: 37535422 NR Description: putative extensin [Oryza sativa (japonica
  misc_feature (1)..(29): Homolog of NCBI NO: 18389232 NR Description: unknown protein [Arabidopsis thaliana]
  misc_feature (1)..(29): Homolog of NCBI NO: 22331912 NR Description: putative protein; protein id: At3g62800.1, by cDNA: gi_18389231 [Arabidopsis thaliana]

SEQ ID NO: 71350 - DNA, 1533 bp, Arabidopsis thaliana
  misc_feature (1)..(1533): Ceres Seq. ID no. 3095119
  misc_feature: MA Experiment ID: 20000185 Result: Up-regulated in Transcription
  misc_feature: MA Experiment 20000185 PARAMETER Experiment Name: At_Roots__P Parameter: Age (day) Value: 7 vs. 21
  misc_feature: MA Experiment 20000185 PARAMETER Experiment Name: At_Roots__P Parameter: Organism Value: A. thaliana
  misc_feature: MA Experiment 20000185 PARAMETER Experiment Name: At_Roots__P Parameter: Tissue Value: Roots vs. Whole Plant
  misc_feature: MA Experiment ID: 20000227 Result: Down-regulated in Transcription
  misc_feature: MA Experiment 20000227 PARAMETER Experiment Name: At_Root-Tips-vs-Tops_P Parameter: Tissue Value: Root Tips vs. Root Tops
  misc_feature: MA Experiment ID: 20000265 Result: Up-regulated in Transcription
  misc_feature: MA Experiment 20000265 PARAMETER Experiment Name: At_Open_Flower_P Parameter: Age (day) Value: 21
  misc_feature: MA Experiment 20000265 PARAMETER Experiment Name: At_Open_Flower_P Parameter: Plant Line Value: WS
  misc_feature: MA Experiment 20000265 PARAMETER Experiment Name: At_Open_Flower_P Parameter: Tissue Value: Closed Flower vs. Whole Plant
  misc_feature: MA Experiment ID: 20000437 Result: Down-regulated in Transcription
  misc_feature: MA Experiment 20000437 PARAMETER Experiment Name: At_Drought_P Parameter: Age (day) Value: 8
  misc_feature: MA Experiment 20000437 PARAMETER Experiment Name: At_Drought_P Parameter: Organism Value: A. thaliana
  misc_feature: MA Experiment 20000437 PARAMETER Experiment Name: At_Drought_P Parameter: Plant Line Value: WS
  misc_feature: MA Experiment 20000437 PARAMETER Experiment Name: At_Drought_P Parameter: Timepoint (hr) Value: 24
  misc_feature: MA Experiment 20000437 PARAMETER Experiment Name: At_Drought_P Parameter: Tissue Value: Whole Plant
  misc_feature: MA Experiment 20000437 PARAMETER Experiment Name: At_Drought_P Parameter: Treatment Value: Drought vs. No Drought
  misc_feature: MA Experiment ID: 20000438 Result: Up-regulated in Transcription
  misc_feature: MA Experiment 20000438 PARAMETER Experiment Name: At_Shoots__P Parameter: Age (day) Value: 14
  misc_feature: MA Experiment 20000438 PARAMETER Experiment Name: At_Shoots__P Parameter: Tissue Value: Shoots vs. Whole Plant
  misc_feature: MA Experiment ID: 20000439 Result: Up-regulated in Transcription
  misc_feature: MA Experiment 20000439 PARAMETER Experiment Name: At_Roots__P Parameter: Age (day) Value: 14 vs. 21
  misc_feature: MA Experiment 20000439 PARAMETER Experiment Name: At_Roots__P Parameter: Organism Value: A. thaliana
  misc_feature: MA Experiment 20000439 PARAMETER Experiment Name: At_Roots__P Parameter: Tissue Value: Roots vs. Whole Plant
  misc_feature: MA Experiment ID: 20000451 Result: Down-regulated in Transcription
  misc_feature: MA Experiment 20000451 PARAMETER Experiment Name: At_CS6879_Shoots-Roots_P Parameter: Age (day) Value: 14
  misc_feature: MA Experiment 20000451 PARAMETER Experiment Name: At_CS6879_Shoots-Roots_P Parameter: Organism Value: A. thaliana
  misc_feature: MA Experiment 20000451 PARAMETER Experiment Name: At_CS6879_Shoots-Roots_P Parameter: Plant Line Value: CS6879 vs. WS
  misc_feature: MA Experiment 20000451 PARAMETER Experiment Name: At_CS6879_Shoots-Roots_P Parameter: Tissue Value: Roots
  misc_feature: MA Experiment ID: 20000460 Result: Down-regulated in Transcription
  misc_feature: MA Experiment 20000460 PARAMETER Experiment Name: At_10percent_PEG_P Parameter: Age (day) Value: 12
  misc_feature: MA Experiment 20000460 PARAMETER Experiment Name: At_10percent_PEG_P Parameter: Organism Value: A. thaliana
  misc_feature: MA Experiment 20000460 PARAMETER Experiment Name: At_10percent_PEG_P Parameter: Plant Line Value: WS
  misc_feature: MA Experiment 20000460 PARAMETER Experiment Name: At_10percent_PEG_P Parameter: Timepoint (day) Value: 12
  misc_feature: MA Experiment 20000460 PARAMETER Experiment Name: At_10percent_PEG_P Parameter: Tissue Value: Whole Plant
  misc_feature: MA Experiment 20000460 PARAMETER Experiment Name: At_10percent_PEG_P Parameter: Treatment Value: 10percent PEG vs. No Treatment
  misc_feature: MA Experiment ID: 20000527 Result: Down-regulated in Transcription
  misc_feature: MA Experiment 20000527 PARAMETER Experiment Name: At_10percent_PEG_P Parameter: Age (day) Value: 20
  misc_feature: MA Experiment 20000527 PARAMETER Experiment Name: At_10percent_PEG_P Parameter: Organism Value: A. thaliana
  misc_feature: MA Experiment 20000527 PARAMETER Experiment Name: At_10percent_PEG_P Parameter: Plant Line Value: WS
  misc_feature: MA Experiment 20000527 PARAMETER Experiment Name: At_10percent_PEG_P Parameter: Timepoint (day) Value: 20
  misc_feature: MA Experiment 20000527 PARAMETER Experiment Name: At_10percent_PEG_P Parameter: Tissue Value: Whole Plant
  misc_feature: MA Experiment 20000527 PARAMETER Experiment Name: At_10percent_PEG_P Parameter: Treatment Value: 10percent PEG vs. No Treatment
  misc_feature: MA Experiment ID: 20000573 Result: Down-regulated in Transcription
  misc_feature: MA Experiment 20000573 PARAMETER Experiment Name: At_100uM_ABA_Mutants__P Parameter: Organism Value: A. thaliana
  misc_feature: MA Experiment 20000573 PARAMETER Experiment Name: At_100uM_ABA_Mutants__P Parameter: Plant Line Value: CS22 vs. Ler wt
  misc_feature: MA Experiment 20000573 PARAMETER Experiment Name: At_100uM_ABA_Mutants__P Parameter: Timepoint (hr) Value: N/A
  misc_feature: MA Experiment 20000573 PARAMETER Experiment Name: At_100uM_ABA_Mutants__P Parameter: Tissue Value: Whole Plant
  misc_feature: MA Experiment 20000573 PARAMETER Experiment Name: At_100uM_ABA_Mutants__P Parameter: Treatment Value: None
atggctactatttggtttctcccacttctctttctctcttgtcttcttcttgccgctttaagactcaagaagcggcggcaacatcaacggaaaccaccgtctccaccgggctttccgatcatcggaaacttgcatcagcttggggagctaccacatcaatctctatggagtctctccaaaaaatatggtcctgtaatgcttttgaagtttggaagtatcccaacggttgttgtctcttcttctgaaacagcaaagcaagctctgaaaatccatgacctcaattgttgtagccgtccaagcttagcaggattaaaacaaaagtcatatgattatttaggaccaagagcgctctcttacaactacttggacatagttttctctccttttaatgattactggaaagaattgaggaggatgtgtgtgcaagagcttttcagtcctaaacaagttcatttgattcaacccatcagggaagaggaagtcaagaaactgatgaattcattctcggaatcagctgctcagaaaactccggttaacttgagcgagaagttagcttctttaactgttggcgtgatatgcaaggcagcatttggtgtgagtttccaaggaactgtgcttaatagtgacaacttcgacaagttaatccatgatgcatttttgttcttggggagcttctctgcctcggattattttccaaatgtcggctggatcatcgactggctcacggggttacaagggcagagagagagaagtgtgagaggtcttgacgcattctatgaacaaatgtttgatctacataaacaggggaacaaagaaggagttgaggattttgtggacttgctcttgaagttggagaaagaagaaactgttcttggatatggcaagctcacaagaaaccatatcaaagcagtcttaatgaatgttcttcttggaggcattggaacttcggctataacaatgacatgggcaatgacagaacttatgagaaacccgcgagtaatgaagaaagttcaatccgaaatcagaaatcaaattgggggcaagtcaatgatctgcttggatgacatagaccaactccattacctgaaaatggtgatcaatgaaacatggaggctacatcctccagcaccacttctagttccaagagaagtaatgtctgaatttgaaatcaacggctacacgattccagccaagacaagactttatgtgaatgtatggggtatcgggcgtgatccagatacttggaaagatccagaggagtttcttccagagagatttgttaacagtaacattgatgcaaaaggacaaaactttgagctgttaccatttggaagtggtaggagaatgtgtcctgccatgtacatggggacaacaatggtggagtttggtctagccaatctcttgtaccattttgactggaaattaccagaaggcatggtggtcgaagacattgacatggaagaatctcctggactcaatgccagcaagaaaaatgagcttgtacttgttcctaggaagtatttaaatctgtaa

SEQ ID NO: 71351 - protein, 510 aa, Arabidopsis thaliana
  peptide (1)..(510): Ceres Seq. ID no. 3095120
  misc_feature (32)..(502): Pfam Name: Cytochrome P450 Pfam Description: Cytochrome P450
  misc_feature (1)..(510): Homolog of NCBI NO: 9294291 NR Description: cytochrome p450 [Arabidopsis thaliana]
  misc_feature (1)..(510): Homolog of NCBI NO: 15231542 NR Description: cytochrome p450 family; protein id: At3g26330.1
  misc_feature (1)..(509): Homolog of NCBI NO: 15231541 NR Description: cytochrome p450 family; protein id: At3g26320.1 thaliana] >gi|13878377|sp|Q9LIP4|C72X_ARATH Cytochrome P450 71B36
  misc_feature (1)..(508): Homolog of NCBI NO: 7430672 NR Description: probable cytochrome P450 At2g02580 [imported] -
  misc_feature (1)..(508): Homolog of NCBI NO: 15227003 NR Description: cytochrome p450 family; protein id: At2g02580.1, by cDNA: gi_18175890 [Arabidopsis thaliana] Cytochrome P450 71B9 >gi|20197089|gb|AAC18928.2| putative
  misc_feature (1)..(508): Homolog of NCBI NO: 18175891 NR Description: putative cytochrome P450 protein [Arabidopsis
  misc_feature (1)..(509): Homolog of NCBI NO: 15231538 NR Description: cytochrome p450 family; protein id: At3g26300.1 thaliana] >gi|13878379|sp|Q9LIP6|C72V_ARATH Cytochrome P450 71B34
  misc_feature (1)..(504): Homolog of NCBI NO: 15231539 NR Description: cytochrome p450 family; protein id: At3g26310.1 thaliana] >gi|13878378|sp|Q9LIP5|C72W_ARATH Cytochrome P450 71B35
  misc_feature (1)..(509): Homolog of NCBI NO: 15231537 NR Description: cytochrome p450 family; protein id: At3g26290.1 thaliana] >gi|13878380|sp|Q9LTL0|C72Q_ARATH Cytochrome P450 71B26
  misc_feature (1)..(508): Homolog of NCBI NO: 13878390 NR Description: Cytochrome P450 71B10 >gi|8777359|dbj|BAA96949.1|
MATIWFLPLLFLSCLLLAALRLKKRRQHQRKPPSPPGFPIIGNLHQLGELPHQSLWSLSKKYGPVMLLKFGSIPTVVVSSSETAKQALKIHDLNCCSRPSLAGLKQKSYDYLGPRALSYNYLDIVFSPFNDYWKELRRMCVQELFSPKQVHLIQPIREEEVKKLMNSFSESAAQKTPVNLSEKLASLTVGVICKAAFGVSFQGTVLNSDNFDKLIHDAFLFLGSFSASDYFPNVGWIIDWLTGLQGQRERSVRGLDAFYEQMFDLHKQGNKEGVEDFVDLLLKLEKEETVLGYGKLTRNHIKAVLMNVLLGGIGTSAITMTWAMTELMRNPRVMKKVQSEIRNQIGGKSMICLDDIDQLHYLKMVINETWRLHPPAPLLVPREVMSEFEINGYTIPAKTRLYVNVWGIGRDPDTWKDPEEFLPERFVNSNIDAKGQNFELLPFGSGRRMCPAMYMGTTMVEFGLANLLYHFDWKLPEGMVVEDIDMEESPGLNASKKNELVLVPRKYLNL

SEQ ID NO: 71352 - protein, 445 aa, Arabidopsis thaliana
  peptide (1)..(445): Ceres Seq. ID no. 3095121
  misc_feature (1)..(437): Pfam Name: Cytochrome P450 Pfam Description: Cytochrome P450
  misc_feature (1)..(445): Homolog of NCBI NO: 9294291 NR Description: cytochrome p450 [Arabidopsis thaliana]
  misc_feature (1)..(445): Homolog of NCBI NO: 15231542 NR Description: cytochrome p450 family; protein id: At3g26330.1
  misc_feature (1)..(444): Homolog of NCBI NO: 15231541 NR Description: cytochrome p450 family; protein id: At3g26320.1 thaliana] >gi|13878377|sp|Q9LIP4|C72X_ARATH Cytochrome P450 71B36
  misc_feature (1)..(443): Homolog of NCBI NO: 7430672 NR Description: probable cytochrome P450 At2g02580 [imported] -
  misc_feature (1)..(443): Homolog of NCBI NO: 15227003 NR Description: cytochrome p450 family; protein id: At2g02580.1, by cDNA: gi_18175890 [Arabidopsis thaliana] Cytochrome P450 71B9 >gi|20197089|gb|AAC18928.2| putative
  misc_feature (1)..(443): Homolog of NCBI NO: 18175891 NR Description: putative cytochrome P450 protein [Arabidopsis
  misc_feature (1)..(444): Homolog of NCBI NO: 15231538 NR Description: cytochrome p450 family; protein id: At3g26300.1 thaliana] >gi|13878379|sp|Q9LIP6|C72V_ARATH Cytochrome P450 71B34
  misc_feature (1)..(439): Homolog of NCBI NO: 15231539 NR Description: cytochrome p450 family; protein id: At3g26310.1 thaliana] >gi|13878378|sp|Q9LIP5|C72W_ARATH Cytochrome P450 71B35
  misc_feature (1)..(444): Homolog of NCBI NO: 15231537 NR Description: cytochrome p450 family; protein id: At3g26290.1 thaliana] >gi|13878380|sp|Q9LTL0|C72Q_ARATH Cytochrome P450 71B26
  misc_feature (1)..(443): Homolog of NCBI NO: 13878390 NR Description: Cytochrome P450 71B10 >gi|8777359|dbj|BAA96949.1|
MLLKFGSIPTVVVSSSETAKQALKIHDLNCCSRPSLAGLKQKSYDYLGPRALSYNYLDIVFSPFNDYWKELRRMCVQELFSPKQVHLIQPIREEEVKKLMNSFSESAAQKTPVNLSEKLASLTVGVICKAAFGVSFQGTVLNSDNFDKLIHDAFLFLGSFSASDYFPNVGWIIDWLTGLQGQRERSVRGLDAFYEQMFDLHKQGNKEGVEDFVDLLLKLEKEETVLGYGKLTRNHIKAVLMNVLLGGIGTSAITMTWAMTELMRNPRVMKKVQSEIRNQIGGKSMICLDDIDQLHYLKMVINETWRLHPPAPLLVPREVMSEFEINGYTIPAKTRLYVNVWGIGRDPDTWKDPEEFLPERFVNSNIDAKGQNFELLPFGSGRRMCPAMYMGTTMVEFGLANLLYHFDWKLPEGMVVEDIDMEESPGLNASKKNELVLVPRKYLNL

SEQ ID NO: 71353 - protein, 372 aa, Arabidopsis thaliana
  peptide (1)..(372): Ceres Seq. ID no. 3095122
  misc_feature (1)..(364): Pfam Name: Cytochrome P450 Pfam Description: Cytochrome P450
  misc_feature (1)..(372): Homolog of NCBI NO: 9294291 NR Description: cytochrome p450 [Arabidopsis thaliana]
  misc_feature (1)..(372): Homolog of NCBI NO: 15231542 NR Description: cytochrome p450 family; protein id: At3g26330.1
  misc_feature (1)..(371): Homolog of NCBI NO: 15231541 NR Description: cytochrome p450 family; protein id: At3g26320.1 thaliana] >gi|13878377|sp|Q9LIP4|C72X_ARATH Cytochrome P450 71B36
  misc_feature (1)..(370): Homolog of NCBI NO: 7430672 NR Description: probable cytochrome P450 At2g02580 [imported] -
  misc_feature (1)..(370): Homolog of NCBI NO: 15227003 NR Description: cytochrome p450 family; protein id: At2g02580.1, by cDNA: gi_18175890 [Arabidopsis thaliana] Cytochrome P450 71B9 >gi|20197089|gb|AAC18928.2| putative
  misc_feature (1)..(370): Homolog of NCBI NO: 18175891 NR Description: putative cytochrome P450 protein [Arabidopsis
  misc_feature (1)..(371): Homolog of NCBI NO: 15231538 NR Description: cytochrome p450 family; protein id: At3g26300.1 thaliana] >gi|13878379|sp|Q9LIP6|C72V_ARATH Cytochrome P450 71B34
  misc_feature (1)..(366): Homolog of NCBI NO: 15231539 NR Description: cytochrome p450 family; protein id: At3g26310.1 thaliana] >gi|13878378|sp|Q9LIP5|C72W_ARATH Cytochrome P450 71B35
  misc_feature (1)..(371): Homolog of NCBI NO: 15231537 NR Description: cytochrome p450 family; protein id: At3g26290.1 thaliana] >gi|13878380|sp|Q9LTL0|C72Q_ARATH Cytochrome P450 71B26
  misc_feature (1)..(370): Homolog of NCBI NO: 13878390 NR Description: Cytochrome P450 71B10 >gi|8777359|dbj|BAA96949.1|
MCVQELFSPKQVHLIQPIREEEVKKLMNSFSESAAQKTPVNLSEKLASLTVGVICKAAFGVSFQGTVLNSDNFDKLIHDAFLFLGSFSASDYFPNVGWIIDWLTGLQGQRERSVRGLDAFYEQMFDLHKQGNKEGVEDFVDLLLKLEKEETVLGYGKLTRNHIKAVLMNVLLGGIGTSAITMTWAMTELMRNPRVMKKVQSEIRNQIGGKSMICLDDIDQLHYLKMVINETWRLHPPAPLLVPREVMSEFEINGYTIPAKTRLYVNVWGIGRDPDTWKDPEEFLPERFVNSNIDAKGQNFELLPFGSGRRMCPAMYMGTTMVEFGLANLLYHFDWKLPEGMVVEDIDMEESPGLNASKKNELVLVPRKYLNL

SEQ ID NO: 71354 - DNA, 2700 bp, Arabidopsis thaliana
  misc_feature (1)..(2700): Ceres Seq. ID no. 3095595
  misc_feature: MA Experiment ID: 20000307 Result: Up-regulated in Transcription
  misc_feature: MA Experiment 20000307 PARAMETER Experiment Name: At_Germinating_Seeds_Sub_P Parameter: Age (hr) Value: 24 vs. 0
  misc_feature: MA Experiment 20000307 PARAMETER Experiment Name: At_Germinating_Seeds_Sub_P Parameter: Organism Value: A. thaliana
  misc_feature: MA Experiment 20000307 PARAMETER Experiment Name: At_Germinating_Seeds_Sub_P Parameter: Plant Line Value: WS
  misc_feature: MA Experiment 20000307 PARAMETER Experiment Name: At_Germinating_Seeds_Sub_P Parameter: Tissue Value: Germinating Seeds
  misc_feature: MA Experiment ID: 20000314 Result: Up-regulated in Transcription
  misc_feature: MA Experiment 20000314 PARAMETER Experiment Name: At_14day_Shoots-Roots_Sub_P Parameter: Age (day) Value: 14
  misc_feature: MA Experiment 20000314 PARAMETER Experiment Name: At_14day_Shoots-Roots_Sub_P Parameter: Organism Value: A. thaliana
  misc_feature: MA Experiment 20000314 PARAMETER Experiment Name: At_14day_Shoots-Roots_Sub_P Parameter: Plant Line Value: WS
  misc_feature: MA Experiment 20000314 PARAMETER Experiment Name: At_14day_Shoots-Roots_Sub_P Parameter: Tissue Value: Roots vs. Whole Plant
atggagtaccatcctcaagcaattaggttatgtgcgttgatcttcatctctttctatgctcttttacacctcgttgaagcacaagaccaaaaaggattcattagtttggattgcgggtcattgccaaatgagcctccttacaacgatccttcaaccggattaacatactcgacggacgatggtttcgtgcagagtggcaaaactggaagaatccagaaagcgttcgagtcgatcttcagtaaaccgtctttgaagcttagatacttcccggacggattccgaaactgctataccttgaatgtcacgcaagacacaaactatctgatcaaagctgtatttgtgtatggtaactacgatggtcttaacaatcccccgagtttcgatctttaccttggtccgaatctatgggtaacggttgatatgaatggacggaccaatggtactatccaggagattatccacaagaccatatctaagtctctccaggtctgtcttgttaagacaggaacaagctcacctatgattaatacgttagagctacgaccacttaaaaacaatacttacaatactcagagtggctctctgaagtatttcttccgatattatttcagcggttcaggccaaaacatacggtaccctgatgatgtcaatgatcgtaaatggtatccattctttgatgcaaaagagtggacagagttaacaaccaatctgaatataaacagttctaatggttatgcaccaccagaagttgtgatggcgtcagcctcaacgcctataagtacttttggaacatggaacttctcatggttattgccatcttccacaacccaattttatgtgtacatgcattttgccgagattcaaactctacggtccctcgatacccgagaattcaaagtgacgttgaatggaaaacttgcttatgaacgctacagccctaaaacgttagccaccgaaaccattttctattcgacaccacaacaatgtgaagatgggacatgcctcttggagttgacgaaaacacctaagtctactcttcctcctctcatgaacgctcttgaggttttcaccgtgatcgattttccacagatggaaacaaatccagatgatgttgctgctatcaagagtatccaaagcacttatggattaagtaaaatcagctggcaaggagatccatgcgttcctaaacagtttttgtgggagggtttaaactgcaataatctagataactccacgccgcctattgtcacttccttaaacttatcgtcaagtcatttaacggggatcatcgcgcaaggcattcagaatctgacacacctacaagaactagacttgtcaaataacaatttgacgggaggaatacccgaatttcttgctgacataaaatcactcttagtaataaatttaagtgggaacaattttaatggctctattcctcaaatccttttacagaagaaaggactaaagctaattcttgaaggaaacgccaatctgatttgtccggatggattatgtgtaaacaaagctggcaatggtggtgccaagaaaatgaatgttgtaataccgattgttgcatcagttgcgtttgtggttgttcttggatctgcattggcgttcttttttattttcaaaaagaaaaagacatcaaacagtcaagatttaggtccatcttcatatactcaagtatcagaagttagaacaatcagatcttcagagtcggcaataatgactaagaacagaagatttacatattcggaggttgtaacaatgacaaataactttgaaagagttcttggtaaaggaggatttggaatggtttatcatggaactgtaaataatactgaacaagtagccgttaaaatgctttcacactcatcttctcaaggatataaagaattcaaagcagaggtggaacttcttctcagagttcaccacaaaaatttggttggcctcgttggatattgtgatgaaggagaaaacttggctcttatctacgagtacatggctaacggagacttgagagaacatatgtcaggaaagcgaggtggatctattctaaattgggaaactagactaaaaatagttgtcgagtctgcccaaggtttggaatacttgcataatggatgcaaaccaccaatggttcatagggatgttaaaaccacaaatatattgttgaatgaacacctccatgctaagctagctgattttgggctttcgagatcttttccaattgaaggagaaactcatgtgtcaacagttgttgctggaactcctggataccttgatccagaatattaccgaacaaattggttgaacgagaaaagtgatgtttatagctttggaattgtactattagagatcatcacaaaccaacttgtgatcaatcaaagtcgtgaaaaaccacatatagcagaatgggtggggttaatgcttacaaaaggagacattcaaaacattatggatccaaaactttatggtgattatgactctggttctgtctggagagcagttgaactagcaatgtcatgtctaaatccttcttcagctagaagaccaacaatgtctcaagttgttatcgaattaaacgaatgtttgtcatatgaaaacgcaagaggaggaacgagtcaaaacatgaactcagagagttcaatagaagtcagcatgaactttgatattggagctacccctgatgctcgttag

SEQ ID NO: 71355 - protein, 899 aa, Arabidopsis thaliana
  peptide (1)..(899): Ceres Seq. ID no. 3095596
  misc_feature (14)..(899): Homolog of NCBI NO: 22330177 NR Description: receptor protein kinase, putative; protein id:
  misc_feature (9)..(899): Homolog of NCBI NO: 25387119 NR Description: probable protein kinase [imported] - Arabidopsis >gi|9802783|gb|AAF99852.1|AC015448_2 Putative protein kinase
  misc_feature (14)..(579): Homolog of NCBI NO: 25387103 NR Description: probable receptor protein kinase [imported] - thaliana >gi|12321669|gb|AAG50871.1|AC025294_9 receptor protein
  misc_feature (570)..(899): Homolog of NCBI NO: 25387103 NR Description: probable receptor protein kinase [imported] - thaliana >gi|12321669|gb|AAG50871.1|AC025294_9 receptor protein
  misc_feature (10)..(899): Homolog of NCBI NO: 15222042 NR Description: light repressible receptor protein kinase,
  misc_feature (10)..(899): Homolog of NCBI NO: 7770331 NR Description: F27J15.13 [Arabidopsis thaliana]
  misc_feature (313)..(560): Homolog of NCBI NO: 15238490 NR Description: leucine-rich repeat transmembrane protein kinase,
  misc_feature (662)..(899): Homolog of NCBI NO: 15238490 NR Description: leucine-rich repeat transmembrane protein kinase,
  misc_feature (185)..(278): Homolog of NCBI NO: 15238490 NR Description: leucine-rich repeat transmembrane protein kinase,
  misc_feature (13)..(93): Homolog of NCBI NO: 15238490 NR Description: leucine-rich repeat transmembrane protein kinase,
MEYHPQAIRLCALIFISFYALLHLVEAQDQKGFISLDCGSLPNEPPYNDPSTGLTYSTDDGFVQSGKTGRIQKAFESIFSKPSLKLRYFPDGFRNCYTLNVTQDTNYLIKAVFVYGNYDGLNNPPSFDLYLGPNLWVTVDMNGRTNGTIQEIIHKTISKSLQVCLVKTGTSSPMINTLELRPLKNNTYNTQSGSLKYFFRYYFSGSGQNIRYPDDVNDRKWYPFFDAKEWTELTTNLNINSSNGYAPPEVVMASASTPISTFGTWNFSWLLPSSTTQFYVYMHFAEIQTLRSLDTREFKVTLNGKLAYERYSPKTLATETIFYSTPQQCEDGTCLLELTKTPKSTLPPLMNALEVFTVIDFPQMETNPDDVAAIKSIQSTYGLSKISWQGDPCVPKQFLWEGLNCNNLDNSTPPIVTSLNLSSSHLTGIIAQGIQNLTHLQELDLSNNNLTGGIPEFLADIKSLLVINLSGNNFNGSIPQILLQKKGLKLILEGNANLICPDGLCVNKAGNGGAKKMNVVIPIVASVAFVVVLGSALAFFFIFKKKKTSNSQDLGPSSYTQVSEVRTIRSSESAIMTKNRRFTYSEVVTMTNNFERVLGKGGFGMVYHGTVNNTEQVAVKMLSHSSSQGYKEFKAEVELLLRVHHKNLVGLVGYCDEGENLALIYEYMANGDLREHMSGKRGGSILNWETRLKIVVESAQGLEYLHNGCKPPMVHRDVKTTNILLNEHLHAKLADFGLSRSFPIEGETHVSTVVAGTPGYLDPEYYRTNWLNEKSDVYSFGIVLLEIITNQLVINQSREKPHIAEWVGLMLTKGDIQNIMDPKLYGDYDSGSVWRAVELAMSCLNPSSARRPTMSQVVIELNECLSYENARGGTSQNMNSESSIEVSMNFDIGATPDAR

SEQ ID NO: 71356 - protein, 759 aa, Arabidopsis thaliana
  peptide (1)..(759): Ceres Seq. ID no. 3095598
  misc_feature (1)..(759): Homolog of NCBI NO: 22330177 NR Description: receptor protein kinase, putative; protein id:
  misc_feature (1)..(759): Homolog of NCBI NO: 25387119 NR Description: probable protein kinase [imported] - Arabidopsis >gi|9802783|gb|AAF99852.1|AC015448_2 Putative protein kinase
  misc_feature (1)..(439): Homolog of NCBI NO: 25387103 NR Description: probable receptor protein kinase [imported] - thaliana >gi|12321669|gb|AAG50871.1|AC025294_9 receptor protein
  misc_feature (430)..(759): Homolog of NCBI NO: 25387103 NR Description: probable receptor protein kinase [imported] - thaliana >gi|12321669|gb|AAG50871.1|AC025294_9 receptor protein
  misc_feature (1)..(759): Homolog of NCBI NO: 15222042 NR Description: light repressible receptor protein kinase,
  misc_feature (1)..(759): Homolog of NCBI NO: 7770331 NR Description: F27J15.13 [Arabidopsis thaliana]
  misc_feature (173)..(420): Homolog of NCBI NO: 15238490 NR Description: leucine-rich repeat transmembrane protein kinase,
  misc_feature (522)..(759): Homolog of NCBI NO: 15238490 NR Description: leucine-rich repeat transmembrane protein kinase,
  misc_feature (45)..(138): Homolog of NCBI NO: 15238490 NR Description: leucine-rich repeat transmembrane protein kinase,
  misc_feature (327)..(496): Homolog of NCBI NO: 15238490 NR Description: leucine-rich repeat transmembrane protein kinase,
MNGRTNGTIQEIIHKTISKSLQVCLVKTGTSSPMINTLELRPLKNNTYNTQSGSLKYFFRYYFSGSGQNIRYPDDVNDRKWYPFFDAKEWTELTTNLNINSSNGYAPPEVVMASASTPISTFGTWNFSWLLPSSTTQFYVYMHFAEIQTLRSLDTREFKVTLNGKLAYERYSPKTLATETIFYSTPQQCEDGTCLLELTKTPKSTLPPLMNALEVFTVIDFPQMETNPDDVAAIKSIQSTYGLSKISWQGDPCVPKQFLWEGLNCNNLDNSTPPIVTSLNLSSSHLTGIIAQGIQNLTHLQELDLSNNNLTGGIPEFLADIKSLLVINLSGNNFNGSIPQILLQKKGLKLILEGNANLICPDGLCVNKAGNGGAKKMNVVIPIVASVAFVVVLGSALAFFFIFKKKKTSNSQDLGPSSYTQVSEVRTIRSSESAIMTKNRRFTYSEVVTMTNNFERVLGKGGFGMVYHGTVNNTEQVAVKMLSHSSSQGYKEFKAEVELLLRVHHKNLVGLVGYCDEGENLALIYEYMANGDLREHMSGKRGGSILNWETRLKIVVESAQGLEYLHNGCKPPMVHRDVKTTNILLNEHLHAKLADFGLSRSFPIEGETHVSTVVAGTPGYLDPEYYRTNWLNEKSDVYSFGIVLLEIITNQLVINQSREKPHIAEWVGLMLTKGDIQNIMDPKLYGDYDSGSVWRAVELAMSCLNPSSARRPTMSQVVIELNECLSYENARGGTSQNMNSESSIEVSMNFDIGATPDAR

SEQ ID NO: 71357 - protein, 726 aa, Arabidopsis thaliana
  peptide (1)..(726): Ceres Seq. ID no. 3095599
  misc_feature (1)..(726): Homolog of NCBI NO: 22330177 NR Description: receptor protein kinase, putative; protein id:
  misc_feature (1)..(726): Homolog of NCBI NO: 25387119 NR Description: probable protein kinase [imported] - Arabidopsis >gi|9802783|gb|AAF99852.1|AC015448_2 Putative protein kinase
  misc_feature (1)..(406): Homolog of NCBI NO: 25387103 NR Description: probable receptor protein kinase [imported] - thaliana >gi|12321669|gb|AAG50871.1|AC025294_9 receptor protein
  misc_feature (397)..(726): Homolog of NCBI NO: 25387103 NR Description: probable receptor protein kinase [imported] - thaliana >gi|12321669|gb|AAG50871.1|AC025294_9 receptor protein
  misc_feature (1)..(726): Homolog of NCBI NO: 15222042 NR Description: light repressible receptor protein kinase,
  misc_feature (1)..(726): Homolog of NCBI NO: 7770331 NR Description: F27J15.13 [Arabidopsis thaliana]
  misc_feature (140)..(387): Homolog of NCBI NO: 15238490 NR Description: leucine-rich repeat transmembrane protein kinase,
  misc_feature (489)..(726): Homolog of NCBI NO: 15238490 NR Description: leucine-rich repeat transmembrane protein kinase,
  misc_feature (12)..(105): Homolog of NCBI NO: 15238490 NR Description: leucine-rich repeat transmembrane protein kinase,
  misc_feature (294)..(463): Homolog of NCBI NO: 15238490 NR Description: leucine-rich repeat transmembrane protein kinase,
MINTLELRPLKNNTYNTQSGSLKYFFRYYFSGSGQNIRYPDDVNDRKWYPFFDAKEWTELTTNLNINSSNGYAPPEVVMASASTPISTFGTWNFSWLLPSSTTQFYVYMHFAEIQTLRSLDTREFKVTLNGKLAYERYSPKTLATETIFYSTPQQCEDGTCLLELTKTPKSTLPPLMNALEVFTVIDFPQMETNPDDVAAIKSIQSTYGLSKISWQGDPCVPKQFLWEGLNCNNLDNSTPPIVTSLNLSSSHLTGIIAQGIQNLTHLQELDLSNNNLTGGIPEFLADIKSLLVINLSGNNFNGSIPQILLQKKGLKLILEGNANLICPDGLCVNKAGNGGAKKMNVVIPIVASVAFVVVLGSALAFFFIFKKKKTSNSQDLGPSSYTQVSEVRTIRSSESAIMTKNRRFTYSEVVTMTNNFERVLGKGGFGMVYHGTVNNTEQVAVKMLSHSSSQGYKEFKAEVELLLRVHHKNLVGLVGYCDEGENLALIYEYMANGDLREHMSGKRGGSILNWETRLKIVVESAQGLEYLHNGCKPPMVHRDVKTTNILLNEHLHAKLADFGLSRSFPIEGETHVSTVVAGTPGYLDPEYYRTNWLNEKSDVYSFGIVLLEIITNQLVINQSREKPHIAEWVGLMLTKGDIQNIMDPKLYGDYDSGSVWRAVELAMSCLNPSSARRPTMSQVVIELNECLSYENARGGTSQNMNSESSIEVSMNFDIGATPDAR

SEQ ID NO: 71358 - DNA, 4443 bp, Arabidopsis thaliana
  misc_feature (1)..(4443): Ceres Seq. ID no. 3095665
  misc_feature: MA Experiment ID: 20000315 Result: Up-regulated in Transcription
  misc_feature: MA Experiment 20000315 PARAMETER Experiment Name: At_14day_Shoots-Roots_Sub_P Parameter: Age (day) Value: 14
  misc_feature: MA Experiment 20000315 PARAMETER Experiment Name: At_14day_Shoots-Roots_Sub_P Parameter: Organism Value: A. thaliana
  misc_feature: MA Experiment 20000315 PARAMETER Experiment Name: At_14day_Shoots-Roots_Sub_P Parameter: Plant Line Value: WS
  misc_feature: MA Experiment 20000315 PARAMETER Experiment Name: At_14day_Shoots-Roots_Sub_P Parameter: Tissue Value: Shoots vs. Whole Plant
  misc_feature: MA Experiment ID: 20000440 Result: Up-regulated in Transcription
  misc_feature: MA Experiment 20000440 PARAMETER Experiment Name: At_Closed-Flower__Sub_P Parameter: Tissue Value: Closed Flower vs. Whole Plant
atggggtttcgcaccagaaacctctcctttctcattctcctccttcttaacttctttgctgccacatacgctcgtgaatgtagccctccaaaaccatcacctaagcctcacaaaccaccaaaacattctgtcgtcccacctaaaccaccggcggttaaaccacatccccacccgaaacctcccactataaaacctcctccgcctaaacgacacccccaccctaaaccacccaccgtcaaaccacaccctcaccctaaaccccctaccaaacctcatccccaccctaaaccacctaccaaacctcatccccaccctaaaccacccaccatcaaaccacctcctcaccctaaacctcgtccccaccctaaaccacccaacgtcaaaccacaccctcaccctaaacccccgacaaaacctcatccccaccctaaaccccccaccaaacatcatccccacccaaaacctcccaccataaaacctcctccgaaaccaccctccgtcaaacctccaccatcaactcctaaacctcctacgaccaaccctcctccgtctactccccaaccccctacccacaagcctccaccgtgcacaccaacaccacccgttgcctcaccaccaatggcaactcctcccactcaaatgcctcctatcgcaacacctcccatcgccaaatcgcccgtcgcaacaccgcctattgcaaccccacctactgcaacaccgcccattacaattccacctgttgcaacacctcctatcacaacacctcccatcgcaaacccacctatcataatgccacctatagcaactcctccagtagcagctcctcctataacaaatcctccaatatcaaagccgcctgttactacaccgcctactaccactcctcccattgcaaaaccacctatcgcaactcctcctatttcaacaccaccagccgcaacaccaccagccgcaacaccaccaataacaactctaccacccgcaaaaccgcctgttgcaatttcaccaatagtaactccacccgtcactccaattgcacagccaccagttgcaacaccgcccaccgcaactccacctgttgcaacaccaccaatagcaactccacctacctcaaaatcacctatctcaactcctcctatttcagaatcaccagttgcaacaccaccaaccgcaacatcaccaataaaaactccaccacccgcaaaaccacctgttgcaactccacccatcgcaaaatcgccaattgcaacaccgcccactgcgactccaccagttgcaactcctcctattgaaaaaccaccggttgcaacaccacccactacaacaccgcccaccgcaactccacctgttgcaaaaccaccagttgaaacaccaccaatagcaactccacctaccgcaaagccaccaatctcaactcctcctatttcaaaaccaccagttgcaacaccaccagccgcaacaccacctataacaactccaacaccagtaaaaccacctgttgcaactccaccgttagcaattccacccgtcgcaaaacccccagttgtaacaccgcccaccgcaacaccacctattgcaactcctcctattgcaaaatcaccggttgcaacaccgcccaccgcgacaccaccagttgcaactcctcctattgcaaaaccaccagttgtaacaccaccaactacaacaccgcccaccgcaactccacctgttgcaaaaccaccggttgcaacaccaccaatagcaactccacctaccgcaaagccaccaatctcaactcctcctatttcaaaatcaccagttgcaacaccaccagccgcaacaccacctatcacaactccaccacccgcaaaacctcctgttgcaactccaccaatagcaactccacccatcgcaaaaccgccagttgcaacaccgcccaccgcaacaccaccaattgcaacttctcctgttgcaaaaccaccagttgcaacaccacctataaaaactccaccacctgcaaaaccgcctgttgcaattccaccaatagcaactccacccgtcgcaaaaccgccagttgcaacaccgcccaccgcaactccacctattgcaactcctcctattgcaacaccaccggttgtaacaccgcccaccgcaactccaccagttgcaactcctcctattgcaaaacctccaacgacaataccgcctactgcaactccacctgttgcaatgccaccaatagcaactccacctaccgcaaaaccgcctattgcaactccaccgatagcaattccacccgtcgcaaaacccccagttgtaacaccgcccaccgcaacaccacctattgcaactcctcctattgcaaaatcaccggttgcaacaccgcccaccgcgacaccaccagttgcaactcctcctattgcaaaaccaccagttgcaacaccacccactacagcaccgcccaccgcaactccacctgttgcaaaaccaccggttgcaacaccaccaatagcaactccacctaccgcaaagccaccaatcttaactcctcctatttcaaaaccaccagttgcaacaccaccagccgcaacaccacctatcacaactccaccacccgcaaaacctcctgttgcaactccaccaatagcaactccacccatcgcaaaaccgccagttgcaacaccgcccaccgcaacaccaccaattgcaacttctcctgttgcaaaaccaccagttgcaataccacctataaaaactccaccacccgcaaaaccgcctgttgcaattccaccaatagcaactccacccgtcgcaaaaccgccagttgcaacaccgcccaccgcaactccacctattgcaacttctcctattgcaacaccaccggttgtaacaccgcccaccgcaacttcaccagttgcaactcctcctattgcaaaacctccaacgacaacaccgcccaccgcaactccacctgttgcaatgccaccaatagcaactccacctaccgcaaaaccgcctgttgcaactccacctatagcaaatccacctgtagaaaaaccgccggttgcaacaccgccaatcgcaaaaccgcccactgtactgccacctattgcaaaaccaccagttgaaacatcgcccaccgcaacacctccaaccgcaactccacctgttgcaattcctcctgttgtaaaaccaccggttgctatacctcccattacaaaaccaccggttgcaacaccaccagtaacaaatccacctaccgcaatgccaccaatcgttacgccgcctcctatcgtaactcctcctattgcaaaatcaccgatcgcaactccacctgtttctactcctcctatcgcaaagccacctatcgcaacaccgcctgttgcaactacgcccattgcaaaaccaccaattgcaacaccacccaccgcaaatccacctgttgcaaatcctcctatcgcaaagtcacctattgcaaagccaccaattgcaacaccccccaccgcaatgccatcaatagcaactccacctatcggtaagccgcctgttgcaaccccgcccatggcaaagccaccagttgcaagtccaccaattgcaacacctccaatcataaaaccaccagtcgcaactcctccaatcacaaaaccgccggttgcaactccaccagtagcaactcctcctatcgcaaagccaccagtcgcaacgtcgcctattgaaactccgcccgtggcaaaaccaccagttacaactccacctgtagcaactcctcccatcgtaaaaccacctattgtgacaccgcctattgcaactccacccatcgcaaagtcaccaatcgcgccgccgcctattggtactcctcctattgcaaaaccaccagttgcgacaccaccaaccgcaactccacctgttgctacttctcctatagcaaaaccacctgttgcaacgccgccacctgcaactccgcctgttgcaaaaccaccggttgcaacaccacccaccgtaactccacctgttgcaactcctccaatcgcaaagccacccggcgcacggccacccgttgccacaccacccgtagcaactccacctatcgctaagtcgcctgttgcaaccccacctatgacaaagccacctgttgcaagttcaccaattgcaactcctccaatcgcaaaaacacccatcgcaacgccacctacaactatgccgaaaacttgcccaattgacacgttgaagctaggctcgtgtgttgaccttcttggaggtttggttcacattggaattgggaaaagcgccaaggaaaagtgttgtccagttgttgaaggtttagttgatctagacgcagccgtttgtttatgtaccactattaaagctaaacttctcaacatagacgtcattctccccatagctcttgaagttctccttaattgtggaaaaaatccaccacctggattcaaatgtcccgcctga

SEQ ID NO: 71359 - protein, 1480 aa, Arabidopsis thaliana
  peptide (1)..(1480): Ceres Seq. ID no. 3095666
  misc_feature (9)..(424): Pfam Name: Extensin-like region Pfam Description: Extensin-like region
  misc_feature (202)..(1401): Homolog of NCBI NO: 4505285 NR Description: mucin 2 [Homo sapiens] Mucin 2 precursor (Intestinal mucin 2) >gi|454154|gb|AAB95295.1|
  misc_feature (28)..(330): Homolog of NCBI NO: 4505285 NR Description: mucin 2 [Homo sapiens] Mucin 2 precursor (Intestinal mucin 2) >gi|454154|gb|AAB95295.1|
  misc_feature (240)..(954): Homolog of NCBI NO: 15225875 NR Description: hypothetical protein; protein id: At2g27380.1
  misc_feature (658)..(1376): Homolog of NCBI NO: 15225875 NR Description: hypothetical protein; protein id: At2g27380.1
  misc_feature (528)..(1247): Homolog of NCBI NO: 15225875 NR Description: hypothetical protein; protein id: At2g27380.1
  misc_feature (678)..(1400): Homolog of NCBI NO: 15225875 NR Description: hypothetical protein; protein id: At2g27380.1
  misc_feature (28)..(279): Homolog of NCBI NO: 4505285 NR Description: mucin 2 [Homo sapiens] Mucin 2 precursor (Intestinal mucin 2) >gi|454154|gb|AAB95295.1|
  misc_feature (300)..(1004): Homolog of NCBI NO: 15225875 NR Description: hypothetical protein; protein id: At2g27380.1
  misc_feature (157)..(1300): Homolog of NCBI NO: 23505399 NR Description: elicitor-like mating protein M81 [Phytophthora
  misc_feature (125)..(1270): Homolog of NCBI NO: 23505399 NR Description: elicitor-like mating protein M81 [Phytophthora
MGFRTRNLSFLILLLLNFFAATYARECSPPKPSPKPHKPPKHSVVPPKPPAVKPHPHPKPPTIKPPPPKRHPHPKPPTVKPHPHPKPPTKPHPHPKPPTKPHPHPKPPTIKPPPHPKPRPHPKPPNVKPHPHPKPPTKPHPHPKPPTKHHPHPKPPTIKPPPKPPSVKPPPSTPKPPTTNPPPSTPQPPTHKPPPCTPTPPVASPPMATPPTQMPPIATPPIAKSPVATPPIATPPTATPPITIPPVATPPITTPPIANPPIIMPPIATPPVAAPPITNPPISKPPVTTPPTTTPPIAKPPIATPPISTPPAATPPAATPPITTLPPAKPPVAISPIVTPPVTPIAQPPVATPPTATPPVATPPIATPPTSKSPISTPPISESPVATPPTATSPIKTPPPAKPPVATPPIAKSPIATPPTATPPVATPPIEKPPVATPPTTTPPTATPPVAKPPVETPPIATPPTAKPPISTPPISKPPVATPPAATPPITTPTPVKPPVATPPLAIPPVAKPPVVTPPTATPPIATPPIAKSPVATPPTATPPVATPPIAKPPVVTPPTTTPPTATPPVAKPPVATPPIATPPTAKPPISTPPISKSPVATPPAATPPITTPPPAKPPVATPPIATPPIAKPPVATPPTATPPIATSPVAKPPVATPPIKTPPPAKPPVAIPPIATPPVAKPPVATPPTATPPIATPPIATPPVVTPPTATPPVATPPIAKPPTTIPPTATPPVAMPPIATPPTAKPPIATPPIAIPPVAKPPVVTPPTATPPIATPPIAKSPVATPPTATPPVATPPIAKPPVATPPTTAPPTATPPVAKPPVATPPIATPPTAKPPILTPPISKPPVATPPAATPPITTPPPAKPPVATPPIATPPIAKPPVATPPTATPPIATSPVAKPPVAIPPIKTPPPAKPPVAIPPIATPPVAKPPVATPPTATPPIATSPIATPPVVTPPTATSPVATPPIAKPPTTTPPTATPPVAMPPIATPPTAKPPVATPPIANPPVEKPPVATPPIAKPPTVLPPIAKPPVETSPTATPPTATPPVAIPPVVKPPVAIPPITKPPVATPPVTNPPTAMPPIVTPPPIVTPPIAKSPIATPPVSTPPIAKPPIATPPVATTPIAKPPIATPPTANPPVANPPIAKSPIAKPPIATPPTAMPSIATPPIGKPPVATPPMAKPPVASPPIATPPIIKPPVATPPITKPPVATPPVATPPIAKPPVATSPIETPPVAKPPVTTPPVATPPIVKPPIVTPPIATPPIAKSPIAPPPIGTPPIAKPPVATPPTATPPVATSPIAKPPVATPPPATPPVAKPPVATPPTVTPPVATPPIAKPPGARPPVATPPVATPPIAKSPVATPPMTKPPVASSPIATPPIAKTPIATPPTTMPKTCPIDTLKLGSCVDLLGGLVHIGIGKSAKEKCCPVVEGLVDLDAAVCLCTTIKAKLLNIDVILPIALEVLLNCGKNPPPGFKCPA

SEQ ID NO: 71360 - protein, 1274 aa, Arabidopsis thaliana
  peptide (1)..(1274): Ceres Seq. ID no. 3095668
  misc_feature (1)..(218): Pfam Name: Extensin-like region Pfam Description: Extensin-like region
  misc_feature (1)..(1195): Homolog of NCBI NO: 4505285 NR Description: mucin 2 [Homo sapiens] Mucin 2 precursor (Intestinal mucin 2) >gi|454154|gb|AAB95295.1|
  misc_feature (1)..(124): Homolog of NCBI NO: 4505285 NR Description: mucin 2 [Homo sapiens] Mucin 2 precursor (Intestinal mucin 2) >gi|454154|gb|AAB95295.1|
  misc_feature (34)..(748): Homolog of NCBI NO: 15225875 NR Description: hypothetical protein; protein id: At2g27380.1
  misc_feature (452)..(1170): Homolog of NCBI NO: 15225875 NR Description: hypothetical protein; protein id: At2g27380.1
  misc_feature (322)..(1041): Homolog of NCBI NO: 15225875 NR Description: hypothetical protein; protein id: At2g27380.1
  misc_feature (472)..(1194): Homolog of NCBI NO: 15225875 NR Description: hypothetical protein; protein id: At2g27380.1
  misc_feature (1)..(73): Homolog of NCBI NO: 4505285 NR Description: mucin 2 [Homo sapiens] Mucin 2 precursor (Intestinal mucin 2) >gi|454154|gb|AAB95295.1|
  misc_feature (94)..(798): Homolog of NCBI NO: 15225875 NR Description: hypothetical protein; protein id: At2g27380.1
  misc_feature (1)..(1094): Homolog of NCBI NO: 23505399 NR Description: elicitor-like mating protein M81 [Phytophthora
  misc_feature (1)..(1064): Homolog of NCBI NO: 23505399 NR Description: elicitor-like mating protein M81 [Phytophthora
MATPPTQMPPIATPPIAKSPVATPPIATPPTATPPITIPPVATPPITTPPIANPPIIMPPIATPPVAAPPITNPPISKPPVTTPPTTTPPIAKPPIATPPISTPPAATPPAATPPITTLPPAKPPVAISPIVTPPVTPIAQPPVATPPTATPPVATPPIATPPTSKSPISTPPISESPVATPPTATSPIKTPPPAKPPVATPPIAKSPIATPPTATPPVATPPIEKPPVATPPTTTPPTATPPVAKPPVETPPIATPPTAKPPISTPPISKPPVATPPAATPPITTPTPVKPPVATPPLAIPPVAKPPVVTPPTATPPIATPPIAKSPVATPPTATPPVATPPIAKPPVVTPPTTTPPTATPPVAKPPVATPPIATPPTAKPPISTPPISKSPVATPPAATPPITTPPPAKPPVATPPIATPPIAKPPVATPPTATPPIATSPVAKPPVATPPIKTPPPAKPPVAIPPIATPPVAKPPVATPPTATPPIATPPIATPPVVTPPTATPPVATPPIAKPPTTIPPTATPPVAMPPIATPPTAKPPIATPPIAIPPVAKPPVVTPPTATPPIATPPIAKSPVATPPTATPPVATPPIAKPPVATPPTTAPPTATPPVAKPPVATPPIATPPTAKPPILTPPISKPPVATPPAATPPITTPPPAKPPVATPPIATPPIAKPPVATPPTATPPIATSPVAKPPVAIPPIKTPPPAKPPVAIPPIATPPVAKPPVATPPTATPPIATSPIATPPVVTPPTATSPVATPPIAKPPTTTPPTATPPVAMPPIATPPTAKPPVATPPIANPPVEKPPVATPPIAKPPTVLPPIAKPPVETSPTATPPTATPPVAIPPVVKPPVAIPPITKPPVATPPVTNPPTAMPPIVTPPPIVTPPIAKSPIATPPVSTPPIAKPPIATPPVATTPIAKPPIATPPTANPPVANPPIAKSPIAKPPIATPPTAMPSIATPPIGKPPVATPPMAKPPVASPPIATPPIIKPPVATPPITKPPVATPPVATPPIAKPPVATSPIETPPVAKPPVTTPPVATPPIVKPPIVTPPIATPPIAKSPIAPPPIGTPPIAKPPVATPPTATPPVATSPIAKPPVATPPPATPPVAKPPVATPPTVTPPVATPPIAKPPGARPPVATPPVATPPIAKSPVATPPMTKPPVASSPIATPPIAKTPIATPPTTMPKTCPIDTLKLGSCVDLLGGLVHIGIGKSAKEKCCPVVEGLVDLDAAVCLCTTIKAKLLNIDVILPIALEVLLNCGKNPPPGFKCPA

SEQ ID NO: 71361 - protein, 1267 aa, Arabidopsis thaliana
  peptide (1)..(1267): Ceres Seq. ID no. 3095669
  misc_feature (1)..(211): Pfam Name: Extensin-like region Pfam Description: Extensin-like region
  misc_feature (1)..(1188): Homolog of NCBI NO: 4505285 NR Description: mucin 2 [Homo sapiens] Mucin 2 precursor (Intestinal mucin 2) >gi|454154|gb|AAB95295.1|
  misc_feature (1)..(117): Homolog of NCBI NO: 4505285 NR Description: mucin 2 [Homo sapiens] Mucin 2 precursor (Intestinal mucin 2) >gi|454154|gb|AAB95295.1|
  misc_feature (27)..(741): Homolog of NCBI NO: 15225875 NR Description: hypothetical protein; protein id: At2g27380.1
  misc_feature (445)..(1163): Homolog of NCBI NO: 15225875 NR Description: hypothetical protein; protein id: At2g27380.1
  misc_feature (315)..(1034): Homolog of NCBI NO: 15225875 NR Description: hypothetical protein; protein id: At2g27380.1
  misc_feature (465)..(1187): Homolog of NCBI NO: 15225875 NR Description: hypothetical protein; protein id: At2g27380.1
  misc_feature (1)..(66): Homolog of NCBI NO: 4505285 NR Description: mucin 2 [Homo sapiens] Mucin 2 precursor (Intestinal mucin 2) >gi|454154|gb|AAB95295.1|
  misc_feature (87)..(791): Homolog of NCBI NO: 15225875 NR Description: hypothetical protein; protein id: At2g27380.1
  misc_feature (1)..(1087): Homolog of NCBI NO: 23505399 NR Description: elicitor-like mating protein M81 [Phytophthora
  misc_feature (1)..(1057): Homolog of NCBI NO: 23505399 NR Description: elicitor-like mating protein M81 [Phytophthora
MPPIATPPIAKSPVATPPIATPPTATPPITIPPVATPPITTPPIANPPIIMPPIATPPVAAPPITNPPISKPPVTTPPTTTPPIAKPPIATPPISTPPAATPPAATPPITTLPPAKPPVAISPIVTPPVTPIAQPPVATPPTATPPVATPPIATPPTSKSPISTPPISESPVATPPTATSPIKTPPPAKPPVATPPIAKSPIATPPTATPPVATPPIEKPPVATPPTTTPPTATPPVAKPPVETPPIATPPTAKPPISTPPISKPPVATPPAATPPITTPTPVKPPVATPPLAIPPVAKPPVVTPPTATPPIATPPIAKSPVATPPTATPPVATPPIAKPPVVTPPTTTPPTATPPVAKPPVATPPIATPPTAKPPISTPPISKSPVATPPAATPPITTPPPAKPPVATPPIATPPIAKPPVATPPTATPPIATSPVAKPPVATPPIKTPPPAKPPVAIPPIATPPVAKPPVATPPTATPPIATPPIATPPVVTPPTATPPVATPPIAKPPTTIPPTATPPVAMPPIATPPTAKPPIATPPIAIPPVAKPPVVTPPTATPPIATPPIAKSPVATPPTATPPVATPPIAKPPVATPPTTAPPTATPPVAKPPVATPPIATPPTAKPPILTPPISKPPVATPPAATPPITTPPPAKPPVATPPIATPPIAKPPVATPPTATPPIATSPVAKPPVAIPPIKTPPPAKPPVAIPPIATPPVAKPPVATPPTATPPIATSPIATPPVVTPPTATSPVATPPIAKPPTTTPPTATPPVAMPPIATPPTAKPPVATPPIANPPVEKPPVATPPIAKPPTVLPPIAKPPVETSPTATPPTATPPVAIPPVVKPPVAIPPITKPPVATPPVTNPPTAMPPIVTPPPIVTPPIAKSPIATPPVSTPPIAKPPIATPPVATTPIAKPPIATPPTANPPVANPPIAKSPIAKPPIATPPTAMPSIATPPIGKPPVATPPMAKPPVASPPIATPPIIKPPVATPPITKPPVATPPVATPPIAKPPVATSPIETPPVAKPPVTTPPVATPPIVKPPIVTPPIATPPIAKSPIAPPPIGTPPIAKPPVATPPTATPPVATSPIAKPPVATPPPATPPVAKPPVATPPTVTPPVATPPIAKPPGARPPVATPPVATPPIAKSPVATPPMTKPPVASSPIATPPIAKTPIATPPTTMPKTCPIDTLKLGSCVDLLGGLVHIGIGKSAKEKCCPVVEGLVDLDAAVCLCTTIKAKLLNIDVILPIALEVLLNCGKNPPPGFKCPA

SEQ ID NO: 71362 - DNA, 990 bp, Arabidopsis thaliana
  misc_feature (1)..(990): Ceres Seq. ID no. 3095701
  misc_feature: MA Experiment ID: 20000307 Result: Up-regulated in Transcription
  misc_feature: MA Experiment 20000307 PARAMETER Experiment Name: At_Germinating_Seeds_Sub_P Parameter: Age (hr) Value: 24 vs. 0
  misc_feature: MA Experiment 20000307 PARAMETER Experiment Name: At_Germinating_Seeds_Sub_P Parameter: Organism Value: A. thaliana
  misc_feature: MA Experiment 20000307 PARAMETER Experiment Name: At_Germinating_Seeds_Sub_P Parameter: Plant Line Value: WS
  misc_feature: MA Experiment 20000307 PARAMETER Experiment Name: At_Germinating_Seeds_Sub_P Parameter: Tissue Value: Germinating Seeds
  misc_feature: MA Experiment ID: 20000314 Result: Up-regulated in Transcription
  misc_feature: MA Experiment 20000314 PARAMETER Experiment Name: At_14day_Shoots-Roots_Sub_P Parameter: Age (day) Value: 14
  misc_feature: MA Experiment 20000314 PARAMETER Experiment Name: At_14day_Shoots-Roots_Sub_P Parameter: Organism Value: A. thaliana
  misc_feature: MA Experiment 20000314 PARAMETER Experiment Name: At_14day_Shoots-Roots_Sub_P Parameter: Plant Line Value: WS
  misc_feature: MA Experiment 20000314 PARAMETER Experiment Name: At_14day_Shoots-Roots_Sub_P Parameter: Tissue Value: Roots vs. Whole Plant
  misc_feature: MA Experiment ID: 20000440 Result: Up-regulated in Transcription
  misc_feature: MA Experiment 20000440 PARAMETER Experiment Name: At_Closed-Flower__Sub_P Parameter: Tissue Value: Closed Flower vs. Whole Plant
atgagcaacgaagaaaacatcaaatctgataataagagcggcgattcctctgatctccctaccattcccgccttagatattggggcagaggaatgtgatcttcttgcagagcttaaggcaagtcacttcaaattgttgataaaaattcacacaaacctaaccttaaagcgaccatttgatgtgaaaaaactctcacctaaagttaccaaacgtgttctgttcctcaaagacattcaggttacacacgatgaactcgaagagaagtttcttgctgagaaatctgcattggaggcaacatatgataatctctacaagccgctttttgctaagaggtatgaaattgtgaatggtgtggtcgaagctgaagcagagaaagaaggagttcccaatttctggttgattgcaatgaaaaccaatgaaatgctcgcaaatgagataacggaaagagatgaggcagcattgaagtatcttaaggacatcagatcttgcagagttgaagacacttcaagaaatttcaagctggagtttctctttgattctaatctttacttcaagaactcggttctgtctaaaacttaccatgtgaacgatgaagatggtcctgttcttgagaaagtgattggaacggacatagaatggtttccaggtaaatgtttgactcataaggttgttgtgaagaagaaaacaaagaaagggccaaagaaggtcaacaacatccccatgaccaaaacagaaaactgcgagagtttcttcaatttcttcaagccacctgagattcctgagattgatgaagttgacgattacgatgattttgataccattatgacggaagaactacaaaacctgatggaccaagactatgacattgctgtgacaatccgagataaactgatccctcatgcagtttcatggtttacgggagaggctcttgttgatgaagacgattctgatgataatgatgatgatgataatgatgagaagagtgactaa

SEQ ID NO: 71363 - protein, 329 aa, Arabidopsis thaliana
  peptide (1)..(329): Ceres Seq. ID no. 3095702
  misc_feature (69)..(311): Pfam Name: Nucleosome assembly protein (NAP) Pfam Description: Nucleosome assembly protein (NAP)
  misc_feature (7)..(329): Homolog of NCBI NO: 15224782 NR Description: putative nucleosome assembly protein; protein id:
  misc_feature (5)..(329): Homolog of NCBI NO: 549975 NR Description: nucleosome assembly protein I-like protein;
  misc_feature (61)..(329): Homolog of NCBI NO: 2129840 NR Description: nucleosome assembly protein 1 - soybean
  misc_feature (61)..(329): Homolog of NCBI NO: 8777435 NR Description: nucleosome assembly protein [Arabidopsis thaliana]
  misc_feature (1)..(329): Homolog of NCBI NO: 9294025 NR Description: nucleosome assembly protein-like [Arabidopsis
  misc_feature (10)..(329): Homolog of NCBI NO: 29569109 NR Description: nucleosome/chromatin assembly factor group A [Zea
  misc_feature (1)..(329): Homolog of NCBI NO: 15231361 NR Description: nucleosome assembly protein, putative; protein
  misc_feature (61)..(329): Homolog of NCBI NO: 18423918 NR Description: nucleosome assembly protein; protein id: supported by cDNA: gi_13877572, supported by cDNA: gi_17978720 thaliana] >gi|13877573|gb|AAK43864.1|AF370487_1 nucleosome
  misc_feature (52)..(329): Homolog of NCBI NO: 15236115 NR Description: nucleosome assembly protein I-like protein; id: At4g26110.1, supported by cDNA: gi_15450807, supported by
  misc_feature (9)..(329): Homolog of NCBI NO: 7488816 NR Description: nucleosome assembly protein 1 - garden pea
MSNEENIKSDNKSGDSSDLPTIPALDIGAEECDLLAELKASHFKLLIKIHTNLTLKRPFDVKKLSPKVTKRVLFLKDIQVTHDELEEKFLAEKSALEATYDNLYKPLFAKRYEIVNGVVEAEAEKEGVPNFWLIAMKTNEMLANEITERDEAALKYLKDIRSCRVEDTSRNFKLEFLFDSNLYFKNSVLSKTYHVNDEDGPVLEKVIGTDIEWFPGKCLTHKVVVKKKTKKGPKKVNNIPMTKTENCESFFNFFKPPEIPEIDEVDDYDDFDTIMTEELQNLMDQDYDIAVTIRDKLIPHAVSWFTGEALVDEDDSDDNDDDDNDEKSD

SEQ ID NO: 71364 - protein, 194 aa, Arabidopsis thaliana
  peptide (1)..(194): Ceres Seq. ID no. 3095704
  misc_feature (1)..(176): Pfam Name: Nucleosome assembly protein (NAP) Pfam Description: Nucleosome assembly protein (NAP)
  misc_feature (1)..(194): Homolog of NCBI NO: 15231361 NR Description: nucleosome assembly protein, putative; protein
  misc_feature (1)..(194): Homolog of NCBI NO: 9294025 NR Description: nucleosome assembly protein-like [Arabidopsis
  misc_feature (1)..(194): Homolog of NCBI NO: 29569109 NR Description: nucleosome/chromatin assembly factor group A [Zea
  misc_feature (1)..(194): Homolog of NCBI NO: 15224782 NR Description: putative nucleosome assembly protein; protein id:
  misc_feature (1)..(194): Homolog of NCBI NO: 549975 NR Description: nucleosome assembly protein I-like protein;
  misc_feature (1)..(194): Homolog of NCBI NO: 2129840 NR Description: nucleosome assembly protein 1 - soybean
  misc_feature (1)..(194): Homolog of NCBI NO: 8777435 NR Description: nucleosome assembly protein [Arabidopsis thaliana]
  misc_feature (1)..(194): Homolog of NCBI NO: 18423918 NR Description: nucleosome assembly protein; protein id: supported by cDNA: gi_13877572, supported by cDNA: gi_17978720 thaliana] >gi|13877573|gb|AAK43864.1|AF370487_1 nucleosome
  misc_feature (1)..(194): Homolog of NCBI NO: 15236115 NR Description: nucleosome assembly protein I-like protein; id: At4g26110.1, supported by cDNA: gi_15450807, supported by
  misc_feature (1)..(194): Homolog of NCBI NO: 7488816 NR Description: nucleosome assembly protein 1 - garden pea
MKTNEMLANEITERDEAALKYLKDIRSCRVEDTSRNFKLEFLFDSNLYFKNSVLSKTYHVNDEDGPVLEKVIGTDIEWFPGKCLTHKVVVKKKTKKGPKKVNNIPMTKTENCESFFNFFKPPEIPEIDEVDDYDDFDTIMTEELQNLMDQDYDIAVTIRDKLIPHAVSWFTGEALVDEDDSDDNDDDDNDEKSD

SEQ ID NO: 71365 - protein, 189 aa, Arabidopsis thaliana
  peptide (1)..(189): Ceres Seq. ID no. 3095705
  misc_feature (1)..(171): Pfam Name: Nucleosome assembly protein (NAP) Pfam Description: Nucleosome assembly protein (NAP)
  misc_feature (1)..(189): Homolog of NCBI NO: 15231361 NR Description: nucleosome assembly protein, putative; protein
  misc_feature (1)..(189): Homolog of NCBI NO: 9294025 NR Description: nucleosome assembly protein-like [Arabidopsis
  misc_feature (1)..(189): Homolog of NCBI NO: 29569109 NR Description: nucleosome/chromatin assembly factor group A [Zea
  misc_feature (1)..(189): Homolog of NCBI NO: 15224782 NR Description: putative nucleosome assembly protein; protein id:
  misc_feature (1)..(189): Homolog of NCBI NO: 549975 NR Description: nucleosome assembly protein I-like protein;
  misc_feature (1)..(189): Homolog of NCBI NO: 2129840 NR Description: nucleosome assembly protein 1 - soybean
  misc_feature (1)..(189): Homolog of NCBI NO: 8777435 NR Description: nucleosome assembly protein [Arabidopsis thaliana]
  misc_feature (1)..(189): Homolog of NCBI NO: 18423918 NR Description: nucleosome assembly protein; protein id: supported by cDNA: gi_13877572, supported by cDNA: gi_17978720 thaliana] >gi|13877573|gb|AAK43864.1|AF370487_1 nucleosome
  misc_feature (1)..(189): Homolog of NCBI NO: 15236115 NR Description: nucleosome assembly protein I-like protein; id: At4g26110.1, supported by cDNA: gi_15450807, supported by
  misc_feature (1)..(189): Homolog of NCBI NO: 7488816 NR Description: nucleosome assembly protein 1 - garden pea
MLANEITERDEAALKYLKDIRSCRVEDTSRNFKLEFLFDSNLYFKNSVLSKTYHVNDEDGPVLEKVIGTDIEWFPGKCLTHKVVVKKKTKKGPKKVNNIPMTKTENCESFFNFFKPPEIPEIDEVDDYDDFDTIMTEELQNLMDQDYDIAVTIRDKLIPHAVSWFTGEALVDEDDSDDNDDDDNDEKSD

SEQ ID NO: 71366 - DNA, 1134 bp, Arabidopsis thaliana
  misc_feature (1)..(1134): Ceres Seq. ID no. 3096143
  misc_feature: MA Experiment ID: 20000180 Result: Down-regulated in Transcription
  misc_feature: MA Experiment 20000180 PARAMETER Experiment Name: At_Germinating_Seeds_P Parameter: Age (hr) Value: 24 vs. 0
  misc_feature: MA Experiment 20000180 PARAMETER Experiment Name: At_Germinating_Seeds_P Parameter: Tissue Value: Germinating Seeds
  misc_feature: MA Experiment ID: 20000227 Result: Up-regulated in Transcription
  misc_feature: MA Experiment 20000227 PARAMETER Experiment Name: At_Root-Tips-vs-Tops_P Parameter: Tissue Value: Root Tips vs. Root Tops
  misc_feature: MA Experiment ID: 20000794 Result: Up-regulated in Transcription
  misc_feature: MA Experiment 20000794 PARAMETER Experiment Name: At_Petals_P Parameter: Age (day) Value: 23-25 days
  misc_feature: MA Experiment 20000794 PARAMETER Experiment Name: At_Petals_P Parameter: Plant Line Value: WS
  misc_feature: MA Experiment 20000794 PARAMETER Experiment Name: At_Petals_P Parameter: Tissue Value: Petals vs. Whole plant
atgggagcggtgacgtcatcaatggcggcgaagtttgcgtttttcccgccaaatccgccgtcgtacggcgtagaagtggtggaaggaaagctgaggctgattggtgtagagaacgtgaaggagaatgttgaagtattgaagctgaagacgaagagaggtaatcaggtggttgcggcgtatattaagaatcctacagcttcacttacgcttctttattctcatggtaacgccgcggatcttggtcagatgttcgagcttttctccgagcttagcctccatcttcgtgttaacttaattgggtatgattattcgggttatgggagatcttcagggaagcctagtgagcagaacacgtatagcgatatagaagcagtgtatagatgcttggaagagaagtatggtgtgaaggaacaagatgttatcttatatggacaatctgtaggaagcggcccgactttagaattggcttctcggttacctaacctacgagccgtggttcttcatagcgctattgcttccggacttagagtcatgtaccctgttaaacgaacttactggttcgacatttacaagaatgtcgagaagatatcgtttgtcaaatgtccggttttagtaatacacggaacatcagatgatgttgttaattggtctcatgggaagcaattatttgagctatgtaaagaaaaatatgaaccgctttggatcaaaggagggaaccattgtgatttagagttatatccgcaatacataaagcatctaagaaaatttgtatcggcgattgaaaagtcgccgatacttagaaatggaccggtgccactaacagagaaggcaaggagtagtacggatattagagaacctgcaagaccaagcacagatcagagagataaatcaagaacaagcacggatcaaagagagatgccgaagctgagtacagatatagcgagagcaagcgttgataagagggagagaacgagaagaagcgttgatgggactgagaaaccgagtaattccgcggaacagcaactagtacaaccagagaaaggaaggaatagcattgacaggtttggggagatgataagatcagtaggattttgcaacatagattgtttcaagcctacagcaacagctaagtga

SEQ ID NO: 71367 - protein, 377 aa, Arabidopsis thaliana
  peptide (1)..(377): Ceres Seq. ID no. 3096144
  misc_feature (99)..(167): Pfam Name: alpha/beta hydrolase fold Pfam Description: alpha/beta hydrolase fold
  misc_feature (1)..(355): Homolog of NCBI NO: 15230760 NR Description: unknown protein; protein id: At3g30380.1 thaliana] >gi|9294341|dbj|BAB02238.1| contains similarity to
  misc_feature (1)..(361): Homolog of NCBI NO: 15232168 NR Description: unknown protein; protein id: At3g01690.1 thaliana] >gi|6016726|gb|AAF01552.1|AC009325_22 unknown protein thaliana] >gi|6091713|gb|AAF03425.1|AC010797_1 unknown protein
  misc_feature (1)..(353): Homolog of NCBI NO: 15233975 NR Description: putative protein; protein id: At4g24760.1, by cDNA: 121159., supported by cDNA: gi_18175920 [Arabidopsis
  misc_feature (1)..(361): Homolog of NCBI NO: 15241394 NR Description: putative protein; protein id: At5g14390.1, by cDNA: gi_17529313 [Arabidopsis thaliana]
  misc_feature (1)..(328): Homolog of NCBI NO: 10177798 NR Description: emb|CAB87778.1~gene_id:MXA21.9~strong similarity unknown protein [Arabidopsis thaliana] unknown protein [Arabidopsis thaliana]
  misc_feature (40)..(339): Homolog of NCBI NO: 34911338 NR Description: P0519D04.38 [Oryza sativa (japonica
  misc_feature (1)..(33): Homolog of NCBI NO: 34911338 NR Description: P0519D04.38 [Oryza sativa (japonica
  misc_feature (1)..(328): Homolog of NCBI NO: 9802758 NR Description: Hypothetical protein [Arabidopsis thaliana]
  misc_feature (1)..(260): Homolog of NCBI NO: 22330474 NR Description: hypothetical protein; protein id: At1g66900.1, by cDNA: gi_17979070 [Arabidopsis thaliana] unknown protein [Arabidopsis thaliana]
  misc_feature (1)..(320): Homolog of NCBI NO: 25352159 NR Description: F21F23.4 protein - Arabidopsis thaliana Strong similarity to a hypothetical protein F22K18.40 gi|7485972
MGAVTSSMAAKFAFFPPNPPSYGVEVVEGKLRLIGVENVKENVEVLKLKTKRGNQVVAAYIKNPTASLTLLYSHGNAADLGQMFELFSELSLHLRVNLIGYDYSGYGRSSGKPSEQNTYSDIEAVYRCLEEKYGVKEQDVILYGQSVGSGPTLELASRLPNLRAVVLHSAIASGLRVMYPVKRTYWFDIYKNVEKISFVKCPVLVIHGTSDDVVNWSHGKQLFELCKEKYEPLWIKGGNHCDLELYPQYIKHLRKFVSAIEKSPILRNGPVPLTEKARSSTDIREPARPSTDQRDKSRTSTDQREMPKLSTDIARASVDKRERTRRSVDGTEKPSNSAEQQLVQPEKGRNSIDRFGEMIRSVGFCNIDCFKPTATAK

SEQ ID NO: 71368 - protein, 370 aa, Arabidopsis thaliana
  peptide (1)..(370): Ceres Seq. ID no. 3096145
  misc_feature (92)..(160): Pfam Name: alpha/beta hydrolase fold Pfam Description: alpha/beta hydrolase fold
  misc_feature (1)..(348): Homolog of NCBI NO: 15230760 NR Description: unknown protein; protein id: At3g30380.1 thaliana] >gi|9294341|dbj|BAB02238.1| contains similarity to
  misc_feature (1)..(354): Homolog of NCBI NO: 15232168 NR Description: unknown protein; protein id: At3g01690.1 thaliana] >gi|6016726|gb|AAF01552.1|AC009325_22 unknown protein thaliana] >gi|6091713|gb|AAF03425.1|AC010797_1 unknown protein
  misc_feature (1)..(346): Homolog of NCBI NO: 15233975 NR Description: putative protein; protein id: At4g24760.1, by cDNA: 121159., supported by cDNA: gi_18175920 [Arabidopsis
  misc_feature (1)..(354): Homolog of NCBI NO: 15241394 NR Description: putative protein; protein id: At5g14390.1, by cDNA: gi_17529313 [Arabidopsis thaliana]
  misc_feature (1)..(321): Homolog of NCBI NO: 10177798 NR Description: emb|CAB87778.1~gene_id:MXA21.9~strong similarity unknown protein [Arabidopsis thaliana] unknown protein [Arabidopsis thaliana]
  misc_feature (33)..(332): Homolog of NCBI NO: 34911338 NR Description: P0519D04.38 [Oryza sativa (japonica
  misc_feature (1)..(26): Homolog of NCBI NO: 34911338 NR Description: P0519D04.38 [Oryza sativa (japonica
  misc_feature (1)..(321): Homolog of NCBI NO: 9802758 NR Description: Hypothetical protein [Arabidopsis thaliana]
  misc_feature (1)..(253): Homolog of NCBI NO: 22330474 NR Description: hypothetical protein; protein id: At1g66900.1, by cDNA: gi_17979070 [Arabidopsis thaliana] unknown protein [Arabidopsis thaliana]
  misc_feature (1)..(313): Homolog of NCBI NO: 25352159 NR Description: F21F23.4 protein - Arabidopsis thaliana Strong similarity to a hypothetical protein F22K18.40 gi|7485972
MAAKFAFFPPNPPSYGVEVVEGKLRLIGVENVKENVEVLKLKTKRGNQVVAAYIKNPTASLTLLYSHGNAADLGQMFELFSELSLHLRVNLIGYDYSGYGRSSGKPSEQNTYSDIEAVYRCLEEKYGVKEQDVILYGQSVGSGPTLELASRLPNLRAVVLHSAIASGLRVMYPVKRTYWFDIYKNVEKISFVKCPVLVIHGTSDDVVNWSHGKQLFELCKEKYEPLWIKGGNHCDLELYPQYIKHLRKFVSAIEKSPILRNGPVPLTEKARSSTDIREPARPSTDQRDKSRTSTDQREMPKLSTDIARASVDKRERTRRSVDGTEKPSNSAEQQLVQPEKGRNSIDRFGEMIRSVGFCNIDCFKPTATAK

SEQ ID NO: 71369 - protein, 295 aa, Arabidopsis thaliana
  peptide (1)..(295): Ceres Seq. ID no. 3096146
  misc_feature (17)..(85): Pfam Name: alpha/beta hydrolase fold Pfam Description: alpha/beta hydrolase fold
  misc_feature (1)..(273): Homolog of NCBI NO: 15230760 NR Description: unknown protein; protein id: At3g30380.1 thaliana] >gi|9294341|dbj|BAB02238.1| contains similarity to
  misc_feature (1)..(279): Homolog of NCBI NO: 15232168 NR Description: unknown protein; protein id: At3g01690.1 thaliana] >gi|6016726|gb|AAF01552.1|AC009325_22 unknown protein thaliana] >gi|6091713|gb|AAF03425.1|AC010797_1 unknown protein
  misc_feature (1)..(271): Homolog of NCBI NO: 15233975 NR Description: putative protein; protein id: At4g24760.1, by cDNA: 121159., supported by cDNA: gi_18175920 [Arabidopsis
  misc_feature (1)..(279): Homolog of NCBI NO: 15241394 NR Description: putative protein; protein id: At5g14390.1, by cDNA: gi_17529313 [Arabidopsis thaliana]
  misc_feature (1)..(246): Homolog of NCBI NO: 10177798 NR Description: emb|CAB87778.1~gene_id:MXA21.9~strong similarity unknown protein [Arabidopsis thaliana] unknown protein [Arabidopsis thaliana]
  misc_feature (1)..(257): Homolog of NCBI NO: 34911338 NR Description: P0519D04.38 [Oryza sativa (japonica
  misc_feature (1)..(246): Homolog of NCBI NO: 9802758 NR Description: Hypothetical protein [Arabidopsis thaliana]
  misc_feature (1)..(178): Homolog of NCBI NO: 22330474 NR Description: hypothetical protein; protein id: At1g66900.1, by cDNA: gi_17979070 [Arabidopsis thaliana] unknown protein [Arabidopsis thaliana]
  misc_feature (1)..(238): Homolog of NCBI NO: 25352159 NR Description: F21F23.4 protein - Arabidopsis thaliana Strong similarity to a hypothetical protein F22K18.40 gi|7485972
  misc_feature (1)..(194): Homolog of NCBI NO: 28393521 NR Description: unknown protein [Arabidopsis thaliana]
MFELFSELSLHLRVNLIGYDYSGYGRSSGKPSEQNTYSDIEAVYRCLEEKYGVKEQDVILYGQSVGSGPTLELASRLPNLRAVVLHSAIASGLRVMYPVKRTYWFDIYKNVEKISFVKCPVLVIHGTSDDVVNWSHGKQLFELCKEKYEPLWIKGGNHCDLELYPQYIKHLRKFVSAIEKSPILRNGPVPLTEKARSSTDIREPARPSTDQRDKSRTSTDQREMPKLSTDIARASVDKRERTRRSVDGTEKPSNSAEQQLVQPEKGRNSIDRFGEMIRSVGFCNIDCFKPTATAK

SEQ ID NO: 71370 - DNA, 2340 bp, Arabidopsis thaliana
  misc_feature (1)..(2340): Ceres Seq. ID no. 3097868
  misc_feature: MA Experiment ID: 20000439 Result: Up-regulated in Transcription
  misc_feature: MA Experiment 20000439 PARAMETER Experiment Name: At_Roots__P Parameter: Age (day) Value: 14 vs. 21
  misc_feature: MA Experiment 20000439 PARAMETER Experiment Name: At_Roots__P Parameter: Organism Value: A. thaliana
  misc_feature: MA Experiment 20000439 PARAMETER Experiment Name: At_Roots__P Parameter: Tissue Value: Roots vs. Whole Plant
  misc_feature: MA Experiment ID: 20000495 Result: Up-regulated in Transcription
  misc_feature: MA Experiment 20000495 PARAMETER Experiment Name: At_Guard_Cells_P Parameter: Harvest Date Value: 8/2/2002
  misc_feature: MA Experiment 20000495 PARAMETER Experiment Name: At_Guard_Cells_P Parameter: Organism Value: A. thaliana
  misc_feature: MA Experiment 20000495 PARAMETER Experiment Name: At_Guard_Cells_P Parameter: Tissue Value: Guard Cells vs. Leaves
  misc_feature: MA Experiment ID: 20001558 Result: Down-regulated in Transcription
  misc_feature: MA Experiment 20001558 PARAMETER Experiment Name: At_Drought_Soil_Dry_P Parameter: Age (day) Value: 27
  misc_feature: MA Experiment 20001558 PARAMETER Experiment Name: At_Drought_Soil_Dry_P Parameter: Organism Value: A. thaliana
  misc_feature: MA Experiment 20001558 PARAMETER Experiment Name: At_Drought_Soil_Dry_P Parameter: Plant Line Value: WS
  misc_feature: MA Experiment 20001558 PARAMETER Experiment Name: At_Drought_Soil_Dry_P Parameter: Post Timepoint (hr) Value: 6
  misc_feature: MA Experiment 20001558 PARAMETER Experiment Name: At_Drought_Soil_Dry_P Parameter: Post-Treatment Value: Re-Water vs. No Drought
  misc_feature: MA Experiment 20001558 PARAMETER Experiment Name: At_Drought_Soil_Dry_P Parameter: Timepoint (day) Value: 13
  misc_feature: MA Experiment 20001558 PARAMETER Experiment Name: At_Drought_Soil_Dry_P Parameter: Treatment Value: Drought vs. No Drought
  misc_feature: MA Experiment ID: 20001757 Result: Down-regulated in Transcription
  misc_feature: MA Experiment 20001757 PARAMETER Experiment Name: At_50mM_NH4NO3_L-to-H_P Parameter: Timepoint (hr) Value: 6
  misc_feature: MA Experiment 20001757 PARAMETER Experiment Name: At_50mM_NH4NO3_L-to-H_P Parameter: Tissue Value: Leaf
  misc_feature: MA Experiment 20001757 PARAMETER Experiment Name: At_50mM_NH4NO3_L-to-H_P Parameter: Treatment Value: 50mM NH4NO3 vs 100mM Mannitol
  misc_feature: Pfam Name: Ceramidase_alk Pfam Description: Neutral/alkaline non-lysosomal ceramidase
atggagctatctctagtcagattatggaacacttgttttcctagtttcttctacatttcgactgtgctttttctgctcaccggtggaggagtttactctcactctgaatatttgattggattgggaagctatgacattactggcccggctgctgatgttaatatgatgggttatgctaacatggagcaagtagcatctggtattcacttcaggctccgtgctaggactttcattgtctctgagccccaagggaagcgggttgtgtttgttaacctcgatgcttgcatggcttcacaaattgtaaaactaaaagtgatcgagagactcaaggcacgatatggggacttatatactgaacagaatgttggcatcagtggtattcatacccatgctggtccaggggggtatcttcagtatgtggtgtatatcgtaacatcacttggatttgttcgtcagtcgtttgatgcccttgtcgatggaattgagaacagtatcatacaagctcacgaaaatcttcgtcctggatcaatttttctcaataatggggaactcttggatgctggtgtaaaccgcagtccaagtgcatatcttaataatccttcaaaagaaaggagtaaacacaagtacaacgttgataaggaaatgactctcttaaagtttgtggatgatcaatggggtccagtaggtagtttcaattggtttgctacccatggaacttccatgagtcgtacaaactctttgatcagtggggacaacaagggcgctgcatcacgatttatggaggattggtatgaacagaatactgctgaaagatcttactctgaagagtttatttcagatgagatacctagaagagtttcaagcctaatcgagaatcatcaggacagtcatcacgagttgctagagcttgcatcttactttgagtcacaacctggtaagcctgtaactagaatttcaagttctgcaaggcgggtgaggagtgctctgaggaaggcggataagcctggcttcgtttctgctttctgtcaaacgaactgtggagatgttagcccaaatgtgcttggagccttttgcctggacactggtcttccttgtgatttcaatcacagtacatgtggtgggaaaaatgagatgtgctatgggcgtggaccaggctatcctgatgaatttgaaagtacacgtataattggtgagagacaattcaagatggctttggaacttttcaacaaagcatctgaacagctacaagggaaggttgattaccgccatgtttatgttgacttttcacagctcaatgtgacacttcctaaaaaagatgggaaatcagaagttgtaaaaacatgtcctgcggcaatgggctttgctttcgctgctgggaccacagatggaccaggagcatttgattttacacaaggagatgataaggggaaccctttctggagattggtgagaaatgttcttaaaacaccggacaagaaacaaatcgattgtcactatccaaaacctatcttgcttgacactggagaaatgacaaagccatatgactgggctccgtcaattctttcattgcaagttctacgtattggacaacttttcattctcagcgttcctggagaatttacaactatggctggaaggcgtctccgctatgcagtgaaaacacaacttaaaaacagtggtaataaagatttgagcggtgagattcacgttgtgatagctggattggctaatggttactcacagtatgtgactacttttgaggagtatcaagtgcagagatacgagggtgcatctacgttatatgggccacacaccctcagtggctacattcaagagttcaagaaactctccaaatctctcgtccttgatatgcctgttcaaccggggcctcaaccgccggatctccttgacaagcaactaagcttcctcacaccagtcatgatggacacaactcctagcggagacagtttcggggatgttatttcggatgttcctaaaaacttgtctttgaagagaggaaacggccaggtgaccgttgtattccggtcagcctgccctagaaacgatctactgacagaagggacgtttacactggtggagagactagagcagaaggacaagacttggaccccggtttatgacgacgatgatctatgtctgaggttcaagtggtcgaggcataaaaagctgagctcccggagtcaggccactgtggaatggagaattcccgagtctgcatcaccaggggtttataggatcacccattttggtgctgcaaagaagctttttgggtcagtccatcatttcacaggctcttctagtgctttcgttgtaacataa

SEQ ID NO: 71371 - protein, 779 aa, Arabidopsis thaliana
  peptide (1)..(779): Ceres Seq. ID no. 3097869
  misc_feature: Pfam Name: Ceramidase_alk Pfam Description: Neutral/alkaline non-lysosomal ceramidase
  misc_feature (251)..(778): Homolog of NCBI NO: 15237790 NR Description: random slug protein - like; protein id:
  misc_feature (22)..(289): Homolog of NCBI NO: 15237790 NR Description: random slug protein - like; protein id:
  misc_feature (16)..(778): Homolog of NCBI NO: 34912830 NR Description: P0501G01.24 [Oryza sativa (japonica
  misc_feature (250)..(778): Homolog of NCBI NO: 9759229 NR Description: neutral ceramidase [Arabidopsis thaliana]
  misc_feature (108)..(276): Homolog of NCBI NO: 9759229 NR Description: neutral ceramidase [Arabidopsis thaliana]
  misc_feature (22)..(87): Homolog of NCBI NO: 9759229 NR Description: neutral ceramidase [Arabidopsis thaliana]
  misc_feature (119)..(778): Homolog of NCBI NO: 15224424 NR Description: hypothetical protein; protein id: At2g38010.1
  misc_feature (14)..(87): Homolog of NCBI NO: 15224424 NR Description: hypothetical protein; protein id: At2g38010.1
  misc_feature (337)..(778): Homolog of NCBI NO: 2367392 NR Description: random slug cDNA25 protein [Dictyostelium
  misc_feature (35)..(261): Homolog of NCBI NO: 2367392 NR Description: random slug cDNA25 protein [Dictyostelium
MELSLVRLWNTCFPSFFYISTVLFLLTGGGVYSHSEYLIGLGSYDITGPAADVNMMGYANMEQVASGIHFRLRARTFIVSEPQGKRVVFVNLDACMASQIVKLKVIERLKARYGDLYTEQNVGISGIHTHAGPGGYLQYVVYIVTSLGFVRQSFDALVDGIENSIIQAHENLRPGSIFLNNGELLDAGVNRSPSAYLNNPSKERSKHKYNVDKEMTLLKFVDDQWGPVGSFNWFATHGTSMSRTNSLISGDNKGAASRFMEDWYEQNTAERSYSEEFISDEIPRRVSSLIENHQDSHHELLELASYFESQPGKPVTRISSSARRVRSALRKADKPGFVSAFCQTNCGDVSPNVLGAFCLDTGLPCDFNHSTCGGKNEMCYGRGPGYPDEFESTRIIGERQFKMALELFNKASEQLQGKVDYRHVYVDFSQLNVTLPKKDGKSEVVKTCPAAMGFAFAAGTTDGPGAFDFTQGDDKGNPFWRLVRNVLKTPDKKQIDCHYPKPILLDTGEMTKPYDWAPSILSLQVLRIGQLFILSVPGEFTTMAGRRLRYAVKTQLKNSGNKDLSGEIHVVIAGLANGYSQYVTTFEEYQVQRYEGASTLYGPHTLSGYIQEFKKLSKSLVLDMPVQPGPQPPDLLDKQLSFLTPVMMDTTPSGDSFGDVISDVPKNLSLKRGNGQVTVVFRSACPRNDLLTEGTFTLVERLEQKDKTWTPVYDDDDLCLRFKWSRHKKLSSRSQATVEWRIPESASPGVYRITHFGAAKKLFGSVHHFTGSSSAFVVT

SEQ ID NO: 71372 - protein, 725 aa, Arabidopsis thaliana
  peptide (1)..(725): Ceres Seq. ID no. 3097870
  misc_feature: Pfam Name: Ceramidase_alk Pfam Description: Neutral/alkaline non-lysosomal ceramidase
  misc_feature (197)..(724): Homolog of NCBI NO: 15237790 NR Description: random slug protein - like; protein id:
  misc_feature (1)..(235): Homolog of NCBI NO: 15237790 NR Description: random slug protein - like; protein id:
  misc_feature (1)..(724): Homolog of NCBI NO: 34912830 NR Description: P0501G01.24 [Oryza sativa (japonica
  misc_feature (196)..(724): Homolog of NCBI NO: 9759229 NR Description: neutral ceramidase [Arabidopsis thaliana]
  misc_feature (54)..(222): Homolog of NCBI NO: 9759229 NR Description: neutral ceramidase [Arabidopsis thaliana]
  misc_feature (1)..(33): Homolog of NCBI NO: 9759229 NR Description: neutral ceramidase [Arabidopsis thaliana]
  misc_feature (65)..(724): Homolog of NCBI NO: 15224424 NR Description: hypothetical protein; protein id: At2g38010.1
  misc_feature (1)..(33): Homolog of NCBI NO: 15224424 NR Description: hypothetical protein; protein id: At2g38010.1
  misc_feature (283)..(724): Homolog of NCBI NO: 2367392 NR Description: random slug cDNA25 protein [Dictyostelium
  misc_feature (1)..(207): Homolog of NCBI NO: 2367392 NR Description: random slug cDNA25 protein [Dictyostelium
MMGYANMEQVASGIHFRLRARTFIVSEPQGKRVVFVNLDACMASQIVKLKVIERLKARYGDLYTEQNVGISGIHTHAGPGGYLQYVVYIVTSLGFVRQSFDALVDGIENSIIQAHENLRPGSIFLNNGELLDAGVNRSPSAYLNNPSKERSKHKYNVDKEMTLLKFVDDQWGPVGSFNWFATHGTSMSRTNSLISGDNKGAASRFMEDWYEQNTAERSYSEEFISDEIPRRVSSLIENHQDSHHELLELASYFESQPGKPVTRISSSARRVRSALRKADKPGFVSAFCQTNCGDVSPNVLGAFCLDTGLPCDFNHSTCGGKNEMCYGRGPGYPDEFESTRIIGERQFKMALELFNKASEQLQGKVDYRHVYVDFSQLNVTLPKKDGKSEVVKTCPAAMGFAFAAGTTDGPGAFDFTQGDDKGNPFWRLVRNVLKTPDKKQIDCHYPKPILLDTGEMTKPYDWAPSILSLQVLRIGQLFILSVPGEFTTMAGRRLRYAVKTQLKNSGNKDLSGEIHVVIAGLANGYSQYVTTFEEYQVQRYEGASTLYGPHTLSGYIQEFKKLSKSLVLDMPVQPGPQPPDLLDKQLSFLTPVMMDTTPSGDSFGDVISDVPKNLSLKRGNGQVTVVFRSACPRNDLLTEGTFTLVERLEQKDKTWTPVYDDDDLCLRFKWSRHKKLSSRSQATVEWRIPESASPGVYRITHFGAAKKLFGSVHHFTGSSSAFVVT

SEQ ID NO: 71373 - protein, 724 aa, Arabidopsis thaliana
  peptide (1)..(724): Ceres Seq. ID no. 3097871
  misc_feature: Pfam Name: Ceramidase_alk Pfam Description: Neutral/alkaline non-lysosomal ceramidase
  misc_feature (196)..(723): Homolog of NCBI NO: 15237790 NR Description: random slug protein - like; protein id:
  misc_feature (1)..(234): Homolog of NCBI NO: 15237790 NR Description: random slug protein - like; protein id:
  misc_feature (1)..(723): Homolog of NCBI NO: 34912830 NR Description: P0501G01.24 [Oryza sativa (japonica
  misc_feature (195)..(723): Homolog of NCBI NO: 9759229 NR Description: neutral ceramidase [Arabidopsis thaliana]
  misc_feature (53)..(221): Homolog of NCBI NO: 9759229 NR Description: neutral ceramidase [Arabidopsis thaliana]
  misc_feature (1)..(32): Homolog of NCBI NO: 9759229 NR Description: neutral ceramidase [Arabidopsis thaliana]
  misc_feature (64)..(723): Homolog of NCBI NO: 15224424 NR Description: hypothetical protein; protein id: At2g38010.1
  misc_feature (1)..(32): Homolog of NCBI NO: 15224424 NR Description: hypothetical protein; protein id: At2g38010.1
  misc_feature (282)..(723): Homolog of NCBI NO: 2367392 NR Description: random slug cDNA25 protein [Dictyostelium
  misc_feature (1)..(206): Homolog of NCBI NO: 2367392 NR Description: random slug cDNA25 protein [Dictyostelium
MGYANMEQVASGIHFRLRARTFIVSEPQGKRVVFVNLDACMASQIVKLKVIERLKARYGDLYTEQNVGISGIHTHAGPGGYLQYVVYIVTSLGFVRQSFDALVDGIENSIIQAHENLRPGSIFLNNGELLDAGVNRSPSAYLNNPSKERSKHKYNVDKEMTLLKFVDDQWGPVGSFNWFATHGTSMSRTNSLISGDNKGAASRFMEDWYEQNTAERSYSEEFISDEIPRRVSSLIENHQDSHHELLELASYFESQPGKPVTRISSSARRVRSALRKADKPGFVSAFCQTNCGDVSPNVLGAFCLDTGLPCDFNHSTCGGKNEMCYGRGPGYPDEFESTRIIGERQFKMALELFNKASEQLQGKVDYRHVYVDFSQLNVTLPKKDGKSEVVKTCPAAMGFAFAAGTTDGPGAFDFTQGDDKGNPFWRLVRNVLKTPDKKQIDCHYPKPILLDTGEMTKPYDWAPSILSLQVLRIGQLFILSVPGEFTTMAGRRLRYAVKTQLKNSGNKDLSGEIHVVIAGLANGYSQYVTTFEEYQVQRYEGASTLYGPHTLSGYIQEFKKLSKSLVLDMPVQPGPQPPDLLDKQLSFLTPVMMDTTPSGDSFGDVISDVPKNLSLKRGNGQVTVVFRSACPRNDLLTEGTFTLVERLEQKDKTWTPVYDDDDLCLRFKWSRHKKLSSRSQATVEWRIPESASPGVYRITHFGAAKKLFGSVHHFTGSSSAFVVT

SEQ ID NO: 71374 - DNA, 714 bp, Arabidopsis thaliana
  misc_feature (1)..(714): Ceres Seq. ID no. 3098647
  misc_feature: MA Experiment ID: 20000171 Result: Up-regulated in Transcription
  misc_feature: MA Experiment 20000171 PARAMETER Experiment Name: At_42deg_Heat_P Parameter: Age (day) Value: 14
  misc_feature: MA Experiment 20000171 PARAMETER Experiment Name: At_42deg_Heat_P Parameter: Organism Value: A. thaliana
  misc_feature: MA Experiment 20000171 PARAMETER Experiment Name: At_42deg_Heat_P Parameter: Plant Line Value: WS
  misc_feature: MA Experiment 20000171 PARAMETER Experiment Name: At_42deg_Heat_P Parameter: Temperature (deg C) Value: 42 vs. 22
  misc_feature: MA Experiment 20000171 PARAMETER Experiment Name: At_42deg_Heat_P Parameter: Timepoint (hr) Value: 1
  misc_feature: MA Experiment 20000171 PARAMETER Experiment Name: At_42deg_Heat_P Parameter: Tissue Value: Aerial
  misc_feature: MA Experiment ID: 20000185 Result: Up-regulated in Transcription
  misc_feature: MA Experiment 20000185 PARAMETER Experiment Name: At_Roots__P Parameter: Age (day) Value: 7 vs. 21
  misc_feature: MA Experiment 20000185 PARAMETER Experiment Name: At_Roots__P Parameter: Organism Value: A. thaliana
  misc_feature: MA Experiment 20000185 PARAMETER Experiment Name: At_Roots__P Parameter: Tissue Value: Roots vs. Whole Plant
  misc_feature: MA Experiment ID: 20000234 Result: Up-regulated in Transcription
  misc_feature: MA Experiment 20000234 PARAMETER Experiment Name: At_Siliques_P Parameter: Age (day) Value: 21
  misc_feature: MA Experiment 20000234 PARAMETER Experiment Name: At_Siliques_P Parameter: Organism Value: A. thaliana
  misc_feature: MA Experiment 20000234 PARAMETER Experiment Name: At_Siliques_P Parameter: Plant Line Value: WS
  misc_feature: MA Experiment 20000234 PARAMETER Experiment Name: At_Siliques_P Parameter: Tissue Value: Less Than 5mm Siliques vs. Whole Plant
  misc_feature: MA Experiment ID: 20000235 Result: Up-regulated in Transcription
  misc_feature: MA Experiment 20000235 PARAMETER Experiment Name: At_Siliques_P Parameter: Age (day) Value: 21
  misc_feature: MA Experiment 20000235 PARAMETER Experiment Name: At_Siliques_P Parameter: Organism Value: A. thaliana
  misc_feature: MA Experiment 20000235 PARAMETER Experiment Name: At_Siliques_P Parameter: Plant Line Value: WS
  misc_feature: MA Experiment 20000235 PARAMETER Experiment Name: At_Siliques_P Parameter: Tissue Value: 5-10mm Siliques vs. Whole Plant
  misc_feature: MA Experiment ID: 20000439 Result: Up-regulated in Transcription
  misc_feature: MA Experiment 20000439 PARAMETER Experiment Name: At_Roots__P Parameter: Age (day) Value: 14 vs. 21
  misc_feature: MA Experiment 20000439 PARAMETER Experiment Name: At_Roots__P Parameter: Organism Value: A. thaliana
  misc_feature: MA Experiment 20000439 PARAMETER Experiment Name: At_Roots__P Parameter: Tissue Value: Roots vs. Whole Plant
  misc_feature: MA Experiment ID: 20000441 Result: Down-regulated in Transcription
  misc_feature: MA Experiment 20000441 PARAMETER Experiment Name: At_1uM_BR-BRZ__P Parameter: Tissue Value: Shoot Apices
  misc_feature: MA Experiment 20000441 PARAMETER Experiment Name: At_1uM_BR-BRZ__P Parameter: Treatment Value: 1uM BR vs. No Treatment
atgaacgaagagatgagcggtgagtcgccggagaataacaaacacgtaaagaaaccgacgatgccggaaaagatcgattacgtgttcaaggtggtggtcattggagattctgctgtcgggaaaacgcagctcctctcacgttttacacacaacgagttctgttatgattcaaaatcaaccattggtgtcgagtttcagacacggaccatcactcttcggggcaaactcgtcaaagctcagatctgggacaccgccggtcaagagagatacagagcggtgactagcgcctactacagaggtgcgttaggtgcgatggtggtttacgacattaccaaacgcctctcattcgaccacgttgcacgttgggtcgaggaattacgtgctcacgccgatgattccgccgtgatcatgctcgtcggaaacaaagccgatctctccgttggtaaacgtgccgttcctacggaggatgcagtcgaattcgccgagactcaacggctttttttctcggaagtctcggctctaagcggcggaaacgtcgacgaagcttttttccgtttactcgaggagattttcagccgcgttgttgtttcgagaaaagctatggaatccgacggtggagccaccgtgaaacttgacggttcgagaattgatgtcatctctggttcggatcttgagactagtaatatcaaggaacaagcttcgtgctcgtgttga

SEQ ID NO: 71375 - protein, 237 aa, Arabidopsis thaliana
  peptide (1)..(237): Ceres Seq. ID no. 3098648
  misc_feature (30)..(192): Pfam Name: Ras family Pfam Description: Ras family
  misc_feature (1)..(237): Homolog of NCBI NO: 30677910 NR Description: GTP-binding protein, putative [Arabidopsis
  misc_feature (1)..(237): Homolog of NCBI NO: 1370144 NR Description: RAB11B [Lotus japonicus]
  misc_feature (1)..(237): Homolog of NCBI NO: 5926718 NR Description: PRA2 [Pisum sativum]
  misc_feature (21)..(237): Homolog of NCBI NO: 7438429 NR Description: GTP-binding protein - garden pea (fragment)
  misc_feature (23)..(226): Homolog of NCBI NO: 15238852 NR Description: Ras-related GTP-binding protein, putative; id: At5g47960.1, supported by cDNA: gi_12004622 [Arabidopsis
  misc_feature (23)..(220): Homolog of NCBI NO: 15230422 NR Description: ras-related GTP-binding protein, putative;
  misc_feature (23)..(236): Homolog of NCBI NO: 15238392 NR Description: GTP-binding protein, putative; protein id: supported by cDNA: 30437., supported by cDNA: gi_15028288,
  misc_feature (24)..(221): Homolog of NCBI NO: 3024500 NR Description: RAS-RELATED PROTEIN RAB11A
  misc_feature (23)..(216): Homolog of NCBI NO: 3024505 NR Description: RAS-RELATED PROTEIN RAB11D
  misc_feature (20)..(204): Homolog of NCBI NO: 30584069 NR Description: Homo sapiens RAB11A, member RAS oncogene family
MNEEMSGESPENNKHVKKPTMPEKIDYVFKVVVIGDSAVGKTQLLSRFTHNEFCYDSKSTIGVEFQTRTITLRGKLVKAQIWDTAGQERYRAVTSAYYRGALGAMVVYDITKRLSFDHVARWVEELRAHADDSAVIMLVGNKADLSVGKRAVPTEDAVEFAETQRLFFSEVSALSGGNVDEAFFRLLEEIFSRVVVSRKAMESDGGATVKLDGSRIDVISGSDLETSNIKEQASCSC

SEQ ID NO: 71376 - protein, 233 aa, Arabidopsis thaliana
  peptide (1)..(233): Ceres Seq. ID no. 3098649
  misc_feature (26)..(188): Pfam Name: Ras family Pfam Description: Ras family
  misc_feature (1)..(233): Homolog of NCBI NO: 30677910 NR Description: GTP-binding protein, putative [Arabidopsis
  misc_feature (1)..(233): Homolog of NCBI NO: 1370144 NR Description: RAB11B [Lotus japonicus]
  misc_feature (1)..(233): Homolog of NCBI NO: 5926718 NR Description: PRA2 [Pisum sativum]
  misc_feature (17)..(233): Homolog of NCBI NO: 7438429 NR Description: GTP-binding protein - garden pea (fragment)
  misc_feature (19)..(222): Homolog of NCBI NO: 15238852 NR Description: Ras-related GTP-binding protein, putative; id: At5g47960.1, supported by cDNA: gi_12004622 [Arabidopsis
  misc_feature (19)..(216): Homolog of NCBI NO: 15230422 NR Description: ras-related GTP-binding protein, putative;
  misc_feature (19)..(232): Homolog of NCBI NO: 15238392 NR Description: GTP-binding protein, putative; protein id: supported by cDNA: 30437., supported by cDNA: gi_15028288,
  misc_feature (20)..(217): Homolog of NCBI NO: 3024500 NR Description: RAS-RELATED PROTEIN RAB11A
  misc_feature (19)..(212): Homolog of NCBI NO: 3024505 NR Description: RAS-RELATED PROTEIN RAB11D
  misc_feature (16)..(200): Homolog of NCBI NO: 30584069 NR Description: Homo sapiens RAB11A, member RAS oncogene family
MSGESPENNKHVKKPTMPEKIDYVFKVVVIGDSAVGKTQLLSRFTHNEFCYDSKSTIGVEFQTRTITLRGKLVKAQIWDTAGQERYRAVTSAYYRGALGAMVVYDITKRLSFDHVARWVEELRAHADDSAVIMLVGNKADLSVGKRAVPTEDAVEFAETQRLFFSEVSALSGGNVDEAFFRLLEEIFSRVVVSRKAMESDGGATVKLDGSRIDVISGSDLETSNIKEQASCSC

SEQ ID NO: 71377 - protein, 217 aa, Arabidopsis thaliana
  peptide (1)..(217): Ceres Seq. ID no. 3098650
  misc_feature (10)..(172): Pfam Name: Ras family Pfam Description: Ras family
  misc_feature (1)..(217): Homolog of NCBI NO: 30677910 NR Description: GTP-binding protein, putative [Arabidopsis
  misc_feature (1)..(217): Homolog of NCBI NO: 1370144 NR Description: RAB11B [Lotus japonicus]
  misc_feature (1)..(217): Homolog of NCBI NO: 5926718 NR Description: PRA2 [Pisum sativum]
  misc_feature (1)..(217): Homolog of NCBI NO: 7438429 NR Description: GTP-binding protein - garden pea (fragment)
  misc_feature (3)..(206): Homolog of NCBI NO: 15238852 NR Description: Ras-related GTP-binding protein, putative; id: At5g47960.1, supported by cDNA: gi_12004622 [Arabidopsis
  misc_feature (3)..(200): Homolog of NCBI NO: 15230422 NR Description: ras-related GTP-binding protein, putative;
  misc_feature (3)..(216): Homolog of NCBI NO: 15238392 NR Description: GTP-binding protein, putative; protein id: supported by cDNA: 30437., supported by cDNA: gi_15028288,
  misc_feature (4)..(201): Homolog of NCBI NO: 3024500 NR Description: RAS-RELATED PROTEIN RAB11A
  misc_feature (3)..(196): Homolog of NCBI NO: 3024505 NR Description: RAS-RELATED PROTEIN RAB11D
  misc_feature (1)..(184): Homolog of NCBI NO: 30584069 NR Description: Homo sapiens RAB11A, member RAS oncogene family
MPEKIDYVFKVVVIGDSAVGKTQLLSRFTHNEFCYDSKSTIGVEFQTRTITLRGKLVKAQIWDTAGQERYRAVTSAYYRGALGAMVVYDITKRLSFDHVARWVEELRAHADDSAVIMLVGNKADLSVGKRAVPTEDAVEFAETQRLFFSEVSALSGGNVDEAFFRLLEEIFSRVVVSRKAMESDGGATVKLDGSRIDVISGSDLETSNIKEQASCSC

SEQ ID NO: 71378 - DNA, 1122 bp, Arabidopsis thaliana
  misc_feature (1)..(1122): Ceres Seq. ID no. 3100319
  misc_feature: MA Experiment ID: 20000169 Result: Up-regulated in Transcription
  misc_feature: MA Experiment 20000169 PARAMETER Experiment Name: At_100uM_ABA_P Parameter: Age (day) Value: 14
  misc_feature: MA Experiment 20000169 PARAMETER Experiment Name: At_100uM_ABA_P Parameter: Organism Value: A. thaliana
  misc_feature: MA Experiment 20000169 PARAMETER Experiment Name: At_100uM_ABA_P Parameter: Plant Line Value: WS
  misc_feature: MA Experiment 20000169 PARAMETER Experiment Name: At_100uM_ABA_P Parameter: Timepoint (hr) Value: 6
  misc_feature: MA Experiment 20000169 PARAMETER Experiment Name: At_100uM_ABA_P Parameter: Tissue Value: Aerial
  misc_feature: MA Experiment 20000169 PARAMETER Experiment Name: At_100uM_ABA_P Parameter: Treatment Value: 100uM ABA vs. No Treatment
  misc_feature: MA Experiment ID: 20000264 Result: Up-regulated in Transcription
  misc_feature: MA Experiment 20000264 PARAMETER Experiment Name: At_Open_Flower_P Parameter: Age (day) Value: 21
  misc_feature: MA Experiment 20000264 PARAMETER Experiment Name: At_Open_Flower_P Parameter: Plant Line Value: WS
  misc_feature: MA Experiment 20000264 PARAMETER Experiment Name: At_Open_Flower_P Parameter: Tissue Value: Open Flower vs. Whole Plant
  misc_feature: MA Experiment ID: 20000267 Result: Up-regulated in Transcription
  misc_feature: MA Experiment 20000267 PARAMETER Experiment Name: At_Drought_P Parameter: Age (day) Value: 7
  misc_feature: MA Experiment 20000267 PARAMETER Experiment Name: At_Drought_P Parameter: Organism Value: A. thaliana
  misc_feature: MA Experiment 20000267 PARAMETER Experiment Name: At_Drought_P Parameter: Plant Line Value: WS
  misc_feature: MA Experiment 20000267 PARAMETER Experiment Name: At_Drought_P Parameter: Timepoint (hr) Value: 6
  misc_feature: MA Experiment 20000267 PARAMETER Experiment Name: At_Drought_P Parameter: Tissue Value: Whole Plant
  misc_feature: MA Experiment 20000267 PARAMETER Experiment Name: At_Drought_P Parameter: Treatment Value: Drought vs. No Drought
  misc_feature: MA Experiment ID: 20000286 Result: Up-regulated in Transcription
  misc_feature: MA Experiment 20000286 PARAMETER Experiment Name: At_Open_Flower_P Parameter: Age (day) Value: 21
  misc_feature: MA Experiment 20000286 PARAMETER Experiment Name: At_Open_Flower_P Parameter: Plant Line Value: WS
  misc_feature: MA Experiment 20000286 PARAMETER Experiment Name: At_Open_Flower_P Parameter: Tissue Value: Half Open vs. Whole Plant
  misc_feature: MA Experiment ID: 20000436 Result: Up-regulated in Transcription
  misc_feature: MA Experiment 20000436 PARAMETER Experiment Name: At_Drought_P Parameter: Age (day) Value: 7
  misc_feature: MA Experiment 20000436 PARAMETER Experiment Name: At_Drought_P Parameter: Organism Value: A. thaliana
  misc_feature: MA Experiment 20000436 PARAMETER Experiment Name: At_Drought_P Parameter: Plant Line Value: WS
  misc_feature: MA Experiment 20000436 PARAMETER Experiment Name: At_Drought_P Parameter: Timepoint (hr) Value: 12
  misc_feature: MA Experiment 20000436 PARAMETER Experiment Name: At_Drought_P Parameter: Tissue Value: Whole Plant
  misc_feature: MA Experiment 20000436 PARAMETER Experiment Name: At_Drought_P Parameter: Treatment Value: Drought vs. No Drought
  misc_feature: MA Experiment ID: 20000437 Result: Up-regulated in Transcription
  misc_feature: MA Experiment 20000437 PARAMETER Experiment Name: At_Drought_P Parameter: Age (day) Value: 8
  misc_feature: MA Experiment 20000437 PARAMETER Experiment Name: At_Drought_P Parameter: Organism Value: A. thaliana
  misc_feature: MA Experiment 20000437 PARAMETER Experiment Name: At_Drought_P Parameter: Plant Line Value: WS
  misc_feature: MA Experiment 20000437 PARAMETER Experiment Name: At_Drought_P Parameter: Timepoint (hr) Value: 24
  misc_feature: MA Experiment 20000437 PARAMETER Experiment Name: At_Drought_P Parameter: Tissue Value: Whole Plant
  misc_feature: MA Experiment 20000437 PARAMETER Experiment Name: At_Drought_P Parameter: Treatment Value: Drought vs. No Drought
  misc_feature: MA Experiment ID: 20000453 Result: Up-regulated in Transcription
  misc_feature: MA Experiment 20000453 PARAMETER Experiment Name: At_100uM_ABA_P Parameter: Age (day) Value: 15
  misc_feature: MA Experiment 20000453 PARAMETER Experiment Name: At_100uM_ABA_P Parameter: Organism Value: A. thaliana
  misc_feature: MA Experiment 20000453 PARAMETER Experiment Name: At_100uM_ABA_P Parameter: Plant Line Value: WS
  misc_feature: MA Experiment 20000453 PARAMETER Experiment Name: At_100uM_ABA_P Parameter: Timepoint (hr) Value: 24
  misc_feature: MA Experiment 20000453 PARAMETER Experiment Name: At_100uM_ABA_P Parameter: Tissue Value: Aerial
  misc_feature: MA Experiment 20000453 PARAMETER Experiment Name: At_100uM_ABA_P Parameter: Treatment Value: 100uM ABA vs. No Treatment
  misc_feature: MA Experiment ID: 20000794 Result: Up-regulated in Transcription
  misc_feature: MA Experiment 20000794 PARAMETER Experiment Name: At_Petals_P Parameter: Age (day) Value: 23-25 days
  misc_feature: MA Experiment 20000794 PARAMETER Experiment Name: At_Petals_P Parameter: Plant Line Value: WS
  misc_feature: MA Experiment 20000794 PARAMETER Experiment Name: At_Petals_P Parameter: Tissue Value: Petals vs. Whole plant
  misc_feature: MA Experiment ID: 20001247 Result: Up-regulated in Transcription
  misc_feature: MA Experiment 20001247 PARAMETER Experiment Name: At_Far-red-induction_P Parameter: Age (day) Value: 7
  misc_feature: MA Experiment 20001247 PARAMETER Experiment Name: At_Far-red-induction_P Parameter: Light Value: Far-red vs. White
  misc_feature: MA Experiment 20001247 PARAMETER Experiment Name: At_Far-red-induction_P Parameter: Organism Value: A. thaliana
  misc_feature: MA Experiment 20001247 PARAMETER Experiment Name: At_Far-red-induction_P Parameter: Plant Line Value: Columbia
  misc_feature: MA Experiment 20001247 PARAMETER Experiment Name: At_Far-red-induction_P Parameter: Timepoint (hr) Value: 1
  misc_feature: MA Experiment 20001247 PARAMETER Experiment Name: At_Far-red-induction_P Parameter: Tissue Value: Whole Plant
  misc_feature: MA Experiment ID: 20001558 Result: Up-regulated in Transcription
  misc_feature: MA Experiment 20001558 PARAMETER Experiment Name: At_Drought_Soil_Dry_P Parameter: Age (day) Value: 27
  misc_feature: MA Experiment 20001558 PARAMETER Experiment Name: At_Drought_Soil_Dry_P Parameter: Organism Value: A. thaliana
  misc_feature: MA Experiment 20001558 PARAMETER Experiment Name: At_Drought_Soil_Dry_P Parameter: Plant Line Value: WS
  misc_feature: MA Experiment 20001558 PARAMETER Experiment Name: At_Drought_Soil_Dry_P Parameter: Post Timepoint (hr) Value: 6
  misc_feature: MA Experiment 20001558 PARAMETER Experiment Name: At_Drought_Soil_Dry_P Parameter: Post-Treatment Value: Re-Water vs. No Drought
  misc_feature: MA Experiment 20001558 PARAMETER Experiment Name: At_Drought_Soil_Dry_P Parameter: Timepoint (day) Value: 13
  misc_feature: MA Experiment 20001558 PARAMETER Experiment Name: At_Drought_Soil_Dry_P Parameter: Treatment Value: Drought vs. No Drought
  misc_feature: MA Experiment ID: 20001560 Result: Up-regulated in Transcription
  misc_feature: MA Experiment 20001560 PARAMETER Experiment Name: At_Drought_Soil_Dry_P Parameter: Age (day) Value: 28
  misc_feature: MA Experiment 20001560 PARAMETER Experiment Name: At_Drought_Soil_Dry_P Parameter: Organism Value: A. thaliana
  misc_feature: MA Experiment 20001560 PARAMETER Experiment Name: At_Drought_Soil_Dry_P Parameter: Plant Line Value: WS
  misc_feature: MA Experiment 20001560 PARAMETER Experiment Name: At_Drought_Soil_Dry_P Parameter: Post Timepoint (hr) Value: None
  misc_feature: MA Experiment 20001560 PARAMETER Experiment Name: At_Drought_Soil_Dry_P Parameter: Post-Treatment Value: None
  misc_feature: MA Experiment 20001560 PARAMETER Experiment Name: At_Drought_Soil_Dry_P Parameter: Timepoint (day) Value: 14
  misc_feature: MA Experiment 20001560 PARAMETER Experiment Name: At_Drought_Soil_Dry_P Parameter: Treatment Value: Drought vs. No Drought
  misc_feature: MA Experiment ID: 20001904 Result: Up-regulated in Transcription
  misc_feature: MA Experiment 20001904 PARAMETER Experiment Name: At_Drought_Reproduction_P Parameter: Age (day) Value: 37
  misc_feature: MA Experiment 20001904 PARAMETER Experiment Name: At_Drought_Reproduction_P Parameter: Organism Value: A. thaliana
  misc_feature: MA Experiment 20001904 PARAMETER Experiment Name: At_Drought_Reproduction_P Parameter: Plant Line Value: WS
  misc_feature: MA Experiment 20001904 PARAMETER Experiment Name: At_Drought_Reproduction_P Parameter: Timepoint (day) Value: 7
  misc_feature: MA Experiment 20001904 PARAMETER Experiment Name: At_Drought_Reproduction_P Parameter: Tissue Value: Rosettes
  misc_feature: MA Experiment 20001904 PARAMETER Experiment Name: At_Drought_Reproduction_P Parameter: Treatment Value: Drought vs. No Drought
  misc_feature: MA Experiment ID: 20001910 Result: Up-regulated in Transcription
  misc_feature: MA Experiment 20001910 PARAMETER Experiment Name: At_Drought_Reproduction_P Parameter: Age (day) Value: 37
  misc_feature: MA Experiment 20001910 PARAMETER Experiment Name: At_Drought_Reproduction_P Parameter: Organism Value: A. thaliana
  misc_feature: MA Experiment 20001910 PARAMETER Experiment Name: At_Drought_Reproduction_P Parameter: Plant Line Value: WS
  misc_feature: MA Experiment 20001910 PARAMETER Experiment Name: At_Drought_Reproduction_P Parameter: Timepoint (day) Value: 7
  misc_feature: MA Experiment 20001910 PARAMETER Experiment Name: At_Drought_Reproduction_P Parameter: Tissue Value: Flowers
  misc_feature: MA Experiment 20001910 PARAMETER Experiment Name: At_Drought_Reproduction_P Parameter: Treatment Value: Drought vs. No Drought
  misc_feature: Pfam Name: COesterase Pfam Description: Carboxylesterase
atgcagttgtctccggaacgatgccgtccgatgtctgaaaacagagaggcttggtcagcgaattccgaggaaatggagctgcttcacggctccaacagattatcttcaccggaacatgttcgtagaagagtctccgggaattcttctgaggacggttcgcctcgaatttgccggcagcagtcgttcggtcgcgacataggccatgcagctgccgagacgtatctcattactcgacttagcttcaaccttcttggatatctcgggctggatttgtacataccgccaacgagtgatggcctgaagccggttgtagttttcgttactggtggagcttggattatcggttacaaagcttggggttctctcttgggactacagctagcagaaagggacataattgtggcatgtctagattacagaaactttcctcaggggacaattagtgatatggtaagtgatgcagctcaaggaatctcatttgtctgcaataacatctctgcatttggaggtgatcctaacagaatctatctgatggggcaatcggctggtgcacatatctcttcttgtgctctctttgaacaagctattaaagaatcaagaggggagagcatctcatggagtgtatctcagattaaagcttactttggtttatctggagggtacaatctctttaatctggttgaacacttccacaaccgaggcttgtatcgttcaattttcctaagcataatggaaggagaagagtcctttaaacaattctcccctgaagtaagattgaaagacctgaatgtaagaaaagctgcagccctcttacctcatattatactctttcatggatccgcagattattcaattccacctgaagcaagcaaaacttttacagatgctcttcaagctgctgaagtgaaagctgagctagttatgtacaagggtaaaactcataccgacctatttcttcaggatcctctgagaggcggtaaagatgagctatttgatcatatagtctctatgatacacgccgatgacagtgacgcattgagaaacgatgctgttgcgccaccgaggaaacggcttgttccagagttcttgctgaaactggctggcagggtcagccctttttga

SEQ ID NO: 71379 - protein, 373 aa, Arabidopsis thaliana
  peptide (1)..(373): Ceres Seq. ID no. 3100320
  misc_feature: Pfam Name: COesterase Pfam Description: Carboxylesterase
  misc_feature (1)..(373): Homolog of NCBI NO: 15232904 NR Description: hypothetical protein; protein id: At3g02410.1 thaliana] >gi|6957704|gb|AAF32448.1| hypothetical protein
  misc_feature (89)..(373): Homolog of NCBI NO: 22326830 NR Description: Carboxylesterase-like protein; protein id: supported by cDNA: gi_15027944, supported by cDNA: gi_20259180 thaliana] >gi|15027945|gb|AAK76503.1| putative putative
  misc_feature (5)..(89): Homolog of NCBI NO: 22326830 NR Description: Carboxylesterase-like protein; protein id: supported by cDNA: gi_15027944, supported by cDNA: gi_20259180 thaliana] >gi|15027945|gb|AAK76503.1| putative putative
  misc_feature (113)..(373): Homolog of NCBI NO: 11357218 NR Description: Carboxylesterase-like protein - Arabidopsis
  misc_feature (5)..(91): Homolog of NCBI NO: 11357218 NR Description: Carboxylesterase-like protein - Arabidopsis
  misc_feature (74)..(116): Homolog of NCBI NO: 11357218 NR Description: Carboxylesterase-like protein - Arabidopsis
  misc_feature (89)..(373): Homolog of NCBI NO: 22329792 NR Description: hypothetical protein; protein id: At1g26120.1, by cDNA: gi_17979291, supported by cDNA: gi_20259110 [Arabidopsis >gi|17979292|gb|AAL49871.1| unknown protein [Arabidopsis
  misc_feature (47)..(89): Homolog of NCBI NO: 22329792 NR Description: hypothetical protein; protein id: At1g26120.1, by cDNA: gi_17979291, supported by cDNA: gi_20259110 [Arabidopsis >gi|17979292|gb|AAL49871.1| unknown protein [Arabidopsis
  misc_feature (89)..(373): Homolog of NCBI NO: 25518434 NR Description: hypothetical protein F28B23.20 [imported] - thaliana >gi|12320750|gb|AAG50528.1|AC084221_10 hypothetical [Arabidopsis thaliana] >gi|12321166|gb|AAG50668.1|AC079829_1
  misc_feature (47)..(88): Homolog of NCBI NO: 25518434 NR Description: hypothetical protein F28B23.20 [imported] - thaliana >gi|12320750|gb|AAG50528.1|AC084221_10 hypothetical [Arabidopsis thaliana] >gi|12321166|gb|AAG50668.1|AC079829_1
MQLSPERCRPMSENREAWSANSEEMELLHGSNRLSSPEHVRRRVSGNSSEDGSPRICRQQSFGRDIGHAAAETYLITRLSFNLLGYLGLDLYIPPTSDGLKPVVVFVTGGAWIIGYKAWGSLLGLQLAERDIIVACLDYRNFPQGTISDMVSDAAQGISFVCNNISAFGGDPNRIYLMGQSAGAHISSCALFEQAIKESRGESISWSVSQIKAYFGLSGGYNLFNLVEHFHNRGLYRSIFLSIMEGEESFKQFSPEVRLKDLNVRKAAALLPHIILFHGSADYSIPPEASKTFTDALQAAEVKAELVMYKGKTHTDLFLQDPLRGGKDELFDHIVSMIHADDSDALRNDAVAPPRKRLVPEFLLKLAGRVSPF

SEQ ID NO: 71380 - protein, 363 aa, Arabidopsis thaliana
  peptide (1)..(363): Ceres Seq. ID no. 3100321
  misc_feature: Pfam Name: COesterase Pfam Description: Carboxylesterase
  misc_feature (1)..(363): Homolog of NCBI NO: 15232904 NR Description: hypothetical protein; protein id: At3g02410.1 thaliana] >gi|6957704|gb|AAF32448.1| hypothetical protein
  misc_feature (79)..(363): Homolog of NCBI NO: 22326830 NR Description: Carboxylesterase-like protein; protein id: supported by cDNA: gi_15027944, supported by cDNA: gi_20259180 thaliana] >gi|15027945|gb|AAK76503.1| putative putative
  misc_feature (1)..(79): Homolog of NCBI NO: 22326830 NR Description: Carboxylesterase-like protein; protein id: supported by cDNA: gi_15027944, supported by cDNA: gi_20259180 thaliana] >gi|15027945|gb|AAK76503.1| putative putative
  misc_feature (103)..(363): Homolog of NCBI NO: 11357218 NR Description: Carboxylesterase-like protein - Arabidopsis
  misc_feature (1)..(81): Homolog of NCBI NO: 11357218 NR Description: Carboxylesterase-like protein - Arabidopsis
  misc_feature (64)..(106): Homolog of NCBI NO: 11357218 NR Description: Carboxylesterase-like protein - Arabidopsis
  misc_feature (79)..(363): Homolog of NCBI NO: 22329792 NR Description: hypothetical protein; protein id: At1g26120.1, by cDNA: gi_17979291, supported by cDNA: gi_20259110 [Arabidopsis >gi|17979292|gb|AAL49871.1| unknown protein [Arabidopsis
  misc_feature (37)..(79): Homolog of NCBI NO: 22329792 NR Description: hypothetical protein; protein id: At1g26120.1, by cDNA: gi_17979291, supported by cDNA: gi_20259110 [Arabidopsis >gi|17979292|gb|AAL49871.1| unknown protein [Arabidopsis
  misc_feature (79)..(363): Homolog of NCBI NO: 25518434 NR Description: hypothetical protein F28B23.20 [imported] - thaliana >gi|12320750|gb|AAG50528.1|AC084221_10 hypothetical [Arabidopsis thaliana] >gi|12321166|gb|AAG50668.1|AC079829_1
  misc_feature (37)..(78): Homolog of NCBI NO: 25518434 NR Description: hypothetical protein F28B23.20 [imported] - thaliana >gi|12320750|gb|AAG50528.1|AC084221_10 hypothetical [Arabidopsis thaliana] >gi|12321166|gb|AAG50668.1|AC079829_1
MSENREAWSANSEEMELLHGSNRLSSPEHVRRRVSGNSSEDGSPRICRQQSFGRDIGHAAAETYLITRLSFNLLGYLGLDLYIPPTSDGLKPVVVFVTGGAWIIGYKAWGSLLGLQLAERDIIVACLDYRNFPQGTISDMVSDAAQGISFVCNNISAFGGDPNRIYLMGQSAGAHISSCALFEQAIKESRGESISWSVSQIKAYFGLSGGYNLFNLVEHFHNRGLYRSIFLSIMEGEESFKQFSPEVRLKDLNVRKAAALLPHIILFHGSADYSIPPEASKTFTDALQAAEVKAELVMYKGKTHTDLFLQDPLRGGKDELFDHIVSMIHADDSDALRNDAVAPPRKRLVPEFLLKLAGRVSPF

SEQ ID NO: 71381 - protein, 349 aa, Arabidopsis thaliana
  peptide (1)..(349): Ceres Seq. ID no. 3100323
  misc_feature: Pfam Name: COesterase Pfam Description: Carboxylesterase
  misc_feature (1)..(349): Homolog of NCBI NO: 15232904 NR Description: hypothetical protein; protein id: At3g02410.1 thaliana] >gi|6957704|gb|AAF32448.1| hypothetical protein
  misc_feature (65)..(349): Homolog of NCBI NO: 22326830 NR Description: Carboxylesterase-like protein; protein id: supported by cDNA: gi_15027944, supported by cDNA: gi_20259180 thaliana] >gi|15027945|gb|AAK76503.1| putative putative
  misc_feature (1)..(65): Homolog of NCBI NO: 22326830 NR Description: Carboxylesterase-like protein; protein id: supported by cDNA: gi_15027944, supported by cDNA: gi_20259180 thaliana] >gi|15027945|gb|AAK76503.1| putative putative
  misc_feature (89)..(349): Homolog of NCBI NO: 11357218 NR Description: Carboxylesterase-like protein - Arabidopsis
  misc_feature (1)..(67): Homolog of NCBI NO: 11357218 NR Description: Carboxylesterase-like protein - Arabidopsis
  misc_feature (50)..(92): Homolog of NCBI NO: 11357218 NR Description: Carboxylesterase-like protein - Arabidopsis
  misc_feature (65)..(349): Homolog of NCBI NO: 22329792 NR Description: hypothetical protein; protein id: At1g26120.1, by cDNA: gi_17979291, supported by cDNA: gi_20259110 [Arabidopsis >gi|17979292|gb|AAL49871.1| unknown protein [Arabidopsis
  misc_feature (23)..(65): Homolog of NCBI NO: 22329792 NR Description: hypothetical protein; protein id: At1g26120.1, by cDNA: gi_17979291, supported by cDNA: gi_20259110 [Arabidopsis >gi|17979292|gb|AAL49871.1| unknown protein [Arabidopsis
  misc_feature (65)..(349): Homolog of NCBI NO: 25518434 NR Description: hypothetical protein F28B23.20 [imported] - thaliana >gi|12320750|gb|AAG50528.1|AC084221_10 hypothetical [Arabidopsis thaliana] >gi|12321166|gb|AAG50668.1|AC079829_1
  misc_feature (23)..(64): Homolog of NCBI NO: 25518434 NR Description: hypothetical protein F28B23.20 [imported] - thaliana >gi|12320750|gb|AAG50528.1|AC084221_10 hypothetical [Arabidopsis thaliana] >gi|12321166|gb|AAG50668.1|AC079829_1
MELLHGSNRLSSPEHVRRRVSGNSSEDGSPRICRQQSFGRDIGHAAAETYLITRLSFNLLGYLGLDLYIPPTSDGLKPVVVFVTGGAWIIGYKAWGSLLGLQLAERDIIVACLDYRNFPQGTISDMVSDAAQGISFVCNNISAFGGDPNRIYLMGQSAGAHISSCALFEQAIKESRGESISWSVSQIKAYFGLSGGYNLFNLVEHFHNRGLYRSIFLSIMEGEESFKQFSPEVRLKDLNVRKAAALLPHIILFHGSADYSIPPEASKTFTDALQAAEVKAELVMYKGKTHTDLFLQDPLRGGKDELFDHIVSMIHADDSDALRNDAVAPPRKRLVPEFLLKLAGRVSPF

SEQ ID NO: 71382 - DNA, 1719 bp, Arabidopsis thaliana
  misc_feature (1)..(1719): Ceres Seq. ID no. 3441158
  misc_feature: MA Experiment ID: 20000227 Result: Up-regulated in Transcription
  misc_feature: MA Experiment 20000227 PARAMETER Experiment Name: At_Root-Tips-vs-Tops_P Parameter: Tissue Value: Root Tips vs. Root Tops
atgaaactggaagacttacttgtggaagacgaaaccaaagatcaacctggcgctagcgttgcgtctcttcttgatcatcatcgtcgtcacccccagccttcccttcaacaacaaccatcaaaagtgaatgagcataagagcgaagaagagaagaatgatttgatcaagaagaagcaaaagcgaagtcttcaaagagaagtgatgaaaatgcaaggagagctagaggacgaacaagccttaaacaaggctctacgtgatatgcatcgtggtcccgtcatgtctcagcctcgtctctctttattgcttcttcctcctcaggttcaagagctaatagaggagcttgcgacggttgaggcagagatactctgtcttgagaaacgaatccaagacttgaaacttgatgtgtatagtgagaaaaaagagaacaaagaacttgaagacagtattgatgaaggagaagaagagaggatgatgaaccctaagagactactacaaaggcagaatcatcttccttgcgacgctgacaatgaccttataaagatgagatctgaggatctaaaacagagatcaaagtcccagagttatggagatcatcatgttgtcaaggatattcaaatgaacagtccacgtactcatgcgtcaattggatcaaccatggagttctcatcaagaatccattcttcgactttttctgatggaatgtcaagaacacaagagaagaataatgtgcaagagacgacaccaaatggagtatcggaagatctggtgaagtgcttgatgggaatctatctggaactcaacaggtcatcgcgtgagcgagaagggtcaaaaactgtttcaaagctgagcctcacacacctcaagaacgcttctttcaaacgcaaatcggtgtatgaccataacgcatctaatcttgatccatatggagctgtcatggggacttctcttagagacataggagaatacaagaacttcatccatatcactcgaacctccattgatgttagccgtttatccgattgctccacttctcttgtcaatttgagggttttgaaggagaagttgagcaaagtggatttgagtttcttgaaccacaagaaaaagatggcattctggatcaatacctacaacgcctgcgttatgaatggatttttggaacacggactaccttcatcaaaggaaaaactgctgaccattctcaaaatggcaacaattgacgtgggaggtacacaactgtctgctctagatatcgaaggatccatcttgcagagtccatgcgaacctagggaatctgtttcagccggtgaaagcgaagtgagaatacagacacgctacggattcagatgcgtagagccaaacctaatgttcgtgctttgtcgtggagattggtcttcacctgcattgagagtttatacagcagaagatgtggtgaacgaactaatcaaagcaagaacagagtatctagaagcttccatcggtgtctcgggaaggaaaaagattgtgattccgcgattcttgcataaacgtctacgggatttcgctgaggatgaaggctcgttaattgaatggatatgcagccaattaccaccagcccaacgttgctttcagctcaaggaaacagcgatggaggggttgaacaagaaaagtgaatctcaattgaaaaaactgatagaagtgaggtctcacgaatacgagtttcgttatctcttggcattgtaa

SEQ ID NO: 71383 - protein, 572 aa, Arabidopsis thaliana
  peptide (1)..(572): Ceres Seq. ID no. 3441159
  misc_feature (349)..(488): Pfam Name: Protein of unknown function, DUF547 Pfam Description: Protein of unknown function, DUF547
  misc_feature (1)..(572): Homolog of NCBI NO: 9294368 NR Description: gb|AAB97123.1~gene_id:T16H11.2~similar to unknown
  misc_feature (1)..(572): Homolog of NCBI NO: 15230524 NR Description: hypothetical protein; protein id: At3g12540.1
  misc_feature (109)..(572): Homolog of NCBI NO: 15225527 NR Description: hypothetical protein; protein id: At2g39690.1
  misc_feature (53)..(572): Homolog of NCBI NO: 34895788 NR Description: P0434B04.9 [Oryza sativa (japonica
  misc_feature (293)..(572): Homolog of NCBI NO: 31193902 NR Description: unknown protein [Oryza sativa (japonica
  misc_feature (16)..(271): Homolog of NCBI NO: 31193902 NR Description: unknown protein [Oryza sativa (japonica
  misc_feature (153)..(572): Homolog of NCBI NO: 15983811 NR Description: AT5g60720/mup24_130 [Arabidopsis thaliana]
  misc_feature (153)..(572): Homolog of NCBI NO: 30697420 NR Description: expressed protein [Arabidopsis thaliana]
  misc_feature (57)..(141): Homolog of NCBI NO: 15983811 NR Description: AT5g60720/mup24_130 [Arabidopsis thaliana]
  misc_feature (57)..(141): Homolog of NCBI NO: 30697420 NR Description: expressed protein [Arabidopsis thaliana]
MKLEDLLVEDETKDQPGASVASLLDHHRRHPQPSLQQQPSKVNEHKSEEEKNDLIKKKQKRSLQREVMKMQGELEDEQALNKALRDMHRGPVMSQPRLSLLLLPPQVQELIEELATVEAEILCLEKRIQDLKLDVYSEKKENKELEDSIDEGEEERMMNPKRLLQRQNHLPCDADNDLIKMRSEDLKQRSKSQSYGDHHVVKDIQMNSPRTHASIGSTMEFSSRIHSSTFSDGMSRTQEKNNVQETTPNGVSEDLVKCLMGIYLELNRSSREREGSKTVSKLSLTHLKNASFKRKSVYDHNASNLDPYGAVMGTSLRDIGEYKNFIHITRTSIDVSRLSDCSTSLVNLRVLKEKLSKVDLSFLNHKKKMAFWINTYNACVMNGFLEHGLPSSKEKLLTILKMATIDVGGTQLSALDIEGSILQSPCEPRESVSAGESEVRIQTRYGFRCVEPNLMFVLCRGDWSSPALRVYTAEDVVNELIKARTEYLEASIGVSGRKKIVIPRFLHKRLRDFAEDEGSLIEWICSQLPPAQRCFQLKETAMEGLNKKSESQLKKLIEVRSHEYEFRYLLAL

SEQ ID NO: 71384 - protein, 505 aa, Arabidopsis thaliana
  peptide (1)..(505): Ceres Seq. ID no. 3441160
  misc_feature (282)..(421): Pfam Name: Protein of unknown function, DUF547 Pfam Description: Protein of unknown function, DUF547
  misc_feature (1)..(505): Homolog of NCBI NO: 9294368 NR Description: gb|AAB97123.1~gene_id:T16H11.2~similar to unknown
  misc_feature (1)..(505): Homolog of NCBI NO: 15230524 NR Description: hypothetical protein; protein id: At3g12540.1
  misc_feature (42)..(505): Homolog of NCBI NO: 15225527 NR Description: hypothetical protein; protein id: At2g39690.1
  misc_feature (1)..(505): Homolog of NCBI NO: 34895788 NR Description: P0434B04.9 [Oryza sativa (japonica
  misc_feature (226)..(505): Homolog of NCBI NO: 31193902 NR Description: unknown protein [Oryza sativa (japonica
  misc_feature (1)..(204): Homolog of NCBI NO: 31193902 NR Description: unknown protein [Oryza sativa (japonica
  misc_feature (86)..(505): Homolog of NCBI NO: 15983811 NR Description: AT5g60720/mup24_130 [Arabidopsis thaliana]
  misc_feature (86)..(505): Homolog of NCBI NO: 30697420 NR Description: expressed protein [Arabidopsis thaliana]
  misc_feature (1)..(74): Homolog of NCBI NO: 15983811 NR Description: AT5g60720/mup24_130 [Arabidopsis thaliana]
  misc_feature (1)..(74): Homolog of NCBI NO: 30697420 NR Description: expressed protein [Arabidopsis thaliana]
MKMQGELEDEQALNKALRDMHRGPVMSQPRLSLLLLPPQVQELIEELATVEAEILCLEKRIQDLKLDVYSEKKENKELEDSIDEGEEERMMNPKRLLQRQNHLPCDADNDLIKMRSEDLKQRSKSQSYGDHHVVKDIQMNSPRTHASIGSTMEFSSRIHSSTFSDGMSRTQEKNNVQETTPNGVSEDLVKCLMGIYLELNRSSREREGSKTVSKLSLTHLKNASFKRKSVYDHNASNLDPYGAVMGTSLRDIGEYKNFIHITRTSIDVSRLSDCSTSLVNLRVLKEKLSKVDLSFLNHKKKMAFWINTYNACVMNGFLEHGLPSSKEKLLTILKMATIDVGGTQLSALDIEGSILQSPCEPRESVSAGESEVRIQTRYGFRCVEPNLMFVLCRGDWSSPALRVYTAEDVVNELIKARTEYLEASIGVSGRKKIVIPRFLHKRLRDFAEDEGSLIEWICSQLPPAQRCFQLKETAMEGLNKKSESQLKKLIEVRSHEYEFRYLLAL

SEQ ID NO: 71385 - protein, 503 aa, Arabidopsis thaliana
  peptide (1)..(503): Ceres Seq. ID no. 3441161
  misc_feature (280)..(419): Pfam Name: Protein of unknown function, DUF547 Pfam Description: Protein of unknown function, DUF547
  misc_feature (1)..(503): Homolog of NCBI NO: 9294368 NR Description: gb|AAB97123.1~gene_id:T16H11.2~similar to unknown
  misc_feature (1)..(503): Homolog of NCBI NO: 15230524 NR Description: hypothetical protein; protein id: At3g12540.1
  misc_feature (40)..(503): Homolog of NCBI NO: 15225527 NR Description: hypothetical protein; protein id: At2g39690.1
  misc_feature (1)..(503): Homolog of NCBI NO: 34895788 NR Description: P0434B04.9 [Oryza sativa (japonica
  misc_feature (224)..(503): Homolog of NCBI NO: 31193902 NR Description: unknown protein [Oryza sativa (japonica
  misc_feature (1)..(202): Homolog of NCBI NO: 31193902 NR Description: unknown protein [Oryza sativa (japonica
  misc_feature (84)..(503): Homolog of NCBI NO: 15983811 NR Description: AT5g60720/mup24_130 [Arabidopsis thaliana]
  misc_feature (84)..(503): Homolog of NCBI NO: 30697420 NR Description: expressed protein [Arabidopsis thaliana]
  misc_feature (1)..(72): Homolog of NCBI NO: 15983811 NR Description: AT5g60720/mup24_130 [Arabidopsis thaliana]
  misc_feature (1)..(72): Homolog of NCBI NO: 30697420 NR Description: expressed protein [Arabidopsis thaliana]
MQGELEDEQALNKALRDMHRGPVMSQPRLSLLLLPPQVQELIEELATVEAEILCLEKRIQDLKLDVYSEKKENKELEDSIDEGEEERMMNPKRLLQRQNHLPCDADNDLIKMRSEDLKQRSKSQSYGDHHVVKDIQMNSPRTHASIGSTMEFSSRIHSSTFSDGMSRTQEKNNVQETTPNGVSEDLVKCLMGIYLELNRSSREREGSKTVSKLSLTHLKNASFKRKSVYDHNASNLDPYGAVMGTSLRDIGEYKNFIHITRTSIDVSRLSDCSTSLVNLRVLKEKLSKVDLSFLNHKKKMAFWINTYNACVMNGFLEHGLPSSKEKLLTILKMATIDVGGTQLSALDIEGSILQSPCEPRESVSAGESEVRIQTRYGFRCVEPNLMFVLCRGDWSSPALRVYTAEDVVNELIKARTEYLEASIGVSGRKKIVIPRFLHKRLRDFAEDEGSLIEWICSQLPPAQRCFQLKETAMEGLNKKSESQLKKLIEVRSHEYEFRYLLAL

SEQ ID NO: 71386 - DNA, 1467 bp, Arabidopsis thaliana
  misc_feature (1)..(1467): Ceres Seq. ID no. 3441581
  misc_feature: MA Experiment ID: 20000355 Result: Down-regulated in Transcription
  misc_feature: MA Experiment 20000355 PARAMETER Experiment Name: At_Siliques_Sub_P Parameter: Age (day) Value: 21
  misc_feature: MA Experiment 20000355 PARAMETER Experiment Name: At_Siliques_Sub_P Parameter: Organism Value: A. thaliana
  misc_feature: MA Experiment 20000355 PARAMETER Experiment Name: At_Siliques_Sub_P Parameter: Plant Line Value: WS
  misc_feature: MA Experiment 20000355 PARAMETER Experiment Name: At_Siliques_Sub_P Parameter: Tissue Value: Less Than 5mm Siliques vs. Whole Plant
  misc_feature: MA Experiment ID: 20000440 Result: Up-regulated in Transcription
  misc_feature: MA Experiment 20000440 PARAMETER Experiment Name: At_Closed-Flower__Sub_P Parameter: Tissue Value: Closed Flower vs. Whole Plant
atgggatcccgttttgtttctaacgaacaaaaaccacacgtagtttgcgtgccttacccagctcaaggccacattaaccctatgatgaaagtggctaaactcctccacgtcaaaggcttccacgtcaccttcgtcaacaccgtctacaaccacaaccgtctactccgatcccgtggggccaacgcactcgatggacttccttccttccagttcgagtcaatacctgacggtcttccggagactggcgtggacgccacgcaggacatccctgccctttccgagtccacaacgaaaaactgtctcgttccgttcaagaagcttctccagcggattgtcacgagagaggatgtccctccggtgagctgtattgtatcagatggttcgatgagctttactcttgacgtagcggaagagcttggtgttccggagattcatttttggaccactagtgcttgtggcttcatggcttatctacacttttatctcttcatcgagaagggtttatgtccagtaaaagatgcgagttgcttgacgaaggaatacttggacacagttatagattggataccgtcaatgaacaatgtaaaactaaaagacattcctagttttatacgtaccactaatcctaacgacataatgctcaacttcgttgtccgtgaggcatgtcgaaccaaacgtgcctctgctatcattctgaacacgtttgatgaccttgaacatgacataatccagtctatgcaatccattttaccaccggtttatccaatcggaccgcttcatctcttagtaaacagggagattgaagaagatagtgagattggaaggatgggatcaaatctatggaaagaggagactgagtgcttgggatggcttaatactaagtctcgaaatagcgttgtttatgttaactttgggagcataacaataatgaccacggcacagcttttggagtttgcttggggtttggcggcaacgggaaaggagtttctatgggtgatgcggccggattcagtagccggagaggaggcagtgattccaaaagagtttttagcggagacagctgatcgaagaatgctgacaagttggtgtcctcaggagaaagttctttctcatccggcggtcggagggttcttgacccattgcgggtggaattcgacgttagaaagtctttcatgcggagttccaatggtatgttggccattttttgctgagcaacaaacaaattgtaagttttcttgtgatgaatgggaggttggtattgagatcggtggagatgtcaagaggggagaggttgaggcggtggttagagagctcatggatggagagaaaggaaagaaaatgagagagaaggctgtagagtggcggcgcttggccgagaaagctacaaagcttccgtgtggttcgtcggtgataaattttgagacgattgtcaacaaggttctcttgggaaagatccctaacacgtaa

SEQ ID NO: 71387 - protein, 488 aa, Arabidopsis thaliana
  peptide (1)..(488): Ceres Seq. ID no. 3441582
  misc_feature (12)..(484): Pfam Name: UDP-glucoronosyl and UDP-glucosyl transferase Pfam Description: UDP-glucoronosyl and UDP-glucosyl transferase
  misc_feature (1)..(397): Homolog of NCBI NO: 15220950 NR Description: UDP-glucose glucosyltransferase, putative;
  misc_feature (412)..(488): Homolog of NCBI NO: 15220950 NR Description: UDP-glucose glucosyltransferase, putative;
  misc_feature (1)..(484): Homolog of NCBI NO: 15219876 NR Description: UDP-glucose glucosyltransferase, putative; id: At1g22400.1, supported by cDNA: gi_19698984 [Arabidopsis
  misc_feature (1)..(484): Homolog of NCBI NO: 15219870 NR Description: UDP-glucose glucosyltransferase; protein id: supported by cDNA: gi_12083243, supported by cDNA: gi_17065005,
  misc_feature (1)..(484): Homolog of NCBI NO: 17065006 NR Description: UDP-glucose glucosyltransferase [Arabidopsis
  misc_feature (1)..(482): Homolog of NCBI NO: 15219867 NR Description: UDP-glucose glucosyltransferase, putative;
  misc_feature (1)..(484): Homolog of NCBI NO: 25286821 NR Description: T16E15.2 protein - Arabidopsis thaliana
  misc_feature (227)..(482): Homolog of NCBI NO: 25286822 NR Description: hypothetical protein T16E15.4 - Arabidopsis
  misc_feature (1)..(184): Homolog of NCBI NO: 25286822 NR Description: hypothetical protein T16E15.4 - Arabidopsis
  misc_feature (7)..(481): Homolog of NCBI NO: 15218268 NR Description: UDP-glucose glucosyltransferase, putative; id: At1g78270.1, supported by cDNA: gi_20466351 [Arabidopsis >gi|8052539|gb|AAF71803.1|AC013430_12 F3F9.19 [Arabidopsis
MGSRFVSNEQKPHVVCVPYPAQGHINPMMKVAKLLHVKGFHVTFVNTVYNHNRLLRSRGANALDGLPSFQFESIPDGLPETGVDATQDIPALSESTTKNCLVPFKKLLQRIVTREDVPPVSCIVSDGSMSFTLDVAEELGVPEIHFWTTSACGFMAYLHFYLFIEKGLCPVKDASCLTKEYLDTVIDWIPSMNNVKLKDIPSFIRTTNPNDIMLNFVVREACRTKRASAIILNTFDDLEHDIIQSMQSILPPVYPIGPLHLLVNREIEEDSEIGRMGSNLWKEETECLGWLNTKSRNSVVYVNFGSITIMTTAQLLEFAWGLAATGKEFLWVMRPDSVAGEEAVIPKEFLAETADRRMLTSWCPQEKVLSHPAVGGFLTHCGWNSTLESLSCGVPMVCWPFFAEQQTNCKFSCDEWEVGIEIGGDVKRGEVEAVVRELMDGEKGKKMREKAVEWRRLAEKATKLPCGSSVINFETIVNKVLLGKIPNT

SEQ ID NO: 71388 - protein, 461 aa, Arabidopsis thaliana
  peptide (1)..(461): Ceres Seq. ID no. 3441583
  misc_feature (1)..(457): Pfam Name: UDP-glucoronosyl and UDP-glucosyl transferase Pfam Description: UDP-glucoronosyl and UDP-glucosyl transferase
  misc_feature (1)..(370): Homolog of NCBI NO: 15220950 NR Description: UDP-glucose glucosyltransferase, putative;
  misc_feature (385)..(461): Homolog of NCBI NO: 15220950 NR Description: UDP-glucose glucosyltransferase, putative;
  misc_feature (1)..(457): Homolog of NCBI NO: 15219876 NR Description: UDP-glucose glucosyltransferase, putative; id: At1g22400.1, supported by cDNA: gi_19698984 [Arabidopsis
  misc_feature (1)..(457): Homolog of NCBI NO: 15219870 NR Description: UDP-glucose glucosyltransferase; protein id: supported by cDNA: gi_12083243, supported by cDNA: gi_17065005,
  misc_feature (1)..(457): Homolog of NCBI NO: 17065006 NR Description: UDP-glucose glucosyltransferase [Arabidopsis
  misc_feature (1)..(455): Homolog of NCBI NO: 15219867 NR Description: UDP-glucose glucosyltransferase, putative;
  misc_feature (1)..(457): Homolog of NCBI NO: 25286821 NR Description: T16E15.2 protein - Arabidopsis thaliana
  misc_feature (200)..(455): Homolog of NCBI NO: 25286822 NR Description: hypothetical protein T16E15.4 - Arabidopsis
  misc_feature (1)..(157): Homolog of NCBI NO: 25286822 NR Description: hypothetical protein T16E15.4 - Arabidopsis
  misc_feature (1)..(454): Homolog of NCBI NO: 15218268 NR Description: UDP-glucose glucosyltransferase, putative; id: At1g78270.1, supported by cDNA: gi_20466351 [Arabidopsis >gi|8052539|gb|AAF71803.1|AC013430_12 F3F9.19 [Arabidopsis
MMKVAKLLHVKGFHVTFVNTVYNHNRLLRSRGANALDGLPSFQFESIPDGLPETGVDATQDIPALSESTTKNCLVPFKKLLQRIVTREDVPPVSCIVSDGSMSFTLDVAEELGVPEIHFWTTSACGFMAYLHFYLFIEKGLCPVKDASCLTKEYLDTVIDWIPSMNNVKLKDIPSFIRTTNPNDIMLNFVVREACRTKRASAIILNTFDDLEHDIIQSMQSILPPVYPIGPLHLLVNREIEEDSEIGRMGSNLWKEETECLGWLNTKSRNSVVYVNFGSITIMTTAQLLEFAWGLAATGKEFLWVMRPDSVAGEEAVIPKEFLAETADRRMLTSWCPQEKVLSHPAVGGFLTHCGWNSTLESLSCGVPMVCWPFFAEQQTNCKFSCDEWEVGIEIGGDVKRGEVEAVVRELMDGEKGKKMREKAVEWRRLAEKATKLPCGSSVINFETIVNKVLLGKIPNT

SEQ ID NO: 71389 - protein, 460 aa, Arabidopsis thaliana
  peptide (1)..(460): Ceres Seq. ID no. 3441584
  misc_feature (1)..(456): Pfam Name: UDP-glucoronosyl and UDP-glucosyl transferase Pfam Description: UDP-glucoronosyl and UDP-glucosyl transferase
  misc_feature (1)..(369): Homolog of NCBI NO: 15220950 NR Description: UDP-glucose glucosyltransferase, putative;
  misc_feature (384)..(460): Homolog of NCBI NO: 15220950 NR Description: UDP-glucose glucosyltransferase, putative;
  misc_feature (1)..(456): Homolog of NCBI NO: 15219876 NR Description: UDP-glucose glucosyltransferase, putative; id: At1g22400.1, supported by cDNA: gi_19698984 [Arabidopsis
  misc_feature (1)..(456): Homolog of NCBI NO: 15219870 NR Description: UDP-glucose glucosyltransferase; protein id: supported by cDNA: gi_12083243, supported by cDNA: gi_17065005,
  misc_feature (1)..(456): Homolog of NCBI NO: 17065006 NR Description: UDP-glucose glucosyltransferase [Arabidopsis
  misc_feature (1)..(454): Homolog of NCBI NO: 15219867 NR Description: UDP-glucose glucosyltransferase, putative;
  misc_feature (1)..(456): Homolog of NCBI NO: 25286821 NR Description: T16E15.2 protein - Arabidopsis thaliana
  misc_feature (199)..(454): Homolog of NCBI NO: 25286822 NR Description: hypothetical protein T16E15.4 - Arabidopsis
  misc_feature (1)..(156): Homolog of NCBI NO: 25286822 NR Description: hypothetical protein T16E15.4 - Arabidopsis
  misc_feature (1)..(453): Homolog of NCBI NO: 15218268 NR Description: UDP-glucose glucosyltransferase, putative; id: At1g78270.1, supported by cDNA: gi_20466351 [Arabidopsis >gi|8052539|gb|AAF71803.1|AC013430_12 F3F9.19 [Arabidopsis
MKVAKLLHVKGFHVTFVNTVYNHNRLLRSRGANALDGLPSFQFESIPDGLPETGVDATQDIPALSESTTKNCLVPFKKLLQRIVTREDVPPVSCIVSDGSMSFTLDVAEELGVPEIHFWTTSACGFMAYLHFYLFIEKGLCPVKDASCLTKEYLDTVIDWIPSMNNVKLKDIPSFIRTTNPNDIMLNFVVREACRTKRASAIILNTFDDLEHDIIQSMQSILPPVYPIGPLHLLVNREIEEDSEIGRMGSNLWKEETECLGWLNTKSRNSVVYVNFGSITIMTTAQLLEFAWGLAATGKEFLWVMRPDSVAGEEAVIPKEFLAETADRRMLTSWCPQEKVLSHPAVGGFLTHCGWNSTLESLSCGVPMVCWPFFAEQQTNCKFSCDEWEVGIEIGGDVKRGEVEAVVRELMDGEKGKKMREKAVEWRRLAEKATKLPCGSSVINFETIVNKVLLGKIPNT

SEQ ID NO: 71390 - DNA, 876 bp, Arabidopsis thaliana
  misc_feature (1)..(876): Ceres Seq. ID no. 3441601
  misc_feature: MA Experiment ID: 20000307 Result: Up-regulated in Transcription
  misc_feature: MA Experiment 20000307 PARAMETER Experiment Name: At_Germinating_Seeds_Sub_P Parameter: Age (hr) Value: 24 vs. 0
  misc_feature: MA Experiment 20000307 PARAMETER Experiment Name: At_Germinating_Seeds_Sub_P Parameter: Organism Value: A. thaliana
  misc_feature: MA Experiment 20000307 PARAMETER Experiment Name: At_Germinating_Seeds_Sub_P Parameter: Plant Line Value: WS
  misc_feature: MA Experiment 20000307 PARAMETER Experiment Name: At_Germinating_Seeds_Sub_P Parameter: Tissue Value: Germinating Seeds
  misc_feature: MA Experiment ID: 20000328 Result: Down-regulated in Transcription
  misc_feature: MA Experiment 20000328 PARAMETER Experiment Name: At_42deg_Heat_Sub_P Parameter: Age (day) Value: 14
  misc_feature: MA Experiment 20000328 PARAMETER Experiment Name: At_42deg_Heat_Sub_P Parameter: Organism Value: A. thaliana
  misc_feature: MA Experiment 20000328 PARAMETER Experiment Name: At_42deg_Heat_Sub_P Parameter: Plant Line Value: WS
  misc_feature: MA Experiment 20000328 PARAMETER Experiment Name: At_42deg_Heat_Sub_P Parameter: Temperature (deg C) Value: 42 vs. 22
  misc_feature: MA Experiment 20000328 PARAMETER Experiment Name: At_42deg_Heat_Sub_P Parameter: Timepoint (hr) Value: 6
  misc_feature: MA Experiment 20000328 PARAMETER Experiment Name: At_42deg_Heat_Sub_P Parameter: Tissue Value: Aerial
  misc_feature: MA Experiment ID: 20000347 Result: Down-regulated in Transcription
  misc_feature: MA Experiment 20000347 PARAMETER Experiment Name: At_2mM_SA_Sub_P Parameter: Age (day) Value: 14
  misc_feature: MA Experiment 20000347 PARAMETER Experiment Name: At_2mM_SA_Sub_P Parameter: Organism Value: A. thaliana
  misc_feature: MA Experiment 20000347 PARAMETER Experiment Name: At_2mM_SA_Sub_P Parameter: Plant Line Value: WS
  misc_feature: MA Experiment 20000347 PARAMETER Experiment Name: At_2mM_SA_Sub_P Parameter: Timepoint (hr) Value: 6
  misc_feature: MA Experiment 20000347 PARAMETER Experiment Name: At_2mM_SA_Sub_P Parameter: Tissue Value: Aerial
  misc_feature: MA Experiment 20000347 PARAMETER Experiment Name: At_2mM_SA_Sub_P Parameter: Treatment Value: 2mM SA vs. No Treatment
  misc_feature: MA Experiment ID: 20000440 Result: Up-regulated in Transcription
  misc_feature: MA Experiment 20000440 PARAMETER Experiment Name: At_Closed-Flower__Sub_P Parameter: Tissue Value: Closed Flower vs. Whole Plant
atgtctaatacaagctattaccgatcaccgttcggagacacgactcacaccaaagtgtttgtaggaggtttagcatgggagactcccaccgatgaaatgcgccgttactttgatcagttcggagagattcttgaagccgtcatcattaccgataaggctaccggaaaatctaaaggctacggttttgtcacgtttcgagactcggattcagcgacgagagccgtcgctgatccgaatccggtgatcgatggacgaaaggcaaattgcaatattgcgtcttttggacggccccgaccatcgacgcctcgaggacgaggacaaggaggaagccctagtcagtatcaaggcggaggacaatcaagctataccggaatggctgctccggtgcagcaggctgcggctgcccagctcatgtatccgtcatacgggtacacctacaattctgaatatgggtaccaccaagccctatacaacgcacagctccaacaggcacaatactatcaacagcaaatgtacggaggaggaggagcaacatcaccatcatcatccaacatcatgccttccccttattactacctccaagctccaagccctagaccatatcttcatcatcaacaacattatcaatatcaccatcatcagcagcagcagcaacaacaacaacaacgtttaccttctgcttcatcttacctaatttacccatccaatgtcgaggctcctactccatctaatgtccctacttcccaagggccactatcttcttccactgaatcacacgcaccacaacaagtatcagaagaaggtggagaattcgatccaacggatgcacctgaaagtacgactacgaacatcagagacttaacgtcatcttcttga

SEQ ID NO: 71391 - protein, 291 aa, Arabidopsis thaliana
  peptide (1)..(291): Ceres Seq. ID no. 3441602
  misc_feature (19)..(76): Pfam Name: RNA recognition motif. (a.k.a. RRM, RBD, or RNP domain) Pfam Description: RNA recognition motif. (a.k.a. RRM, RBD, or RNP
  misc_feature (1)..(291): Homolog of NCBI NO: 25518109 NR Description: T16E15.6 protein - Arabidopsis thaliana Contains similarity to seb4D protein from Mus musculus gb|X75316
  misc_feature (1)..(290): Homolog of NCBI NO: 18411885 NR Description: RRM-containing protein; protein id: At1g78260.1, by cDNA: 123429. [Arabidopsis thaliana]
  misc_feature (1)..(290): Homolog of NCBI NO: 25405025 NR Description: protein F3F9.20 [imported] - Arabidopsis thaliana
  misc_feature (1)..(144): Homolog of NCBI NO: 18395106 NR Description: RRM-containing protein; protein id: At1g22330.1, by cDNA: 41224. [Arabidopsis thaliana]
  misc_feature (154)..(291): Homolog of NCBI NO: 18395108 NR Description: glycine-rich RNA-binding protein, putative;
  misc_feature (2)..(262): Homolog of NCBI NO: 22330665 NR Description: RRM-containing protein; protein id: At1g76460.1
  misc_feature (2)..(251): Homolog of NCBI NO: 18394923 NR Description: RRM-containing protein; protein id: At1g20880.1,
  misc_feature (2)..(251): Homolog of NCBI NO: 15010636 NR Description: At1g20880/F9H16_14 [Arabidopsis thaliana]
  misc_feature (11)..(194): Homolog of NCBI NO: 34907334 NR Description: P0698A10.29 [Oryza sativa (japonica
  misc_feature (2)..(251): Homolog of NCBI NO: 23505939 NR Description: At1g20880/F9H16_14 [Arabidopsis thaliana]
MSNTSYYRSPFGDTTHTKVFVGGLAWETPTDEMRRYFDQFGEILEAVIITDKATGKSKGYGFVTFRDSDSATRAVADPNPVIDGRKANCNIASFGRPRPSTPRGRGQGGSPSQYQGGGQSSYTGMAAPVQQAAAAQLMYPSYGYTYNSEYGYHQALYNAQLQQAQYYQQQMYGGGGATSPSSSNIMPSPYYYLQAPSPRPYLHHQQHYQYHHHQQQQQQQQQRLPSASSYLIYPSNVEAPTPSNVPTSQGPLSSSTESHAPQQVSEEGGEFDPTDAPESTTTNIRDLTSSS

SEQ ID NO: 71392 - protein, 259 aa, Arabidopsis thaliana
  peptide (1)..(259): Ceres Seq. ID no. 3441603
  misc_feature (1)..(44): Pfam Name: RNA recognition motif. (a.k.a. RRM, RBD, or RNP domain) Pfam Description: RNA recognition motif. (a.k.a. RRM, RBD, or RNP
  misc_feature (1)..(259): Homolog of NCBI NO: 25518109 NR Description: T16E15.6 protein - Arabidopsis thaliana Contains similarity to seb4D protein from Mus musculus gb|X75316
  misc_feature (1)..(258): Homolog of NCBI NO: 18411885 NR Description: RRM-containing protein; protein id: At1g78260.1, by cDNA: 123429. [Arabidopsis thaliana]
  misc_feature (1)..(258): Homolog of NCBI NO: 25405025 NR Description: protein F3F9.20 [imported] - Arabidopsis thaliana
  misc_feature (1)..(112): Homolog of NCBI NO: 18395106 NR Description: RRM-containing protein; protein id: At1g22330.1, by cDNA: 41224. [Arabidopsis thaliana]
  misc_feature (122)..(259): Homolog of NCBI NO: 18395108 NR Description: glycine-rich RNA-binding protein, putative;
  misc_feature (1)..(230): Homolog of NCBI NO: 22330665 NR Description: RRM-containing protein; protein id: At1g76460.1
  misc_feature (1)..(219): Homolog of NCBI NO: 18394923 NR Description: RRM-containing protein; protein id: At1g20880.1,
  misc_feature (1)..(219): Homolog of NCBI NO: 15010636 NR Description: At1g20880/F9H16_14 [Arabidopsis thaliana]
  misc_feature (1)..(162): Homolog of NCBI NO: 34907334 NR Description: P0698A10.29 [Oryza sativa (japonica
  misc_feature (1)..(219): Homolog of NCBI NO: 23505939 NR Description: At1g20880/F9H16_14 [Arabidopsis thaliana]
MRRYFDQFGEILEAVIITDKATGKSKGYGFVTFRDSDSATRAVADPNPVIDGRKANCNIASFGRPRPSTPRGRGQGGSPSQYQGGGQSSYTGMAAPVQQAAAAQLMYPSYGYTYNSEYGYHQALYNAQLQQAQYYQQQMYGGGGATSPSSSNIMPSPYYYLQAPSPRPYLHHQQHYQYHHHQQQQQQQQQRLPSASSYLIYPSNVEAPTPSNVPTSQGPLSSSTESHAPQQVSEEGGEFDPTDAPESTTTNIRDLTSSS

SEQ ID NO: 71393 - protein, 167 aa, Arabidopsis thaliana
  peptide (1)..(167): Ceres Seq. ID no. 3441604
  misc_feature (1)..(167): Homolog of NCBI NO: 25518109 NR Description: T16E15.6 protein - Arabidopsis thaliana Contains similarity to seb4D protein from Mus musculus gb|X75316
  misc_feature (1)..(166): Homolog of NCBI NO: 18411885 NR Description: RRM-containing protein; protein id: At1g78260.1, by cDNA: 123429. [Arabidopsis thaliana]
  misc_feature (1)..(166): Homolog of NCBI NO: 25405025 NR Description: protein F3F9.20 [imported] - Arabidopsis thaliana
  misc_feature (1)..(20): Homolog of NCBI NO: 18395106 NR Description: RRM-containing protein; protein id: At1g22330.1, by cDNA: 41224. [Arabidopsis thaliana]
  misc_feature (30)..(167): Homolog of NCBI NO: 18395108 NR Description: glycine-rich RNA-binding protein, putative;
  misc_feature (1)..(138): Homolog of NCBI NO: 22330665 NR Description: RRM-containing protein; protein id: At1g76460.1
  misc_feature (1)..(127): Homolog of NCBI NO: 18394923 NR Description: RRM-containing protein; protein id: At1g20880.1,
  misc_feature (1)..(127): Homolog of NCBI NO: 15010636 NR Description: At1g20880/F9H16_14 [Arabidopsis thaliana]
  misc_feature (1)..(70): Homolog of NCBI NO: 34907334 NR Description: P0698A10.29 [Oryza sativa (japonica
  misc_feature (1)..(127): Homolog of NCBI NO: 23505939 NR Description: At1g20880/F9H16_14 [Arabidopsis thaliana]
MAAPVQQAAAAQLMYPSYGYTYNSEYGYHQALYNAQLQQAQYYQQQMYGGGGATSPSSSNIMPSPYYYLQAPSPRPYLHHQQHYQYHHHQQQQQQQQQRLPSASSYLIYPSNVEAPTPSNVPTSQGPLSSSTESHAPQQVSEEGGEFDPTDAPESTTTNIRDLTSSS

SEQ ID NO: 71394 - DNA, 1983 bp, Arabidopsis thaliana
  misc_feature (1)..(1983): Ceres Seq. ID no. 3442122
  misc_feature: MA Experiment ID: 20001247 Result: Up-regulated in Transcription
  misc_feature: MA Experiment 20001247 PARAMETER Experiment Name: At_Far-red-induction_P Parameter: Age (day) Value: 7
  misc_feature: MA Experiment 20001247 PARAMETER Experiment Name: At_Far-red-induction_P Parameter: Light Value: Far-red vs. White
  misc_feature: MA Experiment 20001247 PARAMETER Experiment Name: At_Far-red-induction_P Parameter: Organism Value: A. thaliana
  misc_feature: MA Experiment 20001247 PARAMETER Experiment Name: At_Far-red-induction_P Parameter: Plant Line Value: Columbia
  misc_feature: MA Experiment 20001247 PARAMETER Experiment Name: At_Far-red-induction_P Parameter: Timepoint (hr) Value: 1
  misc_feature: MA Experiment 20001247 PARAMETER Experiment Name: At_Far-red-induction_P Parameter: Tissue Value: Whole Plant
atgcgaagattttaccggaagcccttttctgtaccgcttctgaatcgtccgcattgttcttcacaatctcactgtttgtacaaaaatggagactttttgtcggatgattcaaagtgctcgcctttatcgagctcaaggacgagtgttagatgggtgttcaatagcagctcacttcctcctcccgaatggatagaaccttttaacgatgtctccgatttggtgaaatcgaatcgtaatctcctgccgtcgccatgggtaagccaaattctcaaccttttagatggttcggcttctatggaatcgaatctagatggtttctgccgtaagtttcttatcaaactatcgcccaattttgtttcgtttgtgttgaaatccgatgagattcgcgaaaaacctgatattgcttggagtttcttctgttggtctcgtaagcagaagaagtatactcataacctcgagtgttatgtctccttggttgatgtattggctctggcaaaagatgtggatagaattaggtttgtaagcagtgagattaagaaatttgagtttcctatgactgtttctgcggcgaatgctctgattaagagttttgggaagcttggaatggtggaggaattgttgtgggtttggcgtaaaatgaaagagaatgggattgagccgactttgtacacttataactttttgatgaacggtttagtgagcgccatgttcgttgattcggcagagcgtgtttttgaggttatggagagtggcaggatcaaaccagacattgtgacttataacacaatgatcaaaggttattgtaaagcagggcagacacagaaagctatggagaagcttagagatatggagacgagaggtcatgaggctgataagattacgtatatgactatgatccaggcttgttatgcagatagcgactttggttcttgtgtggctttgtatcaagagatggatgagaagggaattcaagtcccgcctcatgcgtttagcttagtgattggtggactttgtaaggaagggaaattgaatgaagggtatactgtttttgagaatatgatacgtaaaggatctaaaccaaatgtagctatatacacggttttgatagatggttatgcgaaaagtggaagtgttgaagacgcgataaggcttttacatagaatgatagacgaagggtttaaacccgatgtggtaacttattctgtcgtagttaatggtttgtgtaaaaacgggagagtggaagaggcattggactatttccatacttgccggtttgacggattggctatcaattcaatgttttattctagtctcattgatggtttaggaaaagcgggcagagtagatgaagccgagaggctttttgaagagatgtctgagaaaggatgcacaagggattcatactgttacaatgcactgatcgatgcgtttacaaagcatcggaaagtcgatgaagcgatagccctgtttaagagaatggaagaagaagaaggttgtgatcaaacggtttatacatacacgatactcttatccggaatgttcaaagaacatagaaacgaggaggcgttaaagctttgggacatgatgatcgataaaggcattacaccaaccgcagcttgcttcagggcgttgtcgactgggctatgtttgtccggaaaagtggcgagagcttgtaagatactggatgagttagcaccaatgggtgtgattcttgatgcagcttgtgaagatatgataaatacattgtgtaaagctggtcggataaaagaagcttgtaaattagctgatgggataacagagagaggaagagaagtgccagggaggatcagaacagtgatgatcaatgcgttgaggaaagtgggaaaagcagatttagcaatgaagctaatgcatagcaaaattgggattggttatgaaagaatgggtagtgttaaaaggcgtgtcaagtttacgactttacttgaaacttgttttgactcttga

SEQ ID NO: 71395 - protein, 660 aa, Arabidopsis thaliana
  peptide (1)..(660): Ceres Seq. ID no. 3442123
  misc_feature (293)..(327): Pfam Name: PPR repeat Pfam Description: PPR repeat
  misc_feature (185)..(655): Homolog of NCBI NO: 34393621 NR Description: putative fertility restorer homologue [Oryza
  misc_feature (58)..(159): Homolog of NCBI NO: 34393621 NR Description: putative fertility restorer homologue [Oryza
  misc_feature (172)..(646): Homolog of NCBI NO: 15218325 NR Description: hypothetical protein; protein id: At1g09900.1
  misc_feature (131)..(619): Homolog of NCBI NO: 15231338 NR Description: hypothetical protein; protein id: At3g06920.1 thaliana] >gi|6728999|gb|AAF26996.1|AC016827_7 hypothetical
  misc_feature (151)..(591): Homolog of NCBI NO: 15236546 NR Description: putative protein; protein id: At4g31850.1
  misc_feature (116)..(619): Homolog of NCBI NO: 33146978 NR Description: putative pentatricopeptide (PPR)
  misc_feature (155)..(638): Homolog of NCBI NO: 15242446 NR Description: putative protein; protein id: At5g39710.1
  misc_feature (155)..(637): Homolog of NCBI NO: 34896698 NR Description: putative pentatricopeptide repeat protein [Oryza
  misc_feature (151)..(638): Homolog of NCBI NO: 15221300 NR Description: hypothetical protein; protein id: At1g74580.1
  misc_feature (158)..(630): Homolog of NCBI NO: 25518293 NR Description: hypothetical protein F13K23.2 - Arabidopsis >gi|8698724|gb|AAF78482.1|AC012187_2 Contains similarity to an protein F16M19.7 gi|6598837 from Arabidopsis thaliana BAC
MRRFYRKPFSVPLLNRPHCSSQSHCLYKNGDFLSDDSKCSPLSSSRTSVRWVFNSSSLPPPEWIEPFNDVSDLVKSNRNLLPSPWVSQILNLLDGSASMESNLDGFCRKFLIKLSPNFVSFVLKSDEIREKPDIAWSFFCWSRKQKKYTHNLECYVSLVDVLALAKDVDRIRFVSSEIKKFEFPMTVSAANALIKSFGKLGMVEELLWVWRKMKENGIEPTLYTYNFLMNGLVSAMFVDSAERVFEVMESGRIKPDIVTYNTMIKGYCKAGQTQKAMEKLRDMETRGHEADKITYMTMIQACYADSDFGSCVALYQEMDEKGIQVPPHAFSLVIGGLCKEGKLNEGYTVFENMIRKGSKPNVAIYTVLIDGYAKSGSVEDAIRLLHRMIDEGFKPDVVTYSVVVNGLCKNGRVEEALDYFHTCRFDGLAINSMFYSSLIDGLGKAGRVDEAERLFEEMSEKGCTRDSYCYNALIDAFTKHRKVDEAIALFKRMEEEEGCDQTVYTYTILLSGMFKEHRNEEALKLWDMMIDKGITPTAACFRALSTGLCLSGKVARACKILDELAPMGVILDAACEDMINTLCKAGRIKEACKLADGITERGREVPGRIRTVMINALRKVGKADLAMKLMHSKIGIGYERMGSVKRRVKFTTLLETCFDS

SEQ ID NO: 71396 - protein, 562 aa, Arabidopsis thaliana
  peptide (1)..(562): Ceres Seq. ID no. 3442124
  misc_feature (195)..(229): Pfam Name: PPR repeat Pfam Description: PPR repeat
  misc_feature (87)..(557): Homolog of NCBI NO: 34393621 NR Description: putative fertility restorer homologue [Oryza
  misc_feature (1)..(61): Homolog of NCBI NO: 34393621 NR Description: putative fertility restorer homologue [Oryza
  misc_feature (74)..(548): Homolog of NCBI NO: 15218325 NR Description: hypothetical protein; protein id: At1g09900.1
  misc_feature (33)..(521): Homolog of NCBI NO: 15231338 NR Description: hypothetical protein; protein id: At3g06920.1 thaliana] >gi|6728999|gb|AAF26996.1|AC016827_7 hypothetical
  misc_feature (53)..(493): Homolog of NCBI NO: 15236546 NR Description: putative protein; protein id: At4g31850.1
  misc_feature (18)..(521): Homolog of NCBI NO: 33146978 NR Description: putative pentatricopeptide (PPR)
  misc_feature (57)..(540): Homolog of NCBI NO: 15242446 NR Description: putative protein; protein id: At5g39710.1
  misc_feature (57)..(539): Homolog of NCBI NO: 34896698 NR Description: putative pentatricopeptide repeat protein [Oryza
  misc_feature (53)..(540): Homolog of NCBI NO: 15221300 NR Description: hypothetical protein; protein id: At1g74580.1
  misc_feature (60)..(532): Homolog of NCBI NO: 25518293 NR Description: hypothetical protein F13K23.2 - Arabidopsis >gi|8698724|gb|AAF78482.1|AC012187_2 Contains similarity to an protein F16M19.7 gi|6598837 from Arabidopsis thaliana BAC
MESNLDGFCRKFLIKLSPNFVSFVLKSDEIREKPDIAWSFFCWSRKQKKYTHNLECYVSLVDVLALAKDVDRIRFVSSEIKKFEFPMTVSAANALIKSFGKLGMVEELLWVWRKMKENGIEPTLYTYNFLMNGLVSAMFVDSAERVFEVMESGRIKPDIVTYNTMIKGYCKAGQTQKAMEKLRDMETRGHEADKITYMTMIQACYADSDFGSCVALYQEMDEKGIQVPPHAFSLVIGGLCKEGKLNEGYTVFENMIRKGSKPNVAIYTVLIDGYAKSGSVEDAIRLLHRMIDEGFKPDVVTYSVVVNGLCKNGRVEEALDYFHTCRFDGLAINSMFYSSLIDGLGKAGRVDEAERLFEEMSEKGCTRDSYCYNALIDAFTKHRKVDEAIALFKRMEEEEGCDQTVYTYTILLSGMFKEHRNEEALKLWDMMIDKGITPTAACFRALSTGLCLSGKVARACKILDELAPMGVILDAACEDMINTLCKAGRIKEACKLADGITERGREVPGRIRTVMINALRKVGKADLAMKLMHSKIGIGYERMGSVKRRVKFTTLLETCFDS

SEQ ID NO: 71397 - protein, 476 aa, Arabidopsis thaliana
  peptide (1)..(476): Ceres Seq. ID no. 3442125
  misc_feature (109)..(143): Pfam Name: PPR repeat Pfam Description: PPR repeat
  misc_feature (1)..(471): Homolog of NCBI NO: 34393621 NR Description: putative fertility restorer homologue [Oryza
  misc_feature (1)..(462): Homolog of NCBI NO: 15218325 NR Description: hypothetical protein; protein id: At1g09900.1
  misc_feature (1)..(435): Homolog of NCBI NO: 15231338 NR Description: hypothetical protein; protein id: At3g06920.1 thaliana] >gi|6728999|gb|AAF26996.1|AC016827_7 hypothetical
  misc_feature (1)..(407): Homolog of NCBI NO: 15236546 NR Description: putative protein; protein id: At4g31850.1
  misc_feature (1)..(435): Homolog of NCBI NO: 33146978 NR Description: putative pentatricopeptide (PPR)
  misc_feature (1)..(454): Homolog of NCBI NO: 15242446 NR Description: putative protein; protein id: At5g39710.1
  misc_feature (1)..(453): Homolog of NCBI NO: 34896698 NR Description: putative pentatricopeptide repeat protein [Oryza
  misc_feature (1)..(454): Homolog of NCBI NO: 15221300 NR Description: hypothetical protein; protein id: At1g74580.1
  misc_feature (1)..(446): Homolog of NCBI NO: 25518293 NR Description: hypothetical protein F13K23.2 - Arabidopsis >gi|8698724|gb|AAF78482.1|AC012187_2 Contains similarity to an protein F16M19.7 gi|6598837 from Arabidopsis thaliana BAC
  misc_feature (1)..(440): Homolog of NCBI NO: 34015356 NR Description: putative fertility restorer [Oryza sativa
MTVSAANALIKSFGKLGMVEELLWVWRKMKENGIEPTLYTYNFLMNGLVSAMFVDSAERVFEVMESGRIKPDIVTYNTMIKGYCKAGQTQKAMEKLRDMETRGHEADKITYMTMIQACYADSDFGSCVALYQEMDEKGIQVPPHAFSLVIGGLCKEGKLNEGYTVFENMIRKGSKPNVAIYTVLIDGYAKSGSVEDAIRLLHRMIDEGFKPDVVTYSVVVNGLCKNGRVEEALDYFHTCRFDGLAINSMFYSSLIDGLGKAGRVDEAERLFEEMSEKGCTRDSYCYNALIDAFTKHRKVDEAIALFKRMEEEEGCDQTVYTYTILLSGMFKEHRNEEALKLWDMMIDKGITPTAACFRALSTGLCLSGKVARACKILDELAPMGVILDAACEDMINTLCKAGRIKEACKLADGITERGREVPGRIRTVMINALRKVGKADLAMKLMHSKIGIGYERMGSVKRRVKFTTLLETCFDS

SEQ ID NO: 71398 - DNA, 798 bp, Arabidopsis thaliana
  misc_feature (1)..(798): Ceres Seq. ID no. 3442135
  misc_feature: MA Experiment ID: 20000227 Result: Down-regulated in Transcription
  misc_feature: MA Experiment 20000227 PARAMETER Experiment Name: At_Root-Tips-vs-Tops_P Parameter: Tissue Value: Root Tips vs. Root Tops
  misc_feature: MA Experiment ID: 20001450 Result: Up-regulated in Transcription
  misc_feature: MA Experiment 20001450 PARAMETER Experiment Name: At_Far-red-induction_P Parameter: Age (day) Value: 7
  misc_feature: MA Experiment 20001450 PARAMETER Experiment Name: At_Far-red-induction_P Parameter: Light Value: Far-red vs. White
  misc_feature: MA Experiment 20001450 PARAMETER Experiment Name: At_Far-red-induction_P Parameter: Organism Value: A. thaliana
  misc_feature: MA Experiment 20001450 PARAMETER Experiment Name: At_Far-red-induction_P Parameter: Plant Line Value: Columbia
  misc_feature: MA Experiment 20001450 PARAMETER Experiment Name: At_Far-red-induction_P Parameter: Timepoint (hr) Value: 8
  misc_feature: MA Experiment 20001450 PARAMETER Experiment Name: At_Far-red-induction_P Parameter: Tissue Value: Whole Plant
atgaagcgtgggaaaggcgagaaaaaggcaacaaagagccgcgatggcagcggtcaagtagttccgctcactgaaccagtggttacagctacgggtatggttggaacaagatcatggataggagggctcttcacacgctccaatagacgtcaagacaaggcagtcgactacactttgtctcctcttcaggaggaaagacttcaaaggctgcaagatcgtatggttgtacctttcgacgagacacgtcctgatcatcaggaatcacttaaagcattgtggaacgtcgcgtttccgaatgttcatctcacgggtttagtaacagaacaatggaaagaaatgggatggcaaggtcccaatccatctaccgatttcaggggttgcggatttatcgctctagaaaatttactattttctgcaagaacttatccggtttgtttccggaggctattgttaaaacaaagaggcgaccgggcaaagtgggagtacccttttgcagtggccggaatcaacatctccttcatgttgatccaaatgctcgatttacaaaataatccaaagccaaaatgtcttccaggaatgaatttcctcaaactcttagaagaagacgagagggcattcgatgtactatactgtatagctttcgcgatgatggatgctcaatggcttgcaatgcacgcttcttacatggaattcaatgaagtattacaagcaactcggaatcagctggagagagagctttctttggatgatattcatcggattcaagatcttcctgcctacaatctcttgttccaatag

SEQ ID NO: 71399 - protein, 265 aa, Arabidopsis thaliana
  peptide (1)..(265): Ceres Seq. ID no. 3442136
  misc_feature (84)..(245): Pfam Name: Protein of unknown function, DUF609 Pfam Description: Protein of unknown function, DUF609
  misc_feature (1)..(265): Homolog of NCBI NO: 15218859 NR Description: hypothetical protein; protein id: At1g03620.1
  misc_feature (1)..(184): Homolog of NCBI NO: 25363286 NR Description: protein F21B7.23 [imported] - Arabidopsis >gi|9280660|gb|AAF86529.1|AC002560_22 F21B7.23 [Arabidopsis
  misc_feature (1)..(124): Homolog of NCBI NO: 7485905 NR Description: hypothetical protein F21B7.12 - Arabidopsis
  misc_feature (33)..(265): Homolog of NCBI NO: 38344760 NR Description: OSJNBa0068L06.3 [Oryza sativa (japonica
  misc_feature (29)..(263): Homolog of NCBI NO: 14140119 NR Description: putative protein [Oryza sativa]
  misc_feature (1)..(263): Homolog of NCBI NO: 38345956 NR Description: OSJNBb0038F03.14 [Oryza sativa (japonica
  misc_feature (59)..(265): Homolog of NCBI NO: 18396599 NR Description: expressed protein; protein id: At3g03610.1, by cDNA: 28199., supported by cDNA: gi_18377968 [Arabidopsis >gi|18377969|gb|AAL67127.1| unknown protein [Arabidopsis
  misc_feature (29)..(265): Homolog of NCBI NO: 18406626 NR Description: expressed protein; protein id: At2g44770.1, by cDNA: 36996., supported by cDNA: gi_15810013, supported by gi_17981658 [Arabidopsis thaliana] >gi|20197031|gb|AAC27479.2|
  misc_feature (59)..(265): Homolog of NCBI NO: 21555509 NR Description: unknown [Arabidopsis thaliana]
  misc_feature (29)..(265): Homolog of NCBI NO: 18411543 NR Description: putative protein; protein id: At3g60260.1, by cDNA: 104796., supported by cDNA: gi_17473881, supported by gi_20148670 [Arabidopsis thaliana] >gi|17473882|gb|AAL38361.1|
MKRGKGEKKATKSRDGSGQVVPLTEPVVTATGMVGTRSWIGGLFTRSNRRQDKAVDYTLSPLQEERLQRLQDRMVVPFDETRPDHQESLKALWNVAFPNVHLTGLVTEQWKEMGWQGPNPSTDFRGCGFIALENLLFSARTYPVCFRRLLLKQRGDRAKWEYPFAVAGINISFMLIQMLDLQNNPKPKCLPGMNFLKLLEEDERAFDVLYCIAFAMMDAQWLAMHASYMEFNEVLQATRNQLERELSLDDIHRIQDLPAYNLLFQ

SEQ ID NO: 71400 - protein, 233 aa, Arabidopsis thaliana
  peptide (1)..(233): Ceres Seq. ID no. 3442137
  misc_feature (52)..(213): Pfam Name: Protein of unknown function, DUF609 Pfam Description: Protein of unknown function, DUF609
  misc_feature (1)..(233): Homolog of NCBI NO: 15218859 NR Description: hypothetical protein; protein id: At1g03620.1
  misc_feature (1)..(152): Homolog of NCBI NO: 25363286 NR Description: protein F21B7.23 [imported] - Arabidopsis >gi|9280660|gb|AAF86529.1|AC002560_22 F21B7.23 [Arabidopsis
  misc_feature (1)..(92): Homolog of NCBI NO: 7485905 NR Description: hypothetical protein F21B7.12 - Arabidopsis
  misc_feature (1)..(233): Homolog of NCBI NO: 38344760 NR Description: OSJNBa0068L06.3 [Oryza sativa (japonica
  misc_feature (1)..(231): Homolog of NCBI NO: 14140119 NR Description: putative protein [Oryza sativa]
  misc_feature (1)..(231): Homolog of NCBI NO: 38345956 NR Description: OSJNBb0038F03.14 [Oryza sativa (japonica
  misc_feature (27)..(233): Homolog of NCBI NO: 18396599 NR Description: expressed protein; protein id: At3g03610.1, by cDNA: 28199., supported by cDNA: gi_18377968 [Arabidopsis >gi|18377969|gb|AAL67127.1| unknown protein [Arabidopsis
  misc_feature (1)..(233): Homolog of NCBI NO: 18406626 NR Description: expressed protein; protein id: At2g44770.1, by cDNA: 36996., supported by cDNA: gi_15810013, supported by gi_17981658 [Arabidopsis thaliana] >gi|20197031|gb|AAC27479.2|
  misc_feature (27)..(233): Homolog of NCBI NO: 21555509 NR Description: unknown [Arabidopsis thaliana]
  misc_feature (1)..(233): Homolog of NCBI NO: 18411543 NR Description: putative protein; protein id: At3g60260.1, by cDNA: 104796., supported by cDNA: gi_17473881, supported by gi_20148670 [Arabidopsis thaliana] >gi|17473882|gb|AAL38361.1|
MVGTRSWIGGLFTRSNRRQDKAVDYTLSPLQEERLQRLQDRMVVPFDETRPDHQESLKALWNVAFPNVHLTGLVTEQWKEMGWQGPNPSTDFRGCGFIALENLLFSARTYPVCFRRLLLKQRGDRAKWEYPFAVAGINISFMLIQMLDLQNNPKPKCLPGMNFLKLLEEDERAFDVLYCIAFAMMDAQWLAMHASYMEFNEVLQATRNQLERELSLDDIHRIQDLPAYNLLFQ

SEQ ID NO: 71401 - protein, 192 aa, Arabidopsis thaliana
  peptide (1)..(192): Ceres Seq. ID no. 3442138
  misc_feature (11)..(172): Pfam Name: Protein of unknown function, DUF609 Pfam Description: Protein of unknown function, DUF609
  misc_feature (1)..(192): Homolog of NCBI NO: 15218859 NR Description: hypothetical protein; protein id: At1g03620.1
  misc_feature (1)..(111): Homolog of NCBI NO: 25363286 NR Description: protein F21B7.23 [imported] - Arabidopsis >gi|9280660|gb|AAF86529.1|AC002560_22 F21B7.23 [Arabidopsis
  misc_feature (1)..(51): Homolog of NCBI NO: 7485905 NR Description: hypothetical protein F21B7.12 - Arabidopsis
  misc_feature (1)..(192): Homolog of NCBI NO: 38344760 NR Description: OSJNBa0068L06.3 [Oryza sativa (japonica
  misc_feature (1)..(190): Homolog of NCBI NO: 14140119 NR Description: putative protein [Oryza sativa]
  misc_feature (1)..(190): Homolog of NCBI NO: 38345956 NR Description: OSJNBb0038F03.14 [Oryza sativa (japonica
  misc_feature (1)..(192): Homolog of NCBI NO: 18396599 NR Description: expressed protein; protein id: At3g03610.1, by cDNA: 28199., supported by cDNA: gi_18377968 [Arabidopsis >gi|18377969|gb|AAL67127.1| unknown protein [Arabidopsis
  misc_feature (1)..(192): Homolog of NCBI NO: 18406626 NR Description: expressed protein; protein id: At2g44770.1, by cDNA: 36996., supported by cDNA: gi_15810013, supported by gi_17981658 [Arabidopsis thaliana] >gi|20197031|gb|AAC27479.2|
  misc_feature (1)..(192): Homolog of NCBI NO: 21555509 NR Description: unknown [Arabidopsis thaliana]
  misc_feature (1)..(192): Homolog of NCBI NO: 18411543 NR Description: putative protein; protein id: At3g60260.1, by cDNA: 104796., supported by cDNA: gi_17473881, supported by gi_20148670 [Arabidopsis thaliana] >gi|17473882|gb|AAL38361.1|
MVVPFDETRPDHQESLKALWNVAFPNVHLTGLVTEQWKEMGWQGPNPSTDFRGCGFIALENLLFSARTYPVCFRRLLLKQRGDRAKWEYPFAVAGINISFMLIQMLDLQNNPKPKCLPGMNFLKLLEEDERAFDVLYCIAFAMMDAQWLAMHASYMEFNEVLQATRNQLERELSLDDIHRIQDLPAYNLLFQ

SEQ ID NO: 71402 - DNA, 1233 bp, Arabidopsis thaliana
  misc_feature (1)..(1233): Ceres Seq. ID no. 3443382
  misc_feature: MA Experiment ID: 20000214 Result: Down-regulated in Transcription
  misc_feature: MA Experiment 20000214 PARAMETER Experiment Name: At_4deg_Cold_P Parameter: Timepoint (hr) Value: 6
  misc_feature: MA Experiment ID: 20000437 Result: Down-regulated in Transcription
  misc_feature: MA Experiment 20000437 PARAMETER Experiment Name: At_Drought_P Parameter: Age (day) Value: 8
  misc_feature: MA Experiment 20000437 PARAMETER Experiment Name: At_Drought_P Parameter: Organism Value: A. thaliana
  misc_feature: MA Experiment 20000437 PARAMETER Experiment Name: At_Drought_P Parameter: Plant Line Value: WS
  misc_feature: MA Experiment 20000437 PARAMETER Experiment Name: At_Drought_P Parameter: Timepoint (hr) Value: 24
  misc_feature: MA Experiment 20000437 PARAMETER Experiment Name: At_Drought_P Parameter: Tissue Value: Whole Plant
  misc_feature: MA Experiment 20000437 PARAMETER Experiment Name: At_Drought_P Parameter: Treatment Value: Drought vs. No Drought
  misc_feature: MA Experiment ID: 20000794 Result: Down-regulated in Transcription
  misc_feature: MA Experiment 20000794 PARAMETER Experiment Name: At_Petals_P Parameter: Age (day) Value: 23-25 days
  misc_feature: MA Experiment 20000794 PARAMETER Experiment Name: At_Petals_P Parameter: Plant Line Value: WS
  misc_feature: MA Experiment 20000794 PARAMETER Experiment Name: At_Petals_P Parameter: Tissue Value: Petals vs. Whole plant
  misc_feature: MA Experiment ID: 20001905 Result: Down-regulated in Transcription
  misc_feature: MA Experiment 20001905 PARAMETER Experiment Name: At_Drought_Reproduction_P Parameter: Age (day) Value: 40
  misc_feature: MA Experiment 20001905 PARAMETER Experiment Name: At_Drought_Reproduction_P Parameter: Organism Value: A. thaliana
  misc_feature: MA Experiment 20001905 PARAMETER Experiment Name: At_Drought_Reproduction_P Parameter: Plant Line Value: WS
  misc_feature: MA Experiment 20001905 PARAMETER Experiment Name: At_Drought_Reproduction_P Parameter: Timepoint (day) Value: 10
  misc_feature: MA Experiment 20001905 PARAMETER Experiment Name: At_Drought_Reproduction_P Parameter: Tissue Value: Rosettes
  misc_feature: MA Experiment 20001905 PARAMETER Experiment Name: At_Drought_Reproduction_P Parameter: Treatment Value: Drought vs. No Drought
atgggcaactgcggtactagagacgaggctgccgtcttcactcctcaagctcaagcccaacagctccagaagaagcactcccgatccgtctcagatctgagcgatccatccactcctcgcttccgagacgactctcgcactcctatttcgtatgcccaagtcatcccctttactttgtttgagcttgagaccatcaccaagagcttccgcccagattatatactcggagaaggtggtttcggtaccgtctacaagggttacattgatgacaatctccgcgtcggcctcaagtctctccctgttgccgtcaaggtccttaacaaggagggactccagggtcaccgtgaatggcttacagaggtcaacttcctcggccaactccgtcatcccaacctcgtcaagcttattggttactgctgcgaggacgatcaccgattacttgtttatgagttcatgctgcgaggcagtcttgagaatcacctatttcgaagtaatccccgcacccttctccattttttgaagatgatgattgctcttggagctgcgaaaggccttgctttcctccacaatgctgaaagaccggttatttatagggatttcaagacttccaatatactgcttgactccgactacaccgccaagctttcagattttggcttagctaaagctggaccccagggtgatgaaacccatgtatcaactcgagttatgggtacttatggctatgctgccccagaatatgtgatgactggacacttgacggccagaagtgatgtatacagctttggagttgttcttctagagatgttgacaggaagaaaatcagtggataagacaagacctagcaaagagcagaacttggttgattgggctcggccaaagctgaatgataaaagaaaactgctgcagataattgacccaagactggagaaccaatactctgtcagggcagctcagaaggcatgcagcttggcgtattattgtcttagccagaacccgaaagctaggccattgatgagcgatgtggttgagactttggaacctttgcagtgtactggtgatgccctgatcccttgtgcaactactacagctggagctgcatttgcaatgggaggggtgcctgattacagaatgcaccggaggtttgcaaagaacgttgggccaggtgcaatttgccggtcacccaatccaaattattcaccgggtggacctgcagcatgcagagttcggtga

SEQ ID NO: 71403 - protein, 410 aa, Arabidopsis thaliana
  peptide (1)..(410): Ceres Seq. ID no. 3443383
  misc_feature (69)..(346): Pfam Name: Protein kinase domain Pfam Description: Protein kinase domain
  misc_feature (1)..(410): Homolog of NCBI NO: 9542860 NR Description: protein kinase-like protein [Arabidopsis thaliana]
  misc_feature (1)..(410): Homolog of NCBI NO: 30679085 NR Description: protein kinase family [Arabidopsis thaliana]
  misc_feature (15)..(363): Homolog of NCBI NO: 15225019 NR Description: putative protein kinase; protein id: At2g05940.1, by cDNA: gi_15810412, supported by cDNA: gi_21280976 [Arabidopsis >gi|25287639|pir||C84473 probable protein kinase putative protein
  misc_feature (9)..(355): Homolog of NCBI NO: 22325532 NR Description: putative protein kinase; protein id: At2g07180.1, by cDNA: gi_19423981 [Arabidopsis thaliana]
  misc_feature (9)..(355): Homolog of NCBI NO: 25287636 NR Description: probable protein kinase [imported] - Arabidopsis >gi|3805765|gb|AAC69121.1| putative protein kinase [Arabidopsis
  misc_feature (15)..(350): Homolog of NCBI NO: 30013675 NR Description: Avr9/Cf-9 rapidly elicited protein 264 [Nicotiana
  misc_feature (9)..(355): Homolog of NCBI NO: 19423982 NR Description: putative protein kinase [Arabidopsis thaliana]
  misc_feature (1)..(358): Homolog of NCBI NO: 15241220 NR Description: protein kinase-like protein; protein id:
  misc_feature (109)..(354): Homolog of NCBI NO: 27436752 NR Description: Putative serine/threonine protein kinase [Oryza
  misc_feature (17)..(118): Homolog of NCBI NO: 27436752 NR Description: Putative serine/threonine protein kinase [Oryza
MGNCGTRDEAAVFTPQAQAQQLQKKHSRSVSDLSDPSTPRFRDDSRTPISYAQVIPFTLFELETITKSFRPDYILGEGGFGTVYKGYIDDNLRVGLKSLPVAVKVLNKEGLQGHREWLTEVNFLGQLRHPNLVKLIGYCCEDDHRLLVYEFMLRGSLENHLFRSNPRTLLHFLKMMIALGAAKGLAFLHNAERPVIYRDFKTSNILLDSDYTAKLSDFGLAKAGPQGDETHVSTRVMGTYGYAAPEYVMTGHLTARSDVYSFGVVLLEMLTGRKSVDKTRPSKEQNLVDWARPKLNDKRKLLQIIDPRLENQYSVRAAQKACSLAYYCLSQNPKARPLMSDVVETLEPLQCTGDALIPCATTTAGAAFAMGGVPDYRMHRRFAKNVGPGAICRSPNPNYSPGGPAACRVR

SEQ ID NO: 71404 - protein, 259 aa, Arabidopsis thaliana
  peptide (1)..(259): Ceres Seq. ID no. 3443384
  misc_feature (1)..(195): Pfam Name: Protein kinase domain Pfam Description: Protein kinase domain
  misc_feature (1)..(212): Homolog of NCBI NO: 15225019 NR Description: putative protein kinase; protein id: At2g05940.1, by cDNA: gi_15810412, supported by cDNA: gi_21280976 [Arabidopsis >gi|25287639|pir||C84473 probable protein kinase putative protein
  misc_feature (1)..(204): Homolog of NCBI NO: 22325532 NR Description: putative protein kinase; protein id: At2g07180.1, by cDNA: gi_19423981 [Arabidopsis thaliana]
  misc_feature (1)..(204): Homolog of NCBI NO: 25287636 NR Description: probable protein kinase [imported] - Arabidopsis >gi|3805765|gb|AAC69121.1| putative protein kinase [Arabidopsis
  misc_feature (1)..(199): Homolog of NCBI NO: 30013675 NR Description: Avr9/Cf-9 rapidly elicited protein 264 [Nicotiana
  misc_feature (1)..(259): Homolog of NCBI NO: 9542860 NR Description: protein kinase-like protein [Arabidopsis thaliana]
  misc_feature (1)..(259): Homolog of NCBI NO: 30679085 NR Description: protein kinase family [Arabidopsis thaliana]
  misc_feature (1)..(204): Homolog of NCBI NO: 19423982 NR Description: putative protein kinase [Arabidopsis thaliana]
  misc_feature (1)..(207): Homolog of NCBI NO: 15241220 NR Description: protein kinase-like protein; protein id:
  misc_feature (1)..(203): Homolog of NCBI NO: 27436752 NR Description: Putative serine/threonine protein kinase [Oryza
  misc_feature (1)..(199): Homolog of NCBI NO: 22773239 NR Description: Putative protein kinase [Oryza sativa (japonica
MLRGSLENHLFRSNPRTLLHFLKMMIALGAAKGLAFLHNAERPVIYRDFKTSNILLDSDYTAKLSDFGLAKAGPQGDETHVSTRVMGTYGYAAPEYVMTGHLTARSDVYSFGVVLLEMLTGRKSVDKTRPSKEQNLVDWARPKLNDKRKLLQIIDPRLENQYSVRAAQKACSLAYYCLSQNPKARPLMSDVVETLEPLQCTGDALIPCATTTAGAAFAMGGVPDYRMHRRFAKNVGPGAICRSPNPNYSPGGPAACRVR

SEQ ID NO: 71405 - protein, 236 aa, Arabidopsis thaliana
  peptide (1)..(236): Ceres Seq. ID no. 3443385
  misc_feature (1)..(172): Pfam Name: Protein kinase domain Pfam Description: Protein kinase domain
  misc_feature (1)..(236): Homolog of NCBI NO: 9542860 NR Description: protein kinase-like protein [Arabidopsis thaliana]
  misc_feature (1)..(236): Homolog of NCBI NO: 30679085 NR Description: protein kinase family [Arabidopsis thaliana]
  misc_feature (1)..(189): Homolog of NCBI NO: 15225019 NR Description: putative protein kinase; protein id: At2g05940.1, by cDNA: gi_15810412, supported by cDNA: gi_21280976 [Arabidopsis >gi|25287639|pir||C84473 probable protein kinase putative protein
  misc_feature (1)..(181): Homolog of NCBI NO: 22325532 NR Description: putative protein kinase; protein id: At2g07180.1, by cDNA: gi_19423981 [Arabidopsis thaliana]
  misc_feature (1)..(181): Homolog of NCBI NO: 25287636 NR Description: probable protein kinase [imported] - Arabidopsis >gi|3805765|gb|AAC69121.1| putative protein kinase [Arabidopsis
  misc_feature (1)..(176): Homolog of NCBI NO: 30013675 NR Description: Avr9/Cf-9 rapidly elicited protein 264 [Nicotiana
  misc_feature (1)..(181): Homolog of NCBI NO: 19423982 NR Description: putative protein kinase [Arabidopsis thaliana]
  misc_feature (1)..(184): Homolog of NCBI NO: 15241220 NR Description: protein kinase-like protein; protein id:
  misc_feature (1)..(180): Homolog of NCBI NO: 27436752 NR Description: Putative serine/threonine protein kinase [Oryza
  misc_feature (1)..(176): Homolog of NCBI NO: 22773239 NR Description: Putative protein kinase [Oryza sativa (japonica
MMIALGAAKGLAFLHNAERPVIYRDFKTSNILLDSDYTAKLSDFGLAKAGPQGDETHVSTRVMGTYGYAAPEYVMTGHLTARSDVYSFGVVLLEMLTGRKSVDKTRPSKEQNLVDWARPKLNDKRKLLQIIDPRLENQYSVRAAQKACSLAYYCLSQNPKARPLMSDVVETLEPLQCTGDALIPCATTTAGAAFAMGGVPDYRMHRRFAKNVGPGAICRSPNPNYSPGGPAACRVR

SEQ ID NO: 71406 - DNA, 1593 bp, Arabidopsis thaliana
  misc_feature (1)..(1593): Ceres Seq. ID no. 3444981
  misc_feature: MA Experiment ID: 20000166 Result: Up-regulated in Transcription
  misc_feature: MA Experiment 20000166 PARAMETER Experiment Name: At_100uM_ABA_P Parameter: Age (day) Value: 14
  misc_feature: MA Experiment 20000166 PARAMETER Experiment Name: At_100uM_ABA_P Parameter: Organism Value: A. thaliana
  misc_feature: MA Experiment 20000166 PARAMETER Experiment Name: At_100uM_ABA_P Parameter: Plant Line Value: WS
  misc_feature: MA Experiment 20000166 PARAMETER Experiment Name: At_100uM_ABA_P Parameter: Timepoint (hr) Value: 1
  misc_feature: MA Experiment 20000166 PARAMETER Experiment Name: At_100uM_ABA_P Parameter: Tissue Value: Aerial
  misc_feature: MA Experiment 20000166 PARAMETER Experiment Name: At_100uM_ABA_P Parameter: Treatment Value: 100uM ABA vs. No Treatment
  misc_feature: MA Experiment ID: 20000171 Result: Down-regulated in Transcription
  misc_feature: MA Experiment 20000171 PARAMETER Experiment Name: At_42deg_Heat_P Parameter: Age (day) Value: 14
  misc_feature: MA Experiment 20000171 PARAMETER Experiment Name: At_42deg_Heat_P Parameter: Organism Value: A. thaliana
  misc_feature: MA Experiment 20000171 PARAMETER Experiment Name: At_42deg_Heat_P Parameter: Plant Line Value: WS
  misc_feature: MA Experiment 20000171 PARAMETER Experiment Name: At_42deg_Heat_P Parameter: Temperature (deg C) Value: 42 vs. 22
  misc_feature: MA Experiment 20000171 PARAMETER Experiment Name: At_42deg_Heat_P Parameter: Timepoint (hr) Value: 1
  misc_feature: MA Experiment 20000171 PARAMETER Experiment Name: At_42deg_Heat_P Parameter: Tissue Value: Aerial
  misc_feature: MA Experiment ID: 20000173 Result: Down-regulated in Transcription
  misc_feature: MA Experiment 20000173 PARAMETER Experiment Name: At_42deg_Heat_P Parameter: Age (day) Value: 14
  misc_feature: MA Experiment 20000173 PARAMETER Experiment Name: At_42deg_Heat_P Parameter: Organism Value: A. thaliana
  misc_feature: MA Experiment 20000173 PARAMETER Experiment Name: At_42deg_Heat_P Parameter: Plant Line Value: WS
  misc_feature: MA Experiment 20000173 PARAMETER Experiment Name: At_42deg_Heat_P Parameter: Temperature (deg C) Value: 42 vs. 22
  misc_feature: MA Experiment 20000173 PARAMETER Experiment Name: At_42deg_Heat_P Parameter: Timepoint (hr) Value: 6
  misc_feature: MA Experiment 20000173 PARAMETER Experiment Name: At_42deg_Heat_P Parameter: Tissue Value: Aerial
  misc_feature: MA Experiment ID: 20000185 Result: Up-regulated in Transcription
  misc_feature: MA Experiment 20000185 PARAMETER Experiment Name: At_Roots__P Parameter: Age (day) Value: 7 vs. 21
  misc_feature: MA Experiment 20000185 PARAMETER Experiment Name: At_Roots__P Parameter: Organism Value: A. thaliana
  misc_feature: MA Experiment 20000185 PARAMETER Experiment Name: At_Roots__P Parameter: Tissue Value: Roots vs. Whole Plant
  misc_feature: MA Experiment ID: 20000265 Result: Up-regulated in Transcription
  misc_feature: MA Experiment 20000265 PARAMETER Experiment Name: At_Open_Flower_P Parameter: Age (day) Value: 21
  misc_feature: MA Experiment 20000265 PARAMETER Experiment Name: At_Open_Flower_P Parameter: Plant Line Value: WS
  misc_feature: MA Experiment 20000265 PARAMETER Experiment Name: At_Open_Flower_P Parameter: Tissue Value: Closed Flower vs. Whole Plant
  misc_feature: MA Experiment ID: 20000286 Result: Up-regulated in Transcription
  misc_feature: MA Experiment 20000286 PARAMETER Experiment Name: At_Open_Flower_P Parameter: Age (day) Value: 21
  misc_feature: MA Experiment 20000286 PARAMETER Experiment Name: At_Open_Flower_P Parameter: Plant Line Value: WS
  misc_feature: MA Experiment 20000286 PARAMETER Experiment Name: At_Open_Flower_P Parameter: Tissue Value: Half Open vs. Whole Plant
  misc_feature: MA Experiment ID: 20000439 Result: Up-regulated in Transcription
  misc_feature: MA Experiment 20000439 PARAMETER Experiment Name: At_Roots__P Parameter: Age (day) Value: 14 vs. 21
  misc_feature: MA Experiment 20000439 PARAMETER Experiment Name: At_Roots__P Parameter: Organism Value: A. thaliana
  misc_feature: MA Experiment 20000439 PARAMETER Experiment Name: At_Roots__P Parameter: Tissue Value: Roots vs. Whole Plant
  misc_feature: MA Experiment ID: 20001247 Result: Up-regulated in Transcription
  misc_feature: MA Experiment 20001247 PARAMETER Experiment Name: At_Far-red-induction_P Parameter: Age (day) Value: 7
  misc_feature: MA Experiment 20001247 PARAMETER Experiment Name: At_Far-red-induction_P Parameter: Light Value: Far-red vs. White
  misc_feature: MA Experiment 20001247 PARAMETER Experiment Name: At_Far-red-induction_P Parameter: Organism Value: A. thaliana
  misc_feature: MA Experiment 20001247 PARAMETER Experiment Name: At_Far-red-induction_P Parameter: Plant Line Value: Columbia
  misc_feature: MA Experiment 20001247 PARAMETER Experiment Name: At_Far-red-induction_P Parameter: Timepoint (hr) Value: 1
  misc_feature: MA Experiment 20001247 PARAMETER Experiment Name: At_Far-red-induction_P Parameter: Tissue Value: Whole Plant
  misc_feature: MA Experiment ID: 20001248 Result: Up-regulated in Transcription
  misc_feature: MA Experiment 20001248 PARAMETER Experiment Name: At_Far-red-induction_P Parameter: Age (day) Value: 7
  misc_feature: MA Experiment 20001248 PARAMETER Experiment Name: At_Far-red-induction_P Parameter: Light Value: Far-red vs. White
  misc_feature: MA Experiment 20001248 PARAMETER Experiment Name: At_Far-red-induction_P Parameter: Organism Value: A. thaliana
  misc_feature: MA Experiment 20001248 PARAMETER Experiment Name: At_Far-red-induction_P Parameter: Plant Line Value: Columbia
  misc_feature: MA Experiment 20001248 PARAMETER Experiment Name: At_Far-red-induction_P Parameter: Timepoint (hr) Value: 4
  misc_feature: MA Experiment 20001248 PARAMETER Experiment Name: At_Far-red-induction_P Parameter: Tissue Value: Whole Plant
  misc_feature: MA Experiment ID: 20001911 Result: Down-regulated in Transcription
  misc_feature: MA Experiment 20001911 PARAMETER Experiment Name: At_Drought_Reproduction_P Parameter: Age (day) Value: 40
  misc_feature: MA Experiment 20001911 PARAMETER Experiment Name: At_Drought_Reproduction_P Parameter: Organism Value: A. thaliana
  misc_feature: MA Experiment 20001911 PARAMETER Experiment Name: At_Drought_Reproduction_P Parameter: Plant Line Value: WS
  misc_feature: MA Experiment 20001911 PARAMETER Experiment Name: At_Drought_Reproduction_P Parameter: Timepoint (day) Value: 10
  misc_feature: MA Experiment 20001911 PARAMETER Experiment Name: At_Drought_Reproduction_P Parameter: Tissue Value: Flowers
  misc_feature: MA Experiment 20001911 PARAMETER Experiment Name: At_Drought_Reproduction_P Parameter: Treatment Value: Drought vs. No Drought
atggagcttcctcaacctcgtcccttcaaaacccaagggagaaaaccaacacatgattttttatcgctctgcagtcattcaaccgtccacccagatccaaagccaacaccaccaccttcttctcaaggtagtcacttgaaaacccatgattttcttcaaccgttagaatgtgttggtgctaaagaagacgtaagtaggattaactctaccactacagcgtccgagaagccaccgccccctgctccacctccaccgttgcagcacgtgcttcccggtggtatagggacttatacgattagccccattccttacttccatcatcatcatcagagaattcctaagccggagttgtcaccaccaatgatgttcaatgctaatgagagaaacgttttggatgagaattctaactctaattgcagctcgtacgccgctgcatcaagcgggttcactctgtgggatgaatctgcttctgggaagaagggacagacaaggaaggagaatagtgttggggagagagtaaacatgagagctgatgttgcagcaactgtgggacaatggccagtggcggagagacggtcccagtctttgacaaacaaccatatgagcggtttcagttctctctcttcctctcaagggtctgtgcttaagagccagagcttcatggacatgataaggtcagcaaaaggaagttcacaggaagatgatttagatgatgaagaagattttatcatgaagaaagaaagctcctcgactagccagagccatagagtggatttgagggtaaaagcagatgtgagaggctctcctaacgatcaaaagctgaacacacctaggtctaaacattctgctacagagcaacggagaaggagcaagatcaatgatagatttcagatgttgagacaactaatacctaacagcgaccaaaagcgggataaggcctccttcttactagaggttatcgagtatattcaattcttacaagagaaagcagacaagtatgtgacctcttaccaaggatggaatcacgaacctgcgaagctattgaattggcagagtaacaacaaccaacagctagtacctgaaggagttgcttttgctccaaaattggaagaagagaaaaacaacattccggtttcggtccttgcaactgcacaaggtgttgttattgatcatccaacaaccgcgacgacctctccatttccattgtcgattcaaagcaacagttttttctctcctgtgattgcgggtaatcccgtaccccagttccacgcaagagtcgcatcatcagaggctgtagagccaagtccgagttcccggagtcaaaaagaagaagaagatgaggaagttcttgagggtaacatcagaatttcaagtgtttactcacaaggcagattagtgaaaacactgagagaagcattggagaattcaggagtggacttaacgaaagcaagcatctccgttgaaatcgagctcgctaaacaatcctcgtcttcttccttcaaggatcatgaagttcgtgaaccggtttctcgaaccagaaacgacaatgtcaagcaaactcggaaaccaaaacggctcaagacgggacagtag

SEQ ID NO: 71407 - protein, 530 aa, Arabidopsis thaliana
  peptide (1)..(530): Ceres Seq. ID no. 3444982
  misc_feature (277)..(327): Pfam Name: Helix-loop-helix DNA-binding domain Pfam Description: Helix-loop-helix DNA-binding domain
  misc_feature (1)..(530): Homolog of NCBI NO: 11358566 NR Description: myc-like protein - Arabidopsis thaliana
  misc_feature (121)..(530): Homolog of NCBI NO: 30682248 NR Description: bHLH protein family [Arabidopsis thaliana]
  misc_feature (224)..(528): Homolog of NCBI NO: 15221582 NR Description: putative DNA-binding protein; protein id: supported by cDNA: 27793. [Arabidopsis thaliana]
  misc_feature (224)..(528): Homolog of NCBI NO: 21555388 NR Description: putative DNA-binding protein [Arabidopsis
  misc_feature (254)..(521): Homolog of NCBI NO: 9758063 NR Description: DNA-binding protein-like [Arabidopsis thaliana]
  misc_feature (254)..(354): Homolog of NCBI NO: 15241563 NR Description: putative protein; protein id: At5g38860.1
  misc_feature (324)..(528): Homolog of NCBI NO: 19310568 NR Description: putative DNA-binding protein [Arabidopsis
MELPQPRPFKTQGRKPTHDFLSLCSHSTVHPDPKPTPPPSSQGSHLKTHDFLQPLECVGAKEDVSRINSTTTASEKPPPPAPPPPLQHVLPGGIGTYTISPIPYFHHHHQRIPKPELSPPMMFNANERNVLDENSNSNCSSYAAASSGFTLWDESASGKKGQTRKENSVGERVNMRADVAATVGQWPVAERRSQSLTNNHMSGFSSLSSSQGSVLKSQSFMDMIRSAKGSSQEDDLDDEEDFIMKKESSSTSQSHRVDLRVKADVRGSPNDQKLNTPRSKHSATEQRRRSKINDRFQMLRQLIPNSDQKRDKASFLLEVIEYIQFLQEKADKYVTSYQGWNHEPAKLLNWQSNNNQQLVPEGVAFAPKLEEEKNNIPVSVLATAQGVVIDHPTTATTSPFPLSIQSNSFFSPVIAGNPVPQFHARVASSEAVEPSPSSRSQKEEEDEEVLEGNIRISSVYSQGRLVKTLREALENSGVDLTKASISVEIELAKQSSSSSFKDHEVREPVSRTRNDNVKQTRKPKRLKTGQ

SEQ ID NO: 71408 - protein, 410 aa, Arabidopsis thaliana
  peptide (1)..(410): Ceres Seq. ID no. 3444983
  misc_feature (157)..(207): Pfam Name: Helix-loop-helix DNA-binding domain Pfam Description: Helix-loop-helix DNA-binding domain
  misc_feature (1)..(410): Homolog of NCBI NO: 11358566 NR Description: myc-like protein - Arabidopsis thaliana
  misc_feature (1)..(410): Homolog of NCBI NO: 30682248 NR Description: bHLH protein family [Arabidopsis thaliana]
  misc_feature (104)..(408): Homolog of NCBI NO: 15221582 NR Description: putative DNA-binding protein; protein id: supported by cDNA: 27793. [Arabidopsis thaliana]
  misc_feature (104)..(408): Homolog of NCBI NO: 21555388 NR Description: putative DNA-binding protein [Arabidopsis
  misc_feature (134)..(401): Homolog of NCBI NO: 9758063 NR Description: DNA-binding protein-like [Arabidopsis thaliana]
  misc_feature (134)..(234): Homolog of NCBI NO: 15241563 NR Description: putative protein; protein id: At5g38860.1
  misc_feature (204)..(408): Homolog of NCBI NO: 19310568 NR Description: putative DNA-binding protein [Arabidopsis
MMFNANERNVLDENSNSNCSSYAAASSGFTLWDESASGKKGQTRKENSVGERVNMRADVAATVGQWPVAERRSQSLTNNHMSGFSSLSSSQGSVLKSQSFMDMIRSAKGSSQEDDLDDEEDFIMKKESSSTSQSHRVDLRVKADVRGSPNDQKLNTPRSKHSATEQRRRSKINDRFQMLRQLIPNSDQKRDKASFLLEVIEYIQFLQEKADKYVTSYQGWNHEPAKLLNWQSNNNQQLVPEGVAFAPKLEEEKNNIPVSVLATAQGVVIDHPTTATTSPFPLSIQSNSFFSPVIAGNPVPQFHARVASSEAVEPSPSSRSQKEEEDEEVLEGNIRISSVYSQGRLVKTLREALENSGVDLTKASISVEIELAKQSSSSSFKDHEVREPVSRTRNDNVKQTRKPKRLKTGQ

SEQ ID NO: 71409 - protein, 409 aa, Arabidopsis thaliana
  peptide (1)..(409): Ceres Seq. ID no. 3444984
  misc_feature (156)..(206): Pfam Name: Helix-loop-helix DNA-binding domain Pfam Description: Helix-loop-helix DNA-binding domain
  misc_feature (1)..(409): Homolog of NCBI NO: 11358566 NR Description: myc-like protein - Arabidopsis thaliana
  misc_feature (1)..(409): Homolog of NCBI NO: 30682248 NR Description: bHLH protein family [Arabidopsis thaliana]
  misc_feature (103)..(407): Homolog of NCBI NO: 15221582 NR Description: putative DNA-binding protein; protein id: supported by cDNA: 27793. [Arabidopsis thaliana]
  misc_feature (103)..(407): Homolog of NCBI NO: 21555388 NR Description: putative DNA-binding protein [Arabidopsis
  misc_feature (133)..(400): Homolog of NCBI NO: 9758063 NR Description: DNA-binding protein-like [Arabidopsis thaliana]
  misc_feature (133)..(233): Homolog of NCBI NO: 15241563 NR Description: putative protein; protein id: At5g38860.1
  misc_feature (203)..(407): Homolog of NCBI NO: 19310568 NR Description: putative DNA-binding protein [Arabidopsis
MFNANERNVLDENSNSNCSSYAAASSGFTLWDESASGKKGQTRKENSVGERVNMRADVAATVGQWPVAERRSQSLTNNHMSGFSSLSSSQGSVLKSQSFMDMIRSAKGSSQEDDLDDEEDFIMKKESSSTSQSHRVDLRVKADVRGSPNDQKLNTPRSKHSATEQRRRSKINDRFQMLRQLIPNSDQKRDKASFLLEVIEYIQFLQEKADKYVTSYQGWNHEPAKLLNWQSNNNQQLVPEGVAFAPKLEEEKNNIPVSVLATAQGVVIDHPTTATTSPFPLSIQSNSFFSPVIAGNPVPQFHARVASSEAVEPSPSSRSQKEEEDEEVLEGNIRISSVYSQGRLVKTLREALENSGVDLTKASISVEIELAKQSSSSSFKDHEVREPVSRTRNDNVKQTRKPKRLKTGQ

SEQ ID NO: 71410 - DNA, 1146 bp, Arabidopsis thaliana
  misc_feature (1)..(1146): Ceres Seq. ID no. 3447026
  misc_feature: MA Experiment ID: 20000355 Result: Up-regulated in Transcription
  misc_feature: MA Experiment 20000355 PARAMETER Experiment Name: At_Siliques_Sub_P Parameter: Age (day) Value: 21
  misc_feature: MA Experiment 20000355 PARAMETER Experiment Name: At_Siliques_Sub_P Parameter: Organism Value: A. thaliana
  misc_feature: MA Experiment 20000355 PARAMETER Experiment Name: At_Siliques_Sub_P Parameter: Plant Line Value: WS
  misc_feature: MA Experiment 20000355 PARAMETER Experiment Name: At_Siliques_Sub_P Parameter: Tissue Value: Less Than 5mm Siliques vs. Whole Plant
atgagttgtttctcgtgcttctcttcaaaagttctggacaatgaaggttcttcgatgcctgctccttataagcaaccaaactcacctaagagaacaacaggagaagtggtggctaagaacgcaaacggaccatcaaacaatatgggggcacgtattttcacgttccgtgagctagccaccgcgacaaagaattttagacaagagtgcctcattggtgaaggtgggttcgggagggtttacaaaggaaagcttgaaaatccagctcaggtcgtggcagtgaaacaacttgataggaatggattacaaggacaaagagagttcttggtcgaggtcttaatgcttagtcttctacatcataggaatcttgtgaatcttatcggttattgcgctgatggagaccaaagacttcttgtttacgagtatatgcctcttggatctctagaagatcatctcctcgatcttgaaccgggacaaaaaccactagactggaacactcgtattaagattgctttaggagcagcaaaaggaattgagtatctccatgatgaggctgatcctccagtgatttaccgagatcttaaatcgtcaaatatattacttgacccagaatacgttgcgaaattatcggatttcggtttagcaaagctaggtcctgttggagacacactacatgtgtcttcccgagttatgggaacttatggttattgtgctcctgaatatcaaagaactggctatctaacaaataaatcagatgtctacagctttggagttgtgttgttggaacttatatccggaagacgagtcatcgacacaatgagacctagtcatgaacaaaatctcgttacttgggcactaccgatttttagagatccgactagatattggcagctagctgatccattgcttcgaggcgactatccggaaaagagtttgaaccaagctatagctgtagcggcaatgtgcctgcatgaagaaccaacggttagaccactaatgagtgacgttattacagccttgagctttcttggtgcatcctcaaattcctccaataccggctctaaccatttgcaacaaaatcgatccaacaaatatcaggatgcagttcagtgggactcaagtcctagatatgctaattcgcaaatgtag

SEQ ID NO: 71411 - protein, 381 aa, Arabidopsis thaliana
  peptide (1)..(381): Ceres Seq. ID no. 3447027
  misc_feature (1)..(381): Homolog of NCBI NO: 11994661 NR Description: receptor protein kinase-like protein [Arabidopsis
  misc_feature (30)..(381): Homolog of NCBI NO: 15230190 NR Description: protein kinase, putative; protein id: At3g24790.1
  misc_feature (1)..(349): Homolog of NCBI NO: 18397825 NR Description: putative protein kinase; protein id: At3g07070.1 thaliana] >gi|6642658|gb|AAF20239.1|AC012395_26 putative protein
  misc_feature (1)..(349): Homolog of NCBI NO: 28416685 NR Description: At3g07070 [Arabidopsis thaliana]
  misc_feature (32)..(375): Homolog of NCBI NO: 15235623 NR Description: putative protein; protein id: At4g13190.1
  misc_feature (35)..(379): Homolog of NCBI NO: 34907210 NR Description: putative serine/threonine kinase PBS1 protein
  misc_feature (1)..(353): Homolog of NCBI NO: 34395193 NR Description: putative protein serine/threonine kinase [Oryza
  misc_feature (12)..(344): Homolog of NCBI NO: 11259782 NR Description: protein kinase-like - Arabidopsis thaliana
  misc_feature (12)..(344): Homolog of NCBI NO: 30679773 NR Description: protein kinase family [Arabidopsis thaliana]
  misc_feature (14)..(355): Homolog of NCBI NO: 34394036 NR Description: putative protein serine/threonine kinase BNK1
MSCFSCFSSKVLDNEGSSMPAPYKQPNSPKRTTGEVVAKNANGPSNNMGARIFTFRELATATKNFRQECLIGEGGFGRVYKGKLENPAQVVAVKQLDRNGLQGQREFLVEVLMLSLLHHRNLVNLIGYCADGDQRLLVYEYMPLGSLEDHLLDLEPGQKPLDWNTRIKIALGAAKGIEYLHDEADPPVIYRDLKSSNILLDPEYVAKLSDFGLAKLGPVGDTLHVSSRVMGTYGYCAPEYQRTGYLTNKSDVYSFGVVLLELISGRRVIDTMRPSHEQNLVTWALPIFRDPTRYWQLADPLLRGDYPEKSLNQAIAVAAMCLHEEPTVRPLMSDVITALSFLGASSNSSNTGSNHLQQNRSNKYQDAVQWDSSPRYANSQM

SEQ ID NO: 71412 - protein, 363 aa, Arabidopsis thaliana
  peptide (1)..(363): Ceres Seq. ID no. 3447028
  misc_feature (1)..(363): Homolog of NCBI NO: 11994661 NR Description: receptor protein kinase-like protein [Arabidopsis
  misc_feature (12)..(363): Homolog of NCBI NO: 15230190 NR Description: protein kinase, putative; protein id: At3g24790.1
  misc_feature (1)..(331): Homolog of NCBI NO: 18397825 NR Description: putative protein kinase; protein id: At3g07070.1 thaliana] >gi|6642658|gb|AAF20239.1|AC012395_26 putative protein
  misc_feature (1)..(331): Homolog of NCBI NO: 28416685 NR Description: At3g07070 [Arabidopsis thaliana]
  misc_feature (14)..(357): Homolog of NCBI NO: 15235623 NR Description: putative protein; protein id: At4g13190.1
  misc_feature (17)..(361): Homolog of NCBI NO: 34907210 NR Description: putative serine/threonine kinase PBS1 protein
  misc_feature (1)..(335): Homolog of NCBI NO: 34395193 NR Description: putative protein serine/threonine kinase [Oryza
  misc_feature (1)..(326): Homolog of NCBI NO: 11259782 NR Description: protein kinase-like - Arabidopsis thaliana
  misc_feature (1)..(326): Homolog of NCBI NO: 30679773 NR Description: protein kinase family [Arabidopsis thaliana]
  misc_feature (1)..(337): Homolog of NCBI NO: 34394036 NR Description: putative protein serine/threonine kinase BNK1
MPAPYKQPNSPKRTTGEVVAKNANGPSNNMGARIFTFRELATATKNFRQECLIGEGGFGRVYKGKLENPAQVVAVKQLDRNGLQGQREFLVEVLMLSLLHHRNLVNLIGYCADGDQRLLVYEYMPLGSLEDHLLDLEPGQKPLDWNTRIKIALGAAKGIEYLHDEADPPVIYRDLKSSNILLDPEYVAKLSDFGLAKLGPVGDTLHVSSRVMGTYGYCAPEYQRTGYLTNKSDVYSFGVVLLELISGRRVIDTMRPSHEQNLVTWALPIFRDPTRYWQLADPLLRGDYPEKSLNQAIAVAAMCLHEEPTVRPLMSDVITALSFLGASSNSSNTGSNHLQQNRSNKYQDAVQWDSSPRYANSQM

SEQ ID NO: 71413 - protein, 334 aa, Arabidopsis thaliana
  peptide (1)..(334): Ceres Seq. ID no. 3447029
  misc_feature (1)..(334): Homolog of NCBI NO: 11994661 NR Description: receptor protein kinase-like protein [Arabidopsis
  misc_feature (1)..(334): Homolog of NCBI NO: 15230190 NR Description: protein kinase, putative; protein id: At3g24790.1
  misc_feature (1)..(302): Homolog of NCBI NO: 18397825 NR Description: putative protein kinase; protein id: At3g07070.1 thaliana] >gi|6642658|gb|AAF20239.1|AC012395_26 putative protein
  misc_feature (1)..(302): Homolog of NCBI NO: 28416685 NR Description: At3g07070 [Arabidopsis thaliana]
  misc_feature (1)..(328): Homolog of NCBI NO: 15235623 NR Description: putative protein; protein id: At4g13190.1
  misc_feature (1)..(332): Homolog of NCBI NO: 34907210 NR Description: putative serine/threonine kinase PBS1 protein
  misc_feature (1)..(306): Homolog of NCBI NO: 34395193 NR Description: putative protein serine/threonine kinase [Oryza
  misc_feature (1)..(297): Homolog of NCBI NO: 11259782 NR Description: protein kinase-like - Arabidopsis thaliana
  misc_feature (1)..(297): Homolog of NCBI NO: 30679773 NR Description: protein kinase family [Arabidopsis thaliana]
  misc_feature (1)..(308): Homolog of NCBI NO: 34394036 NR Description: putative protein serine/threonine kinase BNK1
MGARIFTFRELATATKNFRQECLIGEGGFGRVYKGKLENPAQVVAVKQLDRNGLQGQREFLVEVLMLSLLHHRNLVNLIGYCADGDQRLLVYEYMPLGSLEDHLLDLEPGQKPLDWNTRIKIALGAAKGIEYLHDEADPPVIYRDLKSSNILLDPEYVAKLSDFGLAKLGPVGDTLHVSSRVMGTYGYCAPEYQRTGYLTNKSDVYSFGVVLLELISGRRVIDTMRPSHEQNLVTWALPIFRDPTRYWQLADPLLRGDYPEKSLNQAIAVAAMCLHEEPTVRPLMSDVITALSFLGASSNSSNTGSNHLQQNRSNKYQDAVQWDSSPRYANSQM

SEQ ID NO: 71414 - DNA, 3330 bp, Arabidopsis thaliana
  misc_feature (1)..(3330): Ceres Seq. ID no. 3447874
  misc_feature: MA Experiment ID: 108434 Result: Up-regulated in Transcription
  misc_feature: MA Experiment 108434 PARAMETER Experiment Name: At_Root_Tips_cDNA_P Parameter: Tissue Value: Root Tips
  misc_feature: MA Experiment ID: 108435 Result: Up-regulated in Transcription
  misc_feature: MA Experiment 108435 PARAMETER Experiment Name: At_stm_Mutants_cDNA_P Parameter: Plant Line Value: wt Landsburg vs stm
  misc_feature: MA Experiment 108435 PARAMETER Experiment Name: At_stm_Mutants_cDNA_P Parameter: Tissue Value: Shoot Apical Meristem Region
  misc_feature: MA Experiment ID: 108461 Result: Down-regulated in Transcription
  misc_feature: MA Experiment 108461 PARAMETER Experiment Name: At_Germinating_Seeds_cDNA_P Parameter: Age (day) Value: 1 vs. 0
  misc_feature: MA Experiment 108461 PARAMETER Experiment Name: At_Germinating_Seeds_cDNA_P Parameter: Tissue Value: Germinating Seeds
  misc_feature: MA Experiment ID: 108462 Result: Down-regulated in Transcription
  misc_feature: MA Experiment 108462 PARAMETER Experiment Name: At_Germinating_Seeds_cDNA_P Parameter: Age (day) Value: 2 vs. 0
  misc_feature: MA Experiment 108462 PARAMETER Experiment Name: At_Germinating_Seeds_cDNA_P Parameter: Tissue Value: Germinating Seeds
  misc_feature: MA Experiment ID: 108463 Result: Down-regulated in Transcription
  misc_feature: MA Experiment 108463 PARAMETER Experiment Name: At_Germinating_Seeds_cDNA_P Parameter: Age (day) Value: 3 vs. 0
  misc_feature: MA Experiment 108463 PARAMETER Experiment Name: At_Germinating_Seeds_cDNA_P Parameter: Tissue Value: Germinating Seeds
  misc_feature: MA Experiment ID: 108464 Result: Down-regulated in Transcription
  misc_feature: MA Experiment 108464 PARAMETER Experiment Name: At_Germinating_Seeds_cDNA_P Parameter: Age (day) Value: 4 vs. 0
  misc_feature: MA Experiment 108464 PARAMETER Experiment Name: At_Germinating_Seeds_cDNA_P Parameter: Tissue Value: Germinating Seeds
  misc_feature: MA Experiment ID: 108572 Result: Down-regulated in Transcription
  misc_feature: MA Experiment 108572 PARAMETER Experiment Name: At_Drought_cDNA_P Parameter: Timepoint (hr) Value: 1
  misc_feature: MA Experiment 108572 PARAMETER Experiment Name: At_Drought_cDNA_P Parameter: Tissue Value: Aerial
  misc_feature: MA Experiment 108572 PARAMETER Experiment Name: At_Drought_cDNA_P Parameter: Treatment Value: Drought vs. No Drought
  misc_feature: MA Experiment ID: 108573 Result: Down-regulated in Transcription
  misc_feature: MA Experiment 108573 PARAMETER Experiment Name: At_Drought_cDNA_P Parameter: Timepoint (hr) Value: 6
  misc_feature: MA Experiment 108573 PARAMETER Experiment Name: At_Drought_cDNA_P Parameter: Tissue Value: Aerial
  misc_feature: MA Experiment 108573 PARAMETER Experiment Name: At_Drought_cDNA_P Parameter: Treatment Value: Drought vs. No Drought
  misc_feature: MA Experiment ID: 108609 Result: Down-regulated in Transcription
  misc_feature: MA Experiment 108609 PARAMETER Experiment Name: At_100uM_ABA_cDNA_P Parameter: Timepoint (hr) Value: 24
  misc_feature: MA Experiment 108609 PARAMETER Experiment Name: At_100uM_ABA_cDNA_P Parameter: Tissue Value: Aerial
  misc_feature: MA Experiment 108609 PARAMETER Experiment Name: At_100uM_ABA_cDNA_P Parameter: Treatment Value: 100uM ABA vs. No Treatment
  misc_feature: MA Experiment ID: 20000088 Result: Up-regulated in Transcription
  misc_feature: MA Experiment 20000088 PARAMETER Experiment Name: At_100uM_ABA_Mutants_cDNA_P Parameter: Plant Line Value: Landsberg
  misc_feature: MA Experiment 20000088 PARAMETER Experiment Name: At_100uM_ABA_Mutants_cDNA_P Parameter: Timepoint (hr) Value: 6
  misc_feature: MA Experiment 20000088 PARAMETER Experiment Name: At_100uM_ABA_Mutants_cDNA_P Parameter: Tissue Value: Aerial
  misc_feature: MA Experiment 20000088 PARAMETER Experiment Name: At_100uM_ABA_Mutants_cDNA_P Parameter: Treatment Value: 100uM ABA vs. No Treatment
  misc_feature: MA Experiment ID: 20000224 Result: Up-regulated in Transcription
atgccaaagtgcaagaatctgttgctaacctcgaagcgacgtaaatccaaatccaaaagactaaagctccatcagcatgaacctgagtctctgtttccagagaaggaggtagaagaggaagatgaagatgaaggaggcttcaagctgaaaattgcagctccttctcaagagcatggagttcaacctctgggaaacctatatttcaatcctggtgcggtcaatgtgcgaaacactggattaggtaatctccagatactctcagatgagctcgttttggatattctaggtcttcttggcgccaatcatttgggtgttttggctactgtaactaagtcattctatatatttgctaatcatgagcctctctggagaaatcttgtgttagaggagttaaaaggagattttttgtttaatgggtcgtggagatctacctatgtagctgcttaccatccgaaattcaagtttgctggagatggtgaatcgaatttgaagattatagatttctattctgattatctgtttcagagctggttatgtgcgaatcttgaaatgaaaccgaaatggcttagaagagataatatcacacgggtgagaggcatttctgttgaagacttcattacaaagtttgaggagccgaataagccagttttgttggagggatgtttggatggttggcctgctattgagaaatggtcaagagattatctgactaaggtggttggtgatgtcgaattcgcggtaggtccagtggaaatgaagctcgagaagtattttaggtattctgatggagctagggaagaaaggcctttgtacttgtttgatccaaagtttgcagagaaagttccggttttggattcggagtatgatgttcctgtctatttcagagaggacttgtttggtgttttaggaaacgagcgacctgattatagatggatcataattggtccagccggatcaggatcgtctttccatattgatcctaactcaacatcagcttggaatgcggtgatcacagggtcgaagaaatgggttttgttcccacctgatgtggttcctccgggtgtgcatccaagtcctgatggagcagaagtggcctgtcctgtttccataatagaatggttcatgaacttttatgatgatactaaggattgggagaagaaacctattgagtgtatatgcaaagccggggaggtgatgtttgtacctaatggatggtggcatctggtgattaacctggaggaatcgattgctattactcagaattatgctagcaggagtaatttgttgaatgtgttagaatttctgaagaaaccaaatgctaaagaacttgtctccgggacaactgacagagagaatttgcatgacaaattcaagaaagccattgaagaagcttacccggggactatccaagagttagaaaagaaagcagaagaagcaaaaagagccgaagaacaaagaagaatgagtaacattgtgctcaacacacttcgattcaaacacccgaagcttgccttgctccaatcctgctcttccttttccgacctcaagatcatacatggctttctcttacgaacccatctcatctccgacgtcttcgttgccagtcgtctcctcgctctctgcgttgacgactccaccttcaacaaaccaaccaatctcttgggatatgcatacggaatcttctctcagattcaaaaccctaatcttttcgtcttcaatctactcattcgctgcttctccactggtgcagagcctagtaaggcttttgggttctatacccagatgttgaaatctcggatttggccagataacatcacgtttccgtttctgattaaggcgtctagtgagatggagtgtgttctagtgggagagcaaacgcattcacagattgttagattcggatttcagaatgatgtttatgtagagaattcgcttgttcatatgtacgctaattgtgggttcatcgctgctgctggtagaatctttgggcaaatggggtttcgagatgttgtttcatggacttctatggtggctgggtattgtaaatgcgggatggttgagaatgcacgagagatgttcgatgaaatgcctcacagaaatttgtttacttggagtattatgattaatgggtatgcgaagaacaactgttttgagaaagccattgacttgtttgaattcatgaaaagggaaggagttgtcgcgaatgagacggttatggtgagtgtgatttcgtcttgtgctcatttgggtgcacttgagtttggagaaagagcatatgagtatgtggttaagagtcacatgactgtgaatcttattcttgggacagctcttgtggatatgttttggaggtgtggggatatcgagaaagcaattcatgtatttgagggattgcctgagacggatagcttgagctggagttcaataatcaaaggtcttgcagtgcatgggcatgctcacaaggcaatgcattacttctcccaaatgattagtttagggtttattccaagggatgttacattcacagcggttctttcagcttgcagccacggtggattagttgaaaaagggttagagatatatgagaacatgaaaaaggatcatgggatcgagcctagactcgagcattatggttgcattgttgatatgcttggtcgtgctgggaaattagccgaagcggagaactttatccttaaaatgcatgtgaagccaaacgctcctatattgggagcattgcttggagcatgtaagatttataagaacaccgaggttgcagagagagtaggaaacatgttgataaaggtgaaaccagaacatagcggttactatgtcttactgtcaaatatatacgcgtgtgcaggacaatgggataagatagagagcttgagagacatgatgaaggagaagcttgttaagaaaccaccagggtggagcttaatagagattgatgggaaaataaacaagttcacaatgggagatgatcagaagcatcctgaaatgggtaagatcagaaggaagtgggaagagatcttggggaagataagattgatagggtataaagggaacacaggtgatgcgtttttcgatgtagacgaggaggagaaggagagttcgattcatatgcatagtgagaaacttgcaattgcatatggtatgatgaagactaagcctggtacaaccattaggatagtgaagaacttgagggtatgtgaagattgtcatacagtaacaaagcttatctctgaggtttatggtagagagttaattgtaagagaccgcaacagatttcatcattttagaaatggagtatgttcctgcagagattattggtga

SEQ ID NO: 71415 - protein, 1109 aa, Arabidopsis thaliana
  peptide (1)..(1109): Ceres Seq. ID no. 3447875
  misc_feature (311)..(422): Pfam Name: jmjC domain Pfam Description: jmjC domain
  misc_feature (1)..(425): Homolog of NCBI NO: 15240087 NR Description: putative protein; protein id: At5g06550.1 thaliana] >gi|10178111|dbj|BAB11404.1| contains similarity to
  misc_feature (490)..(1109): Homolog of NCBI NO: 15239979 NR Description: selenium-binding protein-like; protein id:
  misc_feature (499)..(1109): Homolog of NCBI NO: 10178152 NR Description: selenium-binding protein-like [Arabidopsis
  misc_feature (499)..(1104): Homolog of NCBI NO: 15242684 NR Description: putative protein; protein id: At5g40410.1
  misc_feature (591)..(1109): Homolog of NCBI NO: 15239745 NR Description: selenium-binding protein-like; protein id:
  misc_feature (495)..(1109): Homolog of NCBI NO: 15235537 NR Description: putative protein; protein id: At4g37380.1
  misc_feature (503)..(1109): Homolog of NCBI NO: 9279687 NR Description: gb|AAC35225.1~gene_id:MWI23.6~strong similarity
  misc_feature (503)..(1108): Homolog of NCBI NO: 15228829 NR Description: hypothetical protein; protein id: At3g22690.1
  misc_feature (592)..(1109): Homolog of NCBI NO: 34910298 NR Description: P0013F10.8 [Oryza sativa (japonica
  misc_feature (668)..(1109): Homolog of NCBI NO: 18394615 NR Description: hypothetical protein; protein id: At1g18485.1
MPKCKNLLLTSKRRKSKSKRLKLHQHEPESLFPEKEVEEEDEDEGGFKLKIAAPSQEHGVQPLGNLYFNPGAVNVRNTGLGNLQILSDELVLDILGLLGANHLGVLATVTKSFYIFANHEPLWRNLVLEELKGDFLFNGSWRSTYVAAYHPKFKFAGDGESNLKIIDFYSDYLFQSWLCANLEMKPKWLRRDNITRVRGISVEDFITKFEEPNKPVLLEGCLDGWPAIEKWSRDYLTKVVGDVEFAVGPVEMKLEKYFRYSDGAREERPLYLFDPKFAEKVPVLDSEYDVPVYFREDLFGVLGNERPDYRWIIIGPAGSGSSFHIDPNSTSAWNAVITGSKKWVLFPPDVVPPGVHPSPDGAEVACPVSIIEWFMNFYDDTKDWEKKPIECICKAGEVMFVPNGWWHLVINLEESIAITQNYASRSNLLNVLEFLKKPNAKELVSGTTDRENLHDKFKKAIEEAYPGTIQELEKKAEEAKRAEEQRRMSNIVLNTLRFKHPKLALLQSCSSFSDLKIIHGFLLRTHLISDVFVASRLLALCVDDSTFNKPTNLLGYAYGIFSQIQNPNLFVFNLLIRCFSTGAEPSKAFGFYTQMLKSRIWPDNITFPFLIKASSEMECVLVGEQTHSQIVRFGFQNDVYVENSLVHMYANCGFIAAAGRIFGQMGFRDVVSWTSMVAGYCKCGMVENAREMFDEMPHRNLFTWSIMINGYAKNNCFEKAIDLFEFMKREGVVANETVMVSVISSCAHLGALEFGERAYEYVVKSHMTVNLILGTALVDMFWRCGDIEKAIHVFEGLPETDSLSWSSIIKGLAVHGHAHKAMHYFSQMISLGFIPRDVTFTAVLSACSHGGLVEKGLEIYENMKKDHGIEPRLEHYGCIVDMLGRAGKLAEAENFILKMHVKPNAPILGALLGACKIYKNTEVAERVGNMLIKVKPEHSGYYVLLSNIYACAGQWDKIESLRDMMKEKLVKKPPGWSLIEIDGKINKFTMGDDQKHPEMGKIRRKWEEILGKIRLIGYKGNTGDAFFDVDEEEKESSIHMHSEKLAIAYGMMKTKPGTTIRIVKNLRVCEDCHTVTKLISEVYGRELIVRDRNRFHHFRNGVCSCRDYW

SEQ ID NO: 71416 - protein, 926 aa, Arabidopsis thaliana
  peptide (1)..(926): Ceres Seq. ID no. 3447876
  misc_feature (128)..(239): Pfam Name: jmjC domain Pfam Description: jmjC domain
  misc_feature (1)..(242): Homolog of NCBI NO: 15240087 NR Description: putative protein; protein id: At5g06550.1 thaliana] >gi|10178111|dbj|BAB11404.1| contains similarity to
  misc_feature (307)..(926): Homolog of NCBI NO: 15239979 NR Description: selenium-binding protein-like; protein id:
  misc_feature (316)..(926): Homolog of NCBI NO: 10178152 NR Description: selenium-binding protein-like [Arabidopsis
  misc_feature (316)..(921): Homolog of NCBI NO: 15242684 NR Description: putative protein; protein id: At5g40410.1
  misc_feature (408)..(926): Homolog of NCBI NO: 15239745 NR Description: selenium-binding protein-like; protein id:
  misc_feature (312)..(926): Homolog of NCBI NO: 15235537 NR Description: putative protein; protein id: At4g37380.1
  misc_feature (320)..(926): Homolog of NCBI NO: 9279687 NR Description: gb|AAC35225.1~gene_id:MWI23.6~strong similarity
  misc_feature (320)..(925): Homolog of NCBI NO: 15228829 NR Description: hypothetical protein; protein id: At3g22690.1
  misc_feature (409)..(926): Homolog of NCBI NO: 34910298 NR Description: P0013F10.8 [Oryza sativa (japonica
  misc_feature (485)..(926): Homolog of NCBI NO: 18394615 NR Description: hypothetical protein; protein id: At1g18485.1
MKPKWLRRDNITRVRGISVEDFITKFEEPNKPVLLEGCLDGWPAIEKWSRDYLTKVVGDVEFAVGPVEMKLEKYFRYSDGAREERPLYLFDPKFAEKVPVLDSEYDVPVYFREDLFGVLGNERPDYRWIIIGPAGSGSSFHIDPNSTSAWNAVITGSKKWVLFPPDVVPPGVHPSPDGAEVACPVSIIEWFMNFYDDTKDWEKKPIECICKAGEVMFVPNGWWHLVINLEESIAITQNYASRSNLLNVLEFLKKPNAKELVSGTTDRENLHDKFKKAIEEAYPGTIQELEKKAEEAKRAEEQRRMSNIVLNTLRFKHPKLALLQSCSSFSDLKIIHGFLLRTHLISDVFVASRLLALCVDDSTFNKPTNLLGYAYGIFSQIQNPNLFVFNLLIRCFSTGAEPSKAFGFYTQMLKSRIWPDNITFPFLIKASSEMECVLVGEQTHSQIVRFGFQNDVYVENSLVHMYANCGFIAAAGRIFGQMGFRDVVSWTSMVAGYCKCGMVENAREMFDEMPHRNLFTWSIMINGYAKNNCFEKAIDLFEFMKREGVVANETVMVSVISSCAHLGALEFGERAYEYVVKSHMTVNLILGTALVDMFWRCGDIEKAIHVFEGLPETDSLSWSSIIKGLAVHGHAHKAMHYFSQMISLGFIPRDVTFTAVLSACSHGGLVEKGLEIYENMKKDHGIEPRLEHYGCIVDMLGRAGKLAEAENFILKMHVKPNAPILGALLGACKIYKNTEVAERVGNMLIKVKPEHSGYYVLLSNIYACAGQWDKIESLRDMMKEKLVKKPPGWSLIEIDGKINKFTMGDDQKHPEMGKIRRKWEEILGKIRLIGYKGNTGDAFFDVDEEEKESSIHMHSEKLAIAYGMMKTKPGTTIRIVKNLRVCEDCHTVTKLISEVYGRELIVRDRNRFHHFRNGVCSCRDYW

SEQ ID NO: 71417 - protein, 858 aa, Arabidopsis thaliana
  peptide (1)..(858): Ceres Seq. ID no. 3447877
  misc_feature (60)..(171): Pfam Name: jmjC domain Pfam Description: jmjC domain
  misc_feature (1)..(174): Homolog of NCBI NO: 15240087 NR Description: putative protein; protein id: At5g06550.1 thaliana] >gi|10178111|dbj|BAB11404.1| contains similarity to
  misc_feature (239)..(858): Homolog of NCBI NO: 15239979 NR Description: selenium-binding protein-like; protein id:
  misc_feature (248)..(858): Homolog of NCBI NO: 10178152 NR Description: selenium-binding protein-like [Arabidopsis
  misc_feature (248)..(853): Homolog of NCBI NO: 15242684 NR Description: putative protein; protein id: At5g40410.1
  misc_feature (340)..(858): Homolog of NCBI NO: 15239745 NR Description: selenium-binding protein-like; protein id:
  misc_feature (244)..(858): Homolog of NCBI NO: 15235537 NR Description: putative protein; protein id: At4g37380.1
  misc_feature (252)..(858): Homolog of NCBI NO: 9279687 NR Description: gb|AAC35225.1~gene_id:MWI23.6~strong similarity
  misc_feature (252)..(857): Homolog of NCBI NO: 15228829 NR Description: hypothetical protein; protein id: At3g22690.1
  misc_feature (341)..(858): Homolog of NCBI NO: 34910298 NR Description: P0013F10.8 [Oryza sativa (japonica
  misc_feature (417)..(858): Homolog of NCBI NO: 18394615 NR Description: hypothetical protein; protein id: At1g18485.1
MKLEKYFRYSDGAREERPLYLFDPKFAEKVPVLDSEYDVPVYFREDLFGVLGNERPDYRWIIIGPAGSGSSFHIDPNSTSAWNAVITGSKKWVLFPPDVVPPGVHPSPDGAEVACPVSIIEWFMNFYDDTKDWEKKPIECICKAGEVMFVPNGWWHLVINLEESIAITQNYASRSNLLNVLEFLKKPNAKELVSGTTDRENLHDKFKKAIEEAYPGTIQELEKKAEEAKRAEEQRRMSNIVLNTLRFKHPKLALLQSCSSFSDLKIIHGFLLRTHLISDVFVASRLLALCVDDSTFNKPTNLLGYAYGIFSQIQNPNLFVFNLLIRCFSTGAEPSKAFGFYTQMLKSRIWPDNITFPFLIKASSEMECVLVGEQTHSQIVRFGFQNDVYVENSLVHMYANCGFIAAAGRIFGQMGFRDVVSWTSMVAGYCKCGMVENAREMFDEMPHRNLFTWSIMINGYAKNNCFEKAIDLFEFMKREGVVANETVMVSVISSCAHLGALEFGERAYEYVVKSHMTVNLILGTALVDMFWRCGDIEKAIHVFEGLPETDSLSWSSIIKGLAVHGHAHKAMHYFSQMISLGFIPRDVTFTAVLSACSHGGLVEKGLEIYENMKKDHGIEPRLEHYGCIVDMLGRAGKLAEAENFILKMHVKPNAPILGALLGACKIYKNTEVAERVGNMLIKVKPEHSGYYVLLSNIYACAGQWDKIESLRDMMKEKLVKKPPGWSLIEIDGKINKFTMGDDQKHPEMGKIRRKWEEILGKIRLIGYKGNTGDAFFDVDEEEKESSIHMHSEKLAIAYGMMKTKPGTTIRIVKNLRVCEDCHTVTKLISEVYGRELIVRDRNRFHHFRNGVCSCRDYW

SEQ ID NO: 71418 - DNA, 2598 bp, Arabidopsis thaliana
  misc_feature (1)..(2598): Ceres Seq. ID no. 3598385
  misc_feature: MA Experiment ID: 20000307 Result: Up-regulated in Transcription
  misc_feature: MA Experiment 20000307 PARAMETER Experiment Name: At_Germinating_Seeds_Sub_P Parameter: Age (hr) Value: 24 vs. 0
  misc_feature: MA Experiment 20000307 PARAMETER Experiment Name: At_Germinating_Seeds_Sub_P Parameter: Organism Value: A. thaliana
  misc_feature: MA Experiment 20000307 PARAMETER Experiment Name: At_Germinating_Seeds_Sub_P Parameter: Plant Line Value: WS
  misc_feature: MA Experiment 20000307 PARAMETER Experiment Name: At_Germinating_Seeds_Sub_P Parameter: Tissue Value: Germinating Seeds
  misc_feature: MA Experiment ID: 20000314 Result: Up-regulated in Transcription
  misc_feature: MA Experiment 20000314 PARAMETER Experiment Name: At_14day_Shoots-Roots_Sub_P Parameter: Age (day) Value: 14
  misc_feature: MA Experiment 20000314 PARAMETER Experiment Name: At_14day_Shoots-Roots_Sub_P Parameter: Organism Value: A. thaliana
  misc_feature: MA Experiment 20000314 PARAMETER Experiment Name: At_14day_Shoots-Roots_Sub_P Parameter: Plant Line Value: WS
  misc_feature: MA Experiment 20000314 PARAMETER Experiment Name: At_14day_Shoots-Roots_Sub_P Parameter: Tissue Value: Roots vs. Whole Plant
  misc_feature: MA Experiment ID: 20000328 Result: Down-regulated in Transcription
  misc_feature: MA Experiment 20000328 PARAMETER Experiment Name: At_42deg_Heat_Sub_P Parameter: Age (day) Value: 14
  misc_feature: MA Experiment 20000328 PARAMETER Experiment Name: At_42deg_Heat_Sub_P Parameter: Organism Value: A. thaliana
  misc_feature: MA Experiment 20000328 PARAMETER Experiment Name: At_42deg_Heat_Sub_P Parameter: Plant Line Value: WS
  misc_feature: MA Experiment 20000328 PARAMETER Experiment Name: At_42deg_Heat_Sub_P Parameter: Temperature (deg C) Value: 42 vs. 22
  misc_feature: MA Experiment 20000328 PARAMETER Experiment Name: At_42deg_Heat_Sub_P Parameter: Timepoint (hr) Value: 6
  misc_feature: MA Experiment 20000328 PARAMETER Experiment Name: At_42deg_Heat_Sub_P Parameter: Tissue Value: Aerial
  misc_feature: MA Experiment ID: 20000347 Result: Up-regulated in Transcription
  misc_feature: MA Experiment 20000347 PARAMETER Experiment Name: At_2mM_SA_Sub_P Parameter: Age (day) Value: 14
  misc_feature: MA Experiment 20000347 PARAMETER Experiment Name: At_2mM_SA_Sub_P Parameter: Organism Value: A. thaliana
  misc_feature: MA Experiment 20000347 PARAMETER Experiment Name: At_2mM_SA_Sub_P Parameter: Plant Line Value: WS
  misc_feature: MA Experiment 20000347 PARAMETER Experiment Name: At_2mM_SA_Sub_P Parameter: Timepoint (hr) Value: 6
  misc_feature: MA Experiment 20000347 PARAMETER Experiment Name: At_2mM_SA_Sub_P Parameter: Tissue Value: Aerial
  misc_feature: MA Experiment 20000347 PARAMETER Experiment Name: At_2mM_SA_Sub_P Parameter: Treatment Value: 2mM SA vs. No Treatment
  misc_feature: MA Experiment ID: 20000352 Result: Down-regulated in Transcription
  misc_feature: MA Experiment 20000352 PARAMETER Experiment Name: At_Drought_Sub_P Parameter: Age (day) Value: 7
  misc_feature: MA Experiment 20000352 PARAMETER Experiment Name: At_Drought_Sub_P Parameter: Organism Value: A. thaliana
  misc_feature: MA Experiment 20000352 PARAMETER Experiment Name: At_Drought_Sub_P Parameter: Plant Line Value: WS
  misc_feature: MA Experiment 20000352 PARAMETER Experiment Name: At_Drought_Sub_P Parameter: Timepoint (hr) Value: 6
  misc_feature: MA Experiment 20000352 PARAMETER Experiment Name: At_Drought_Sub_P Parameter: Tissue Value: Whole Plant
  misc_feature: MA Experiment 20000352 PARAMETER Experiment Name: At_Drought_Sub_P Parameter: Treatment Value: Drought vs. No Drought
  misc_feature: MA Experiment ID: 20000355 Result: Down-regulated in Transcription
  misc_feature: MA Experiment 20000355 PARAMETER Experiment Name: At_Siliques_Sub_P Parameter: Age (day) Value: 21
  misc_feature: MA Experiment 20000355 PARAMETER Experiment Name: At_Siliques_Sub_P Parameter: Organism Value: A. thaliana
  misc_feature: MA Experiment 20000355 PARAMETER Experiment Name: At_Siliques_Sub_P Parameter: Plant Line Value: WS
  misc_feature: MA Experiment 20000355 PARAMETER Experiment Name: At_Siliques_Sub_P Parameter: Tissue Value: Less Than 5mm Siliques vs. Whole Plant
  misc_feature: MA Experiment ID: 20000440 Result: Down-regulated in Transcription
  misc_feature: MA Experiment 20000440 PARAMETER Experiment Name: At_Closed-Flower__Sub_P Parameter: Tissue Value: Closed Flower vs. Whole Plant
  misc_feature: MA Experiment ID: 20000634 Result: Down-regulated in Transcription
  misc_feature: MA Experiment 20000634 PARAMETER Experiment Name: At_10percent_PEG_Sub_P Parameter: Age (day) Value: 12
  misc_feature: MA Experiment 20000634 PARAMETER Experiment Name: At_10percent_PEG_Sub_P Parameter: Organism Value: A. thaliana
  misc_feature: MA Experiment 20000634 PARAMETER Experiment Name: At_10percent_PEG_Sub_P Parameter: Plant Line Value: WS
  misc_feature: MA Experiment 20000634 PARAMETER Experiment Name: At_10percent_PEG_Sub_P Parameter: Timepoint (day) Value: 12
  misc_feature: MA Experiment 20000634 PARAMETER Experiment Name: At_10percent_PEG_Sub_P Parameter: Tissue Value: Whole Plant
  misc_feature: MA Experiment 20000634 PARAMETER Experiment Name: At_10percent_PEG_Sub_P Parameter: Treatment Value: 10% PEG vs. No Treatment
  misc_feature: Pfam Name: Pkinase Pfam Description: Protein kinase domain
atggagagacattgtgtgttagttgccacttttttgctgatgcttcatatcgttcatgctcaggatcaaattggattcattagtgtggattgtggtttggcacctcgtgagtctccttacaatgaagccaaaactggtttaacatatacatcagatgacggtctagtcaacgttgggaaacccggtagaatcgccaaggaattcgaaccgctcgccgataagccgactttgacactgagatattttccagagggagtacgaaactgctacaatctaaatgtcaccagcgacaccaactatctgatcaaggccacattcgtatatggaaattacgatggtcttaatgttgggccaaacttcgacctttacttcggtccgaatttgtggactacggtatgtcttattaagactggaataagtataccttttataaatgttttggagctacgaccgatgaagaaaaacatgtacgttactcaaggcgaatcactgaattacttattcagggtgtatattagcaattcaagtactcgtataaggttcccggatgatgtctatgatcgtaaatggtacccgtacttcgacaactcatggacacaagtaactacgactctcgatgtaaacacaagtcttacttatgaactaccacaaagtgtaatggcaaaagccgcaacgccaattaaggctaacgacaccttgaacattacatggacagtagagcctcctactacaaagttttactcctacatgcactttgcagagcttcagactttaagagccaacgatgcaagggaattcaatgtgacgatgaatggaatatatacatatggaccttatagtcctaaaccactaaaaaccgaaaccatatacgacaaaatccctgagcaatgcgatggaggtgcatgccttttgcaggttgtgaagacacttaaatctacccttccacctttacttaatgctatcgaggctttcaccgtgattgatttcccgcagatggagactaatggagatgacgttgatgcaatcaagaatgttcaagatacgtatggaattagtagaattagttggcaaggagatccatgtgtccccaaactgtttttgtgggatggtctaaattgcaacaactccgataattcgacatcaccaatcatcacttccttagacttatcttcaagtggactaactgggagcatcacccaagccattcagaatctaactaacctgcaagaactggacttgtcagataacaatttgactggagaaatacctgatttcttaggggacattaaatcactcttggtcataaacttaagtggtaataatctaagtggctcagttcctccctcacttcttcagaagaaaggaatgaagttaaatgtcgaaggaaaccctcatcttctttgcacagctgattcatgtgtgaaaaaaggagaggatggacacaagaaaaagagtgtcatagtgccagttgttgcatcaattgcttcaatagctgttcttataggtgcattggttctgtttttcattcttagaaagaaaaagtcaccaaaagttgaaggaccaccaccatcttatatgcaagcatcagatggtagatcgccaagatcatctgaaccggcaatagtgacaaagaatagaaggtttacttactcacaagttgcgataatgacaaataacttccaaagaatccttggaaaaggagggtttggaatggtttatcatggttttgtgaacggtacagaacaagtagctgttaagatactctcccattcatcgtctcaaggatataaagaatttaaagcggaggtagaacttcttcttagagttcatcacaagaacttggtcggtcttgttgggtactgcgacgaaggagagaacatggctcttatctatgaatacatggccaatggagatctaaaagaacatatgtcaggaacacgtaaccggtttactttgaattggggaactagactgaaaatagtcgtcgagtctgcacaaggacttgagtacttgcataatggatgcaaaccaccaatggttcatagagatgtcaaaaccacaaatatattgctgaacgaacacttccaagccaaactagctgattttgggctttcaaggtcatttccaattgaaggtgaaactcatgtgtcaacagttgttgctggaacgcctggatatcttgatcccgaatactataaaacaaattggttgacagaaaagagtgatgtttatagttttgggattgtattgttggagcttatcacaaatcgacccgtgatcgacaaaagccgtgaaaagccacatatagcagaatgggtaggagtaatgcttacaaaaggagacatcaacagtatcatggatcctaatttaaatgaagattatgattctggttctgtttggaaagctgttgagctagccatgagttgtctcaatccttcttcagcaagaagaccgaccatgtcccaagttgttattgaactaaacgagtgtatagcatcagaaaattcaaggggaggagcgagtcgggatatggactcgaagagttccatagaagtgagcttgacctttgataccgaactgagcccaacggctcggtag

SEQ ID NO: 71419 - protein, 865 aa, Arabidopsis thaliana
  peptide (1)..(865): Ceres Seq. ID no. 3598386
  misc_feature: Pfam Name: Pkinase Pfam Description: Protein kinase domain
  misc_feature (179)..(865): Homolog of NCBI NO: 25387133 NR Description: probable protein kinase [imported] - Arabidopsis >gi|9802785|gb|AAF99854.1|AC015448_4 Putative protein kinase
  misc_feature (179)..(517): Homolog of NCBI NO: 15218048 NR Description: light repressible receptor protein kinase,
  misc_feature (532)..(865): Homolog of NCBI NO: 15218048 NR Description: light repressible receptor protein kinase,
  misc_feature (317)..(865): Homolog of NCBI NO: 15228118 NR Description: putative receptor-like protein kinase; protein id:
  misc_feature (132)..(272): Homolog of NCBI NO: 15228118 NR Description: putative receptor-like protein kinase; protein id:
  misc_feature (132)..(865): Homolog of NCBI NO: 39104601 NR Description: unknown protein [Arabidopsis thaliana]
  misc_feature (6)..(147): Homolog of NCBI NO: 39104601 NR Description: unknown protein [Arabidopsis thaliana]
  misc_feature (543)..(831): Homolog of NCBI NO: 8778538 NR Description: F22G5.7 [Arabidopsis thaliana]
  misc_feature (132)..(338): Homolog of NCBI NO: 8778538 NR Description: F22G5.7 [Arabidopsis thaliana]
  misc_feature (339)..(519): Homolog of NCBI NO: 8778538 NR Description: F22G5.7 [Arabidopsis thaliana]
MERHCVLVATFLLMLHIVHAQDQIGFISVDCGLAPRESPYNEAKTGLTYTSDDGLVNVGKPGRIAKEFEPLADKPTLTLRYFPEGVRNCYNLNVTSDTNYLIKATFVYGNYDGLNVGPNFDLYFGPNLWTTVCLIKTGISIPFINVLELRPMKKNMYVTQGESLNYLFRVYISNSSTRIRFPDDVYDRKWYPYFDNSWTQVTTTLDVNTSLTYELPQSVMAKAATPIKANDTLNITWTVEPPTTKFYSYMHFAELQTLRANDAREFNVTMNGIYTYGPYSPKPLKTETIYDKIPEQCDGGACLLQVVKTLKSTLPPLLNAIEAFTVIDFPQMETNGDDVDAIKNVQDTYGISRISWQGDPCVPKLFLWDGLNCNNSDNSTSPIITSLDLSSSGLTGSITQAIQNLTNLQELDLSDNNLTGEIPDFLGDIKSLLVINLSGNNLSGSVPPSLLQKKGMKLNVEGNPHLLCTADSCVKKGEDGHKKKSVIVPVVASIASIAVLIGALVLFFILRKKKSPKVEGPPPSYMQASDGRSPRSSEPAIVTKNRRFTYSQVAIMTNNFQRILGKGGFGMVYHGFVNGTEQVAVKILSHSSSQGYKEFKAEVELLLRVHHKNLVGLVGYCDEGENMALIYEYMANGDLKEHMSGTRNRFTLNWGTRLKIVVESAQGLEYLHNGCKPPMVHRDVKTTNILLNEHFQAKLADFGLSRSFPIEGETHVSTVVAGTPGYLDPEYYKTNWLTEKSDVYSFGIVLLELITNRPVIDKSREKPHIAEWVGVMLTKGDINSIMDPNLNEDYDSGSVWKAVELAMSCLNPSSARRPTMSQVVIELNECIASENSRGGASRDMDSKSSIEVSLTFDTELSPTAR

SEQ ID NO: 71420 - protein, 852 aa, Arabidopsis thaliana
  peptide (1)..(852): Ceres Seq. ID no. 3598387
  misc_feature: Pfam Name: Pkinase Pfam Description: Protein kinase domain
  misc_feature (166)..(852): Homolog of NCBI NO: 25387133 NR Description: probable protein kinase [imported] - Arabidopsis >gi|9802785|gb|AAF99854.1|AC015448_4 Putative protein kinase
  misc_feature (166)..(504): Homolog of NCBI NO: 15218048 NR Description: light repressible receptor protein kinase,
  misc_feature (519)..(852): Homolog of NCBI NO: 15218048 NR Description: light repressible receptor protein kinase,
  misc_feature (304)..(852): Homolog of NCBI NO: 15228118 NR Description: putative receptor-like protein kinase; protein id:
  misc_feature (119)..(259): Homolog of NCBI NO: 15228118 NR Description: putative receptor-like protein kinase; protein id:
  misc_feature (119)..(852): Homolog of NCBI NO: 39104601 NR Description: unknown protein [Arabidopsis thaliana]
  misc_feature (1)..(134): Homolog of NCBI NO: 39104601 NR Description: unknown protein [Arabidopsis thaliana]
  misc_feature (530)..(818): Homolog of NCBI NO: 8778538 NR Description: F22G5.7 [Arabidopsis thaliana]
  misc_feature (119)..(325): Homolog of NCBI NO: 8778538 NR Description: F22G5.7 [Arabidopsis thaliana]
  misc_feature (326)..(506): Homolog of NCBI NO: 8778538 NR Description: F22G5.7 [Arabidopsis thaliana]
MLHIVHAQDQIGFISVDCGLAPRESPYNEAKTGLTYTSDDGLVNVGKPGRIAKEFEPLADKPTLTLRYFPEGVRNCYNLNVTSDTNYLIKATFVYGNYDGLNVGPNFDLYFGPNLWTTVCLIKTGISIPFINVLELRPMKKNMYVTQGESLNYLFRVYISNSSTRIRFPDDVYDRKWYPYFDNSWTQVTTTLDVNTSLTYELPQSVMAKAATPIKANDTLNITWTVEPPTTKFYSYMHFAELQTLRANDAREFNVTMNGIYTYGPYSPKPLKTETIYDKIPEQCDGGACLLQVVKTLKSTLPPLLNAIEAFTVIDFPQMETNGDDVDAIKNVQDTYGISRISWQGDPCVPKLFLWDGLNCNNSDNSTSPIITSLDLSSSGLTGSITQAIQNLTNLQELDLSDNNLTGEIPDFLGDIKSLLVINLSGNNLSGSVPPSLLQKKGMKLNVEGNPHLLCTADSCVKKGEDGHKKKSVIVPVVASIASIAVLIGALVLFFILRKKKSPKVEGPPPSYMQASDGRSPRSSEPAIVTKNRRFTYSQVAIMTNNFQRILGKGGFGMVYHGFVNGTEQVAVKILSHSSSQGYKEFKAEVELLLRVHHKNLVGLVGYCDEGENMALIYEYMANGDLKEHMSGTRNRFTLNWGTRLKIVVESAQGLEYLHNGCKPPMVHRDVKTTNILLNEHFQAKLADFGLSRSFPIEGETHVSTVVAGTPGYLDPEYYKTNWLTEKSDVYSFGIVLLELITNRPVIDKSREKPHIAEWVGVMLTKGDINSIMDPNLNEDYDSGSVWKAVELAMSCLNPSSARRPTMSQVVIELNECIASENSRGGASRDMDSKSSIEVSLTFDTELSPTAR

SEQ ID NO: 71421 - protein, 714 aa, Arabidopsis thaliana
  peptide (1)..(714): Ceres Seq. ID no. 3598388
  misc_feature: Pfam Name: Pkinase Pfam Description: Protein kinase domain
  misc_feature (127)..(451): Homolog of NCBI NO: 15238490 NR Description: leucine-rich repeat transmembrane protein kinase,
  misc_feature (28)..(714): Homolog of NCBI NO: 25387133 NR Description: probable protein kinase [imported] - Arabidopsis >gi|9802785|gb|AAF99854.1|AC015448_4 Putative protein kinase
  misc_feature (28)..(366): Homolog of NCBI NO: 15218048 NR Description: light repressible receptor protein kinase,
  misc_feature (381)..(714): Homolog of NCBI NO: 15218048 NR Description: light repressible receptor protein kinase,
  misc_feature (166)..(714): Homolog of NCBI NO: 15228118 NR Description: putative receptor-like protein kinase; protein id:
  misc_feature (1)..(121): Homolog of NCBI NO: 15228118 NR Description: putative receptor-like protein kinase; protein id:
  misc_feature (1)..(714): Homolog of NCBI NO: 39104601 NR Description: unknown protein [Arabidopsis thaliana]
  misc_feature (392)..(680): Homolog of NCBI NO: 8778538 NR Description: F22G5.7 [Arabidopsis thaliana]
  misc_feature (1)..(187): Homolog of NCBI NO: 8778538 NR Description: F22G5.7 [Arabidopsis thaliana]
  misc_feature (188)..(368): Homolog of NCBI NO: 8778538 NR Description: F22G5.7 [Arabidopsis thaliana]
MKKNMYVTQGESLNYLFRVYISNSSTRIRFPDDVYDRKWYPYFDNSWTQVTTTLDVNTSLTYELPQSVMAKAATPIKANDTLNITWTVEPPTTKFYSYMHFAELQTLRANDAREFNVTMNGIYTYGPYSPKPLKTETIYDKIPEQCDGGACLLQVVKTLKSTLPPLLNAIEAFTVIDFPQMETNGDDVDAIKNVQDTYGISRISWQGDPCVPKLFLWDGLNCNNSDNSTSPIITSLDLSSSGLTGSITQAIQNLTNLQELDLSDNNLTGEIPDFLGDIKSLLVINLSGNNLSGSVPPSLLQKKGMKLNVEGNPHLLCTADSCVKKGEDGHKKKSVIVPVVASIASIAVLIGALVLFFILRKKKSPKVEGPPPSYMQASDGRSPRSSEPAIVTKNRRFTYSQVAIMTNNFQRILGKGGFGMVYHGFVNGTEQVAVKILSHSSSQGYKEFKAEVELLLRVHHKNLVGLVGYCDEGENMALIYEYMANGDLKEHMSGTRNRFTLNWGTRLKIVVESAQGLEYLHNGCKPPMVHRDVKTTNILLNEHFQAKLADFGLSRSFPIEGETHVSTVVAGTPGYLDPEYYKTNWLTEKSDVYSFGIVLLELITNRPVIDKSREKPHIAEWVGVMLTKGDINSIMDPNLNEDYDSGSVWKAVELAMSCLNPSSARRPTMSQVVIELNECIASENSRGGASRDMDSKSSIEVSLTFDTELSPTAR

SEQ ID NO: 71422 - DNA, 2682 bp, Arabidopsis thaliana
  misc_feature (1)..(2682): Ceres Seq. ID no. 3598389
  misc_feature: MA Experiment ID: 20000314 Result: Up-regulated in Transcription
  misc_feature: MA Experiment 20000314 PARAMETER Experiment Name: At_14day_Shoots-Roots_Sub_P Parameter: Age (day) Value: 14
  misc_feature: MA Experiment 20000314 PARAMETER Experiment Name: At_14day_Shoots-Roots_Sub_P Parameter: Organism Value: A. thaliana
  misc_feature: MA Experiment 20000314 PARAMETER Experiment Name: At_14day_Shoots-Roots_Sub_P Parameter: Plant Line Value: WS
  misc_feature: MA Experiment 20000314 PARAMETER Experiment Name: At_14day_Shoots-Roots_Sub_P Parameter: Tissue Value: Roots vs. Whole Plant
  misc_feature: MA Experiment ID: 20000347 Result: Up-regulated in Transcription
  misc_feature: MA Experiment 20000347 PARAMETER Experiment Name: At_2mM_SA_Sub_P Parameter: Age (day) Value: 14
  misc_feature: MA Experiment 20000347 PARAMETER Experiment Name: At_2mM_SA_Sub_P Parameter: Organism Value: A. thaliana
  misc_feature: MA Experiment 20000347 PARAMETER Experiment Name: At_2mM_SA_Sub_P Parameter: Plant Line Value: WS
  misc_feature: MA Experiment 20000347 PARAMETER Experiment Name: At_2mM_SA_Sub_P Parameter: Timepoint (hr) Value: 6
  misc_feature: MA Experiment 20000347 PARAMETER Experiment Name: At_2mM_SA_Sub_P Parameter: Tissue Value: Aerial
  misc_feature: MA Experiment 20000347 PARAMETER Experiment Name: At_2mM_SA_Sub_P Parameter: Treatment Value: 2mM SA vs. No Treatment
  misc_feature: MA Experiment ID: 20000348 Result: Up-regulated in Transcription
  misc_feature: MA Experiment 20000348 PARAMETER Experiment Name: At_100uM_ABA_Sub_P Parameter: Age (day) Value: 14
  misc_feature: MA Experiment 20000348 PARAMETER Experiment Name: At_100uM_ABA_Sub_P Parameter: Organism Value: A. thaliana
  misc_feature: MA Experiment 20000348 PARAMETER Experiment Name: At_100uM_ABA_Sub_P Parameter: Plant Line Value: WS
  misc_feature: MA Experiment 20000348 PARAMETER Experiment Name: At_100uM_ABA_Sub_P Parameter: Timepoint (hr) Value: 1
  misc_feature: MA Experiment 20000348 PARAMETER Experiment Name: At_100uM_ABA_Sub_P Parameter: Tissue Value: Aerial
  misc_feature: MA Experiment 20000348 PARAMETER Experiment Name: At_100uM_ABA_Sub_P Parameter: Treatment Value: 100uM ABA vs. No Treatment
  misc_feature: MA Experiment ID: 20000355 Result: Down-regulated in Transcription
  misc_feature: MA Experiment 20000355 PARAMETER Experiment Name: At_Siliques_Sub_P Parameter: Age (day) Value: 21
  misc_feature: MA Experiment 20000355 PARAMETER Experiment Name: At_Siliques_Sub_P Parameter: Organism Value: A. thaliana
  misc_feature: MA Experiment 20000355 PARAMETER Experiment Name: At_Siliques_Sub_P Parameter: Plant Line Value: WS
  misc_feature: MA Experiment 20000355 PARAMETER Experiment Name: At_Siliques_Sub_P Parameter: Tissue Value: Less Than 5mm Siliques vs. Whole Plant
  misc_feature: MA Experiment ID: 20000440 Result: Down-regulated in Transcription
  misc_feature: MA Experiment 20000440 PARAMETER Experiment Name: At_Closed-Flower__Sub_P Parameter: Tissue Value: Closed Flower vs. Whole Plant
atgaaatctcttcactggtttttgcatcttttgatcatagcttttaccgttttgagatcagtggaagctcaaaatcaagcaggatttattagtttggattgtgggttggtgcctaaggaaactacttatacagagaagtcgacgaatataacatacaaatcagacgtggattacatcgacagtggattggtcggaaagatcaatgatgcatacaaaactcagtttcagcaacaggtttgggccgtgagaagcttccctgtaggtcaaagaaactgttacaatgtcaacctcacggcaaacaacaaatatttgatcagaggaacctttgtgtatgggaattatgatggcctgaatcagttcccaagttttgatcttcatatcggtcctaacaaatggtcgtctgttaaaatactaggagtaacaaatacttctatgcatgagataatccatgtcgtaccacaagatagtcttgaagtttgtcttgttaagactggaccgacgacaccattcatttcgtcgctggaggttcgtccattgaacaatgaaagttatctcacgcaaagtggatcattgatgttgttcgccagagtatactttccatccagttcatcatctttcattaggtatgatgaggacatacatgaccgtgtttggaattcattcacagatgatgaaaccgtctggataagtacagacctcccgatcgatacaagtaactcctatgacatgcctcaatccgtgatgaagacagctgctgtccctaaaaatgctagtgagccatggctcttatggtggactcttgatgagaacaccgcacaatcatatgtatatatgcatttcgccgaagtccagaatcttacagcaaatgaaaccagagaattcaacattacttacaatggtggtctacgttggttcagctatttgaggcctcctaatctcagcatttcaacgatctttaatccaagggcagtgagttcttcaaatgggatatttaatttcacattcgcaatgacgggtaactcaactctgcctccccttctcaacgccctcgagatttatacagtcgtagacattctacagctagagacaaacaaagatgaaggcaagtgtgtttctgctatgatgaacatcaaagaaacatatggtttaagcaaaaagataagctggcaaggagatccgtgtgctcctcagctttatcggtgggaaggtttaaattgtagttatccggactccgagggatcaagaatcatatccttgaacttgaatgggagcgagttgacaggttctataacatctgacatatccaagctaacactgttgacagtattagatttatcaaataatgatttatcaggagatattccaacattttttgctgagatgaagtcgttgaaactcataaacttaagtggaaacccgaaccttaatctcacagcaattccagactctcttcagcaaagggtaaacagcaaatctttaacactaattttgggtgaaaacctgactctgactcccaaaaaagagagtaaaaaggttcccatggttgctatcgcagcgtcagtggctggcgtgttcgctctgctcgttatcttagccatattttttgtcattaaaaggaaaaatgtgaaagctcataagtctccaggaccacccccattagtcactcccggtatagttaaaagtgagacaagatcatccaatccatcaatcataacaagggaacgcaagatcacgtatccagaggtactgaagatgactaataacttcgagagagttcttggcaaaggaggctttggaacagtgtatcatggaaacttggatggtgctgaagtggcagtgaaaatgctttctcattcatcagctcaaggttataaagagttcaaagcagaggttgaacttcttttaagagttcaccatagacatttggtgggacttgtgggttactgtgatgatggagacaacttggctctgatttatgaatatatggcaaatggagacctgagggagaatatgtcaggaaaacgtggaggcaatgtccttacctgggaaaacaggatgcaaatagctgtagaggctgcacaagggctggagtatctgcacaatggatgtaggcctcctatggtacatagagatgttaaaactactaacattttattgaatgagcggtgtggagcaaaactagccgactttgggctctcgagatctttcccaatcgatggcgaatgtcatgtttcgacagtggttgcgggtacacctggttacctagacccggagtactacagaacaaactggctaagcgagaagagtgacgtgtacagcttcggtgtagtgctattagagatagtcacaaaccagcctgtgatagataaaacccgggagagacctcacatcaatgactgggttgggttcatgctcactaaaggagacatcaagagcatcgttgacccgaaactgatgggggactatgatacaaacggtgcatggaagattgtggagctagctctggcctgtgtgaacccatcttcgaaccggagaccaacaatggcacacgttgtgatggagctaaacgactgtgtggccttagaaaatgcaaggcggcaaggtagtgaagagatgtactcaatgggttctgttgactatagtctctcttctacttctgactttgctcctggagccagataa

SEQ ID NO: 71423 - protein, 893 aa, Arabidopsis thaliana
  peptide (1)..(893): Ceres Seq. ID no. 3598390
  misc_feature (468)..(893): Homolog of NCBI NO: 15218075 NR Description: light repressible receptor protein kinase,
  misc_feature (1)..(364): Homolog of NCBI NO: 15218075 NR Description: light repressible receptor protein kinase,
  misc_feature (7)..(528): Homolog of NCBI NO: 15218059 NR Description: light repressible receptor protein kinase,
  misc_feature (672)..(893): Homolog of NCBI NO: 15218059 NR Description: light repressible receptor protein kinase,
  misc_feature (10)..(893): Homolog of NCBI NO: 9294681 NR Description: receptor-like protein kinase [Arabidopsis
  misc_feature (10)..(540): Homolog of NCBI NO: 15232537 NR Description: serine/threonine-specific protein kinase,
  misc_feature (560)..(893): Homolog of NCBI NO: 15232537 NR Description: serine/threonine-specific protein kinase,
  misc_feature (401)..(674): Homolog of NCBI NO: 15218059 NR Description: light repressible receptor protein kinase,
  misc_feature (16)..(886): Homolog of NCBI NO: 8778538 NR Description: F22G5.7 [Arabidopsis thaliana]
  misc_feature (261)..(630): Homolog of NCBI NO: 15238490 NR Description: leucine-rich repeat transmembrane protein kinase,
MKSLHWFLHLLIIAFTVLRSVEAQNQAGFISLDCGLVPKETTYTEKSTNITYKSDVDYIDSGLVGKINDAYKTQFQQQVWAVRSFPVGQRNCYNVNLTANNKYLIRGTFVYGNYDGLNQFPSFDLHIGPNKWSSVKILGVTNTSMHEIIHVVPQDSLEVCLVKTGPTTPFISSLEVRPLNNESYLTQSGSLMLFARVYFPSSSSSFIRYDEDIHDRVWNSFTDDETVWISTDLPIDTSNSYDMPQSVMKTAAVPKNASEPWLLWWTLDENTAQSYVYMHFAEVQNLTANETREFNITYNGGLRWFSYLRPPNLSISTIFNPRAVSSSNGIFNFTFAMTGNSTLPPLLNALEIYTVVDILQLETNKDEGKCVSAMMNIKETYGLSKKISWQGDPCAPQLYRWEGLNCSYPDSEGSRIISLNLNGSELTGSITSDISKLTLLTVLDLSNNDLSGDIPTFFAEMKSLKLINLSGNPNLNLTAIPDSLQQRVNSKSLTLILGENLTLTPKKESKKVPMVAIAASVAGVFALLVILAIFFVIKRKNVKAHKSPGPPPLVTPGIVKSETRSSNPSIITRERKITYPEVLKMTNNFERVLGKGGFGTVYHGNLDGAEVAVKMLSHSSAQGYKEFKAEVELLLRVHHRHLVGLVGYCDDGDNLALIYEYMANGDLRENMSGKRGGNVLTWENRMQIAVEAAQGLEYLHNGCRPPMVHRDVKTTNILLNERCGAKLADFGLSRSFPIDGECHVSTVVAGTPGYLDPEYYRTNWLSEKSDVYSFGVVLLEIVTNQPVIDKTRERPHINDWVGFMLTKGDIKSIVDPKLMGDYDTNGAWKIVELALACVNPSSNRRPTMAHVVMELNDCVALENARRQGSEEMYSMGSVDYSLSSTSDFAPGAR

SEQ ID NO: 71424 - protein, 749 aa, Arabidopsis thaliana
  peptide (1)..(749): Ceres Seq. ID no. 3598391
  misc_feature (324)..(749): Homolog of NCBI NO: 15218075 NR Description: light repressible receptor protein kinase,
  misc_feature (1)..(220): Homolog of NCBI NO: 15218075 NR Description: light repressible receptor protein kinase,
  misc_feature (1)..(384): Homolog of NCBI NO: 15218059 NR Description: light repressible receptor protein kinase,
  misc_feature (528)..(749): Homolog of NCBI NO: 15218059 NR Description: light repressible receptor protein kinase,
  misc_feature (1)..(749): Homolog of NCBI NO: 9294681 NR Description: receptor-like protein kinase [Arabidopsis
  misc_feature (1)..(396): Homolog of NCBI NO: 15232537 NR Description: serine/threonine-specific protein kinase,
  misc_feature (416)..(749): Homolog of NCBI NO: 15232537 NR Description: serine/threonine-specific protein kinase,
  misc_feature (257)..(530): Homolog of NCBI NO: 15218059 NR Description: light repressible receptor protein kinase,
  misc_feature (1)..(742): Homolog of NCBI NO: 8778538 NR Description: F22G5.7 [Arabidopsis thaliana]
  misc_feature (117)..(486): Homolog of NCBI NO: 15238490 NR Description: leucine-rich repeat transmembrane protein kinase,
MHEIIHVVPQDSLEVCLVKTGPTTPFISSLEVRPLNNESYLTQSGSLMLFARVYFPSSSSSFIRYDEDIHDRVWNSFTDDETVWISTDLPIDTSNSYDMPQSVMKTAAVPKNASEPWLLWWTLDENTAQSYVYMHFAEVQNLTANETREFNITYNGGLRWFSYLRPPNLSISTIFNPRAVSSSNGIFNFTFAMTGNSTLPPLLNALEIYTVVDILQLETNKDEGKCVSAMMNIKETYGLSKKISWQGDPCAPQLYRWEGLNCSYPDSEGSRIISLNLNGSELTGSITSDISKLTLLTVLDLSNNDLSGDIPTFFAEMKSLKLINLSGNPNLNLTAIPDSLQQRVNSKSLTLILGENLTLTPKKESKKVPMVAIAASVAGVFALLVILAIFFVIKRKNVKAHKSPGPPPLVTPGIVKSETRSSNPSIITRERKITYPEVLKMTNNFERVLGKGGFGTVYHGNLDGAEVAVKMLSHSSAQGYKEFKAEVELLLRVHHRHLVGLVGYCDDGDNLALIYEYMANGDLRENMSGKRGGNVLTWENRMQIAVEAAQGLEYLHNGCRPPMVHRDVKTTNILLNERCGAKLADFGLSRSFPIDGECHVSTVVAGTPGYLDPEYYRTNWLSEKSDVYSFGVVLLEIVTNQPVIDKTRERPHINDWVGFMLTKGDIKSIVDPKLMGDYDTNGAWKIVELALACVNPSSNRRPTMAHVVMELNDCVALENARRQGSEEMYSMGSVDYSLSSTSDFAPGAR

SEQ ID NO: 71425 - protein, 702 aa, Arabidopsis thaliana
  peptide (1)..(702): Ceres Seq. ID no. 3598392
  misc_feature (277)..(702): Homolog of NCBI NO: 15218075 NR Description: light repressible receptor protein kinase,
  misc_feature (1)..(173): Homolog of NCBI NO: 15218075 NR Description: light repressible receptor protein kinase,
  misc_feature (1)..(337): Homolog of NCBI NO: 15218059 NR Description: light repressible receptor protein kinase,
  misc_feature (481)..(702): Homolog of NCBI NO: 15218059 NR Description: light repressible receptor protein kinase,
  misc_feature (1)..(702): Homolog of NCBI NO: 9294681 NR Description: receptor-like protein kinase [Arabidopsis
  misc_feature (1)..(349): Homolog of NCBI NO: 15232537 NR Description: serine/threonine-specific protein kinase,
  misc_feature (369)..(702): Homolog of NCBI NO: 15232537 NR Description: serine/threonine-specific protein kinase,
  misc_feature (210)..(483): Homolog of NCBI NO: 15218059 NR Description: light repressible receptor protein kinase,
  misc_feature (1)..(695): Homolog of NCBI NO: 8778538 NR Description: F22G5.7 [Arabidopsis thaliana]
  misc_feature (70)..(439): Homolog of NCBI NO: 15238490 NR Description: leucine-rich repeat transmembrane protein kinase,
MLFARVYFPSSSSSFIRYDEDIHDRVWNSFTDDETVWISTDLPIDTSNSYDMPQSVMKTAAVPKNASEPWLLWWTLDENTAQSYVYMHFAEVQNLTANETREFNITYNGGLRWFSYLRPPNLSISTIFNPRAVSSSNGIFNFTFAMTGNSTLPPLLNALEIYTVVDILQLETNKDEGKCVSAMMNIKETYGLSKKISWQGDPCAPQLYRWEGLNCSYPDSEGSRIISLNLNGSELTGSITSDISKLTLLTVLDLSNNDLSGDIPTFFAEMKSLKLINLSGNPNLNLTAIPDSLQQRVNSKSLTLILGENLTLTPKKESKKVPMVAIAASVAGVFALLVILAIFFVIKRKNVKAHKSPGPPPLVTPGIVKSETRSSNPSIITRERKITYPEVLKMTNNFERVLGKGGFGTVYHGNLDGAEVAVKMLSHSSAQGYKEFKAEVELLLRVHHRHLVGLVGYCDDGDNLALIYEYMANGDLRENMSGKRGGNVLTWENRMQIAVEAAQGLEYLHNGCRPPMVHRDVKTTNILLNERCGAKLADFGLSRSFPIDGECHVSTVVAGTPGYLDPEYYRTNWLSEKSDVYSFGVVLLEIVTNQPVIDKTRERPHINDWVGFMLTKGDIKSIVDPKLMGDYDTNGAWKIVELALACVNPSSNRRPTMAHVVMELNDCVALENARRQGSEEMYSMGSVDYSLSSTSDFAPGAR

SEQ ID NO: 71426 - DNA, 2568 bp, Arabidopsis thaliana
  misc_feature (1)..(2568): Ceres Seq. ID no. 3598409
  misc_feature: MA Experiment ID: 20000355 Result: Up-regulated in Transcription
  misc_feature: MA Experiment 20000355 PARAMETER Experiment Name: At_Siliques_Sub_P Parameter: Age (day) Value: 21
  misc_feature: MA Experiment 20000355 PARAMETER Experiment Name: At_Siliques_Sub_P Parameter: Organism Value: A. thaliana
  misc_feature: MA Experiment 20000355 PARAMETER Experiment Name: At_Siliques_Sub_P Parameter: Plant Line Value: WS
  misc_feature: MA Experiment 20000355 PARAMETER Experiment Name: At_Siliques_Sub_P Parameter: Tissue Value: Less Than 5mm Siliques vs. Whole Plant
atgaagactatgaatgggtttttgcttctctcgactatagcttttgccgtttttcacttagtccaagctcaatctcaatcaggttttatcagcttggattgtggactaattcctaaggacacaacctataccgagcagataacgaacataacatacatatcagacgcggattacatcgatagtggattaaccgaaaggatcagtgattcatacaagtcacagcttcagcaacagacttggaccttaagaagcttccctgaaggtcaaagaaattgttacaacttcaatctcaaagcgaatctcaaatatctgattagaggaacgtttgtgtatgggaattatgatggtttgaatcaaatgcctaagtttgatcttcatattggtcctaataaatggacttctgttatattggaaggagtagcaaatgctaccatcttcgagataattcatgtcttaacacaagaccgtctccaagtttgtcttgtcaaaacaggacaaacgacaccgtttatatcgtcgttggaacttcgtccgttgaacaatgatacttacgtcactcaaggtgggtcgttgatgtcctttgccagaatctactttccaaagactgcatacttcctcaggtattctgatgacttgtatgaccgagtttgggttccattcagccagaatgaaacagtgtcgttaagtaccaatctaccggttgatacaagtagcaattcctacaatgtgcctcaaaatgtggcgaattccgcaattattccggcggaagctactcatcctctcaacatatggtgggatctccaaaacatcaatgcaccgtcatatgtatacatgcattttgcagaaatccaaaatcttaaagctaatgacatcagagaattcaacattacatacaatggtggtcaggtttgggaaagttccattagacctcacaatctcagcatcactacaatctctagtccaacagctttaaattcttcagatgggtttttcaatttcacttttacaatgaccacaacctctactcttcctccacttatcaatgccctcgaggtttatacacttgtagaaaatttactgctcgagacatatcaagatgaagtttctgctatgatgaacatcaagaaaacatatggattgagtaaaaagataagttggcaaggagatccatgttctcctcaaatatatagatgggaaggtctgaattgcctttatttggactctgatcaacctctgatcacatcattagatttatcagataatgatttatccggagagattccagattttcttgctgatatgaagatgttgacactagtaaacttaaaaggaaacccgaagctcaacctcacagttccagattctattaagcataggataaacaacaaatctttaaaactaattatagatgaaaaccagagtagtgaaaaacacggtataaagtttcctttggttgctatcttagcatcagtggctggtgtgatcgcattactagctatctttaccatatgtgtcatttttaaaagagaaaaacagggaagtggtgaagctccaactagggttaatactgagatcagatcatcctatcaatcaatcgaaacaaaggatcgaaaatttacgtattccgagatactaaagatgacgaataactttgagagagttcttggtaaaggaggatatggaagagtgtattatggaaaattggatgatactgaagtagctgtgaaaatgctctttcattcctcagctgaacaagattataaacatttcaaagcagaggttgaactacttttaagagtccaccatagacatttggtgggacttgttggttactgtgatgatggagataactttgccttgatttatgaatacatggcaaatggagacttgaaggagaatatgtctggaaaccgcagtggacatgttctaagttgggaaaacagaatgcaaatagctatggaggcagcacaaggattggagtatctacataatggaagtagaccacctatggtccatagagatgtgaaaactactaacattttattgaatgagctgtatcaagcgaaactagctgattttgggctctctagatcttccccggtggatggtgaatcttatgtatcaacaatcgttgccggaacacctggttacttagaccctgagtactatagaacaaacttgttaagcgagaagactgatgtgtacagctttggggtagttttattagaaatcatcacaaaccagcctgtgattgatacaacccgcgagaaagcgcatattacagattgggttggatttaagctcatggaaggagacattaggaatattattgacccgaaactgattaaggaatttgatacaaacggtgtgtggaaggctgtggagttggctttgtcttgtgtaaaccctacgtcaaaccatagaccgacgatgccacatgttgtgatggagctaaaagagtgtctggactctgagattgccaggaaacaaggtagtcaagacatgttttctagagattctattgaattaaccttctctcctactggattctcacctggaccgaggtga

SEQ ID NO: 71427 - protein, 855 aa, Arabidopsis thaliana
  peptide (1)..(855): Ceres Seq. ID no. 3598410
  misc_feature (1)..(855): Homolog of NCBI NO: 25405503 NR Description: probable protein kinase [imported] - Arabidopsis >gi|9802787|gb|AAF99856.1|AC015448_6 Putative protein kinase
  misc_feature (386)..(852): Homolog of NCBI NO: 25387121 NR Description: probable protein kinase [imported] - Arabidopsis >gi|9802790|gb|AAF99859.1|AC015448_9 Putative protein kinase
  misc_feature (7)..(445): Homolog of NCBI NO: 25387121 NR Description: probable protein kinase [imported] - Arabidopsis >gi|9802790|gb|AAF99859.1|AC015448_9 Putative protein kinase
  misc_feature (1)..(468): Homolog of NCBI NO: 25387105 NR Description: probable protein kinase [imported] - Arabidopsis >gi|9802789|gb|AAF99858.1|AC015448_8 Putative protein kinase
  misc_feature (413)..(855): Homolog of NCBI NO: 25387105 NR Description: probable protein kinase [imported] - Arabidopsis >gi|9802789|gb|AAF99858.1|AC015448_8 Putative protein kinase
  misc_feature (7)..(636): Homolog of NCBI NO: 15218059 NR Description: light repressible receptor protein kinase,
  misc_feature (615)..(852): Homolog of NCBI NO: 15218059 NR Description: light repressible receptor protein kinase,
  misc_feature (1)..(855): Homolog of NCBI NO: 25405505 NR Description: probable protein kinase [imported] - Arabidopsis >gi|9802788|gb|AAF99857.1|AC015448_7 Putative protein kinase
  misc_feature (1)..(457): Homolog of NCBI NO: 15218054 NR Description: receptor-like protein kinase, putative; protein
  misc_feature (433)..(855): Homolog of NCBI NO: 15218054 NR Description: receptor-like protein kinase, putative; protein
MKTMNGFLLLSTIAFAVFHLVQAQSQSGFISLDCGLIPKDTTYTEQITNITYISDADYIDSGLTERISDSYKSQLQQQTWTLRSFPEGQRNCYNFNLKANLKYLIRGTFVYGNYDGLNQMPKFDLHIGPNKWTSVILEGVANATIFEIIHVLTQDRLQVCLVKTGQTTPFISSLELRPLNNDTYVTQGGSLMSFARIYFPKTAYFLRYSDDLYDRVWVPFSQNETVSLSTNLPVDTSSNSYNVPQNVANSAIIPAEATHPLNIWWDLQNINAPSYVYMHFAEIQNLKANDIREFNITYNGGQVWESSIRPHNLSITTISSPTALNSSDGFFNFTFTMTTTSTLPPLINALEVYTLVENLLLETYQDEVSAMMNIKKTYGLSKKISWQGDPCSPQIYRWEGLNCLYLDSDQPLITSLDLSDNDLSGEIPDFLADMKMLTLVNLKGNPKLNLTVPDSIKHRINNKSLKLIIDENQSSEKHGIKFPLVAILASVAGVIALLAIFTICVIFKREKQGSGEAPTRVNTEIRSSYQSIETKDRKFTYSEILKMTNNFERVLGKGGYGRVYYGKLDDTEVAVKMLFHSSAEQDYKHFKAEVELLLRVHHRHLVGLVGYCDDGDNFALIYEYMANGDLKENMSGNRSGHVLSWENRMQIAMEAAQGLEYLHNGSRPPMVHRDVKTTNILLNELYQAKLADFGLSRSSPVDGESYVSTIVAGTPGYLDPEYYRTNLLSEKTDVYSFGVVLLEIITNQPVIDTTREKAHITDWVGFKLMEGDIRNIIDPKLIKEFDTNGVWKAVELALSCVNPTSNHRPTMPHVVMELKECLDSEIARKQGSQDMFSRDSIELTFSPTGFSPGPR

SEQ ID NO: 71428 - protein, 852 aa, Arabidopsis thaliana
  peptide (1)..(852): Ceres Seq. ID no. 3598411
  misc_feature (1)..(852): Homolog of NCBI NO: 25405503 NR Description: probable protein kinase [imported] - Arabidopsis >gi|9802787|gb|AAF99856.1|AC015448_6 Putative protein kinase
  misc_feature (383)..(849): Homolog of NCBI NO: 25387121 NR Description: probable protein kinase [imported] - Arabidopsis >gi|9802790|gb|AAF99859.1|AC015448_9 Putative protein kinase
  misc_feature (4)..(442): Homolog of NCBI NO: 25387121 NR Description: probable protein kinase [imported] - Arabidopsis >gi|9802790|gb|AAF99859.1|AC015448_9 Putative protein kinase
  misc_feature (1)..(465): Homolog of NCBI NO: 25387105 NR Description: probable protein kinase [imported] - Arabidopsis >gi|9802789|gb|AAF99858.1|AC015448_8 Putative protein kinase
  misc_feature (410)..(852): Homolog of NCBI NO: 25387105 NR Description: probable protein kinase [imported] - Arabidopsis >gi|9802789|gb|AAF99858.1|AC015448_8 Putative protein kinase
  misc_feature (4)..(633): Homolog of NCBI NO: 15218059 NR Description: light repressible receptor protein kinase,
  misc_feature (612)..(849): Homolog of NCBI NO: 15218059 NR Description: light repressible receptor protein kinase,
  misc_feature (1)..(852): Homolog of NCBI NO: 25405505 NR Description: probable protein kinase [imported] - Arabidopsis >gi|9802788|gb|AAF99857.1|AC015448_7 Putative protein kinase
  misc_feature (1)..(454): Homolog of NCBI NO: 15218054 NR Description: receptor-like protein kinase, putative; protein
  misc_feature (430)..(852): Homolog of NCBI NO: 15218054 NR Description: receptor-like protein kinase, putative; protein
MNGFLLLSTIAFAVFHLVQAQSQSGFISLDCGLIPKDTTYTEQITNITYISDADYIDSGLTERISDSYKSQLQQQTWTLRSFPEGQRNCYNFNLKANLKYLIRGTFVYGNYDGLNQMPKFDLHIGPNKWTSVILEGVANATIFEIIHVLTQDRLQVCLVKTGQTTPFISSLELRPLNNDTYVTQGGSLMSFARIYFPKTAYFLRYSDDLYDRVWVPFSQNETVSLSTNLPVDTSSNSYNVPQNVANSAIIPAEATHPLNIWWDLQNINAPSYVYMHFAEIQNLKANDIREFNITYNGGQVWESSIRPHNLSITTISSPTALNSSDGFFNFTFTMTTTSTLPPLINALEVYTLVENLLLETYQDEVSAMMNIKKTYGLSKKISWQGDPCSPQIYRWEGLNCLYLDSDQPLITSLDLSDNDLSGEIPDFLADMKMLTLVNLKGNPKLNLTVPDSIKHRINNKSLKLIIDENQSSEKHGIKFPLVAILASVAGVIALLAIFTICVIFKREKQGSGEAPTRVNTEIRSSYQSIETKDRKFTYSEILKMTNNFERVLGKGGYGRVYYGKLDDTEVAVKMLFHSSAEQDYKHFKAEVELLLRVHHRHLVGLVGYCDDGDNFALIYEYMANGDLKENMSGNRSGHVLSWENRMQIAMEAAQGLEYLHNGSRPPMVHRDVKTTNILLNELYQAKLADFGLSRSSPVDGESYVSTIVAGTPGYLDPEYYRTNLLSEKTDVYSFGVVLLEIITNQPVIDTTREKAHITDWVGFKLMEGDIRNIIDPKLIKEFDTNGVWKAVELALSCVNPTSNHRPTMPHVVMELKECLDSEIARKQGSQDMFSRDSIELTFSPTGFSPGPR

SEQ ID NO: 71429 - protein, 736 aa, Arabidopsis thaliana
  peptide (1)..(736): Ceres Seq. ID no. 3598412
  misc_feature (1)..(736): Homolog of NCBI NO: 25405503 NR Description: probable protein kinase [imported] - Arabidopsis >gi|9802787|gb|AAF99856.1|AC015448_6 Putative protein kinase
  misc_feature (267)..(733): Homolog of NCBI NO: 25387121 NR Description: probable protein kinase [imported] - Arabidopsis >gi|9802790|gb|AAF99859.1|AC015448_9 Putative protein kinase
  misc_feature (1)..(326): Homolog of NCBI NO: 25387121 NR Description: probable protein kinase [imported] - Arabidopsis >gi|9802790|gb|AAF99859.1|AC015448_9 Putative protein kinase
  misc_feature (1)..(349): Homolog of NCBI NO: 25387105 NR Description: probable protein kinase [imported] - Arabidopsis >gi|9802789|gb|AAF99858.1|AC015448_8 Putative protein kinase
  misc_feature (294)..(736): Homolog of NCBI NO: 25387105 NR Description: probable protein kinase [imported] - Arabidopsis >gi|9802789|gb|AAF99858.1|AC015448_8 Putative protein kinase
  misc_feature (1)..(517): Homolog of NCBI NO: 15218059 NR Description: light repressible receptor protein kinase,
  misc_feature (496)..(733): Homolog of NCBI NO: 15218059 NR Description: light repressible receptor protein kinase,
  misc_feature (1)..(736): Homolog of NCBI NO: 25405505 NR Description: probable protein kinase [imported] - Arabidopsis >gi|9802788|gb|AAF99857.1|AC015448_7 Putative protein kinase
  misc_feature (1)..(338): Homolog of NCBI NO: 15218054 NR Description: receptor-like protein kinase, putative; protein
  misc_feature (314)..(736): Homolog of NCBI NO: 15218054 NR Description: receptor-like protein kinase, putative; protein
MPKFDLHIGPNKWTSVILEGVANATIFEIIHVLTQDRLQVCLVKTGQTTPFISSLELRPLNNDTYVTQGGSLMSFARIYFPKTAYFLRYSDDLYDRVWVPFSQNETVSLSTNLPVDTSSNSYNVPQNVANSAIIPAEATHPLNIWWDLQNINAPSYVYMHFAEIQNLKANDIREFNITYNGGQVWESSIRPHNLSITTISSPTALNSSDGFFNFTFTMTTTSTLPPLINALEVYTLVENLLLETYQDEVSAMMNIKKTYGLSKKISWQGDPCSPQIYRWEGLNCLYLDSDQPLITSLDLSDNDLSGEIPDFLADMKMLTLVNLKGNPKLNLTVPDSIKHRINNKSLKLIIDENQSSEKHGIKFPLVAILASVAGVIALLAIFTICVIFKREKQGSGEAPTRVNTEIRSSYQSIETKDRKFTYSEILKMTNNFERVLGKGGYGRVYYGKLDDTEVAVKMLFHSSAEQDYKHFKAEVELLLRVHHRHLVGLVGYCDDGDNFALIYEYMANGDLKENMSGNRSGHVLSWENRMQIAMEAAQGLEYLHNGSRPPMVHRDVKTTNILLNELYQAKLADFGLSRSSPVDGESYVSTIVAGTPGYLDPEYYRTNLLSEKTDVYSFGVVLLEIITNQPVIDTTREKAHITDWVGFKLMEGDIRNIIDPKLIKEFDTNGVWKAVELALSCVNPTSNHRPTMPHVVMELKECLDSEIARKQGSQDMFSRDSIELTFSPTGFSPGPR

SEQ ID NO: 71430 - DNA, 1479 bp, Arabidopsis thaliana
  misc_feature (1)..(1479): Ceres Seq. ID no. 3598783
  misc_feature: MA Experiment ID: 20000307 Result: Up-regulated in Transcription
  misc_feature: MA Experiment 20000307 PARAMETER Experiment Name: At_Germinating_Seeds_Sub_P Parameter: Age (hr) Value: 24 vs. 0
  misc_feature: MA Experiment 20000307 PARAMETER Experiment Name: At_Germinating_Seeds_Sub_P Parameter: Organism Value: A. thaliana
  misc_feature: MA Experiment 20000307 PARAMETER Experiment Name: At_Germinating_Seeds_Sub_P Parameter: Plant Line Value: WS
  misc_feature: MA Experiment 20000307 PARAMETER Experiment Name: At_Germinating_Seeds_Sub_P Parameter: Tissue Value: Germinating Seeds
  misc_feature: MA Experiment ID: 20000355 Result: Up-regulated in Transcription
  misc_feature: MA Experiment 20000355 PARAMETER Experiment Name: At_Siliques_Sub_P Parameter: Age (day) Value: 21
  misc_feature: MA Experiment 20000355 PARAMETER Experiment Name: At_Siliques_Sub_P Parameter: Organism Value: A. thaliana
  misc_feature: MA Experiment 20000355 PARAMETER Experiment Name: At_Siliques_Sub_P Parameter: Plant Line Value: WS
  misc_feature: MA Experiment 20000355 PARAMETER Experiment Name: At_Siliques_Sub_P Parameter: Tissue Value: Less Than 5mm Siliques vs. Whole Plant
  misc_feature: MA Experiment ID: 20000440 Result: Up-regulated in Transcription
  misc_feature: MA Experiment 20000440 PARAMETER Experiment Name: At_Closed-Flower__Sub_P Parameter: Tissue Value: Closed Flower vs. Whole Plant
atggccgtttcatcgtcgcatcatgcggttctcttcccttacatgtcaaaaggccacacgattcctctcctccaattcgcccgtctcctcctccgtcaccgccgtatcgtctccgtagacgacgaagaaccaaccatttccgtcaccgtcttcaccaccccaaaaaaccaaccattcgtctcaaacttcctctctgacgtcgcatcatctatcaaagtaatctccctccctttccctgaaaacatcgccggaatccctcccggcgtcgagagcaccgacatgctcccttccatatcactttacgtgcccttcacgcgcgcaaccaaatctctccagcctttcttcgaagcagaactcaagaatcttgagaaagtttctttcatggtctccgatggattcttatggtggacatcggaatccgccgctaaatttgagatcccgagacttgccttctacggcatgaactcctacgcatcggctatgtgctccgccatttcggtacacgagctctttaccaaaccggaaagtgttaaatctgatactgaaccggttactgtaccggattttccatggatatgtgttaagaagtgtgagttcgatccggttttgaccgaaccggatcaatcggatccagcgttcgagctactcattgaccatcttatgtccaccaagaaaagccgtggagttatagtgaacagcttttacgagctcgagtcaacgttcgttgactaccggctccgtgataacgatgaaccaaaaccgtggtgtgttgggcctttgtgtttggtaaatcctccaaaaccggagagtgataaaccggattggattcattggttggaccggaaactagaggaaagatgtccggttatgtatgtggcgtttggaacgcaggctgagatatcgaacgagcagctcaaggaaatagcattagggttggaagattccaaggtcaatttcttgtgggtcacgagaaaggacttggaagaagtaactggaggattagggttcgaaaagagagtgaaagagcatgggatgattgtgagagattgggtagaccaatgggagatattgtcacataaaagtgtcaaagggtttttgagtcattgtggatggaactcggcgcaagagagtatttgcgctggggttccactactcgcttggccaatgatggcagagcagccactcaatgcgaagttggtagtggaggagctaaagatcggagtaagaatcgaaacagaagatgtaagtgtgaaaggattcgtgacaagagaagaacttagtcgaaaggttaaacaattgatggagggagagatggggaagacaacgatgaagaatgtaaaagagtatgcgaaaatggcgaaaaaagctatggctcaagggactggttcgtcttggaagagtttggattcgcttctggaagagctttgtaagagtagagagccagacggtgttaataagttgtcaagttctgatgcttag

SEQ ID NO: 71431 - protein, 492 aa, Arabidopsis thaliana
  peptide (1)..(492): Ceres Seq. ID no. 3598784
  misc_feature (1)..(492): Homolog of NCBI NO: 15241515 NR Description: glucosyltransferase -like protein; protein id:
  misc_feature (1)..(486): Homolog of NCBI NO: 21553613 NR Description: putative glucosyltransferase [Arabidopsis
  misc_feature (1)..(486): Homolog of NCBI NO: 30679796 NR Description: glycosyltransferase family [Arabidopsis thaliana]
  misc_feature (8)..(478): Homolog of NCBI NO: 4914344 NR Description: F14N23.30 [Arabidopsis thaliana]
  misc_feature (1)..(317): Homolog of NCBI NO: 30679790 NR Description: glycosyltransferase family [Arabidopsis thaliana] putative glucosyltransferase [Arabidopsis thaliana]
  misc_feature (111)..(478): Homolog of NCBI NO: 30681693 NR Description: glycosyltransferase family [Arabidopsis thaliana]
  misc_feature (111)..(478): Homolog of NCBI NO: 26449653 NR Description: putative glucosyl transferase [Arabidopsis
  misc_feature (8)..(482): Homolog of NCBI NO: 21742764 NR Description: OSJNBa0023J03.6 [Oryza sativa (japonica
  misc_feature (4)..(482): Homolog of NCBI NO: 15228037 NR Description: putative glucosyl transferase; protein id: supported by cDNA: gi_17065333 [Arabidopsis thaliana]
  misc_feature (6)..(475): Homolog of NCBI NO: 15228034 NR Description: putative glucosyl transferase; protein id: supported by cDNA: gi_15028388, supported by cDNA: gi_19310660
MAVSSSHHAVLFPYMSKGHTIPLLQFARLLLRHRRIVSVDDEEPTISVTVFTTPKNQPFVSNFLSDVASSIKVISLPFPENIAGIPPGVESTDMLPSISLYVPFTRATKSLQPFFEAELKNLEKVSFMVSDGFLWWTSESAAKFEIPRLAFYGMNSYASAMCSAISVHELFTKPESVKSDTEPVTVPDFPWICVKKCEFDPVLTEPDQSDPAFELLIDHLMSTKKSRGVIVNSFYELESTFVDYRLRDNDEPKPWCVGPLCLVNPPKPESDKPDWIHWLDRKLEERCPVMYVAFGTQAEISNEQLKEIALGLEDSKVNFLWVTRKDLEEVTGGLGFEKRVKEHGMIVRDWVDQWEILSHKSVKGFLSHCGWNSAQESICAGVPLLAWPMMAEQPLNAKLVVEELKIGVRIETEDVSVKGFVTREELSRKVKQLMEGEMGKTTMKNVKEYAKMAKKAMAQGTGSSWKSLDSLLEELCKSREPDGVNKLSSSDA

SEQ ID NO: 71432 - protein, 478 aa, Arabidopsis thaliana
  peptide (1)..(478): Ceres Seq. ID no. 3598785
  misc_feature (1)..(478): Homolog of NCBI NO: 15241515 NR Description: glucosyltransferase -like protein; protein id:
  misc_feature (1)..(472): Homolog of NCBI NO: 21553613 NR Description: putative glucosyltransferase [Arabidopsis
  misc_feature (1)..(472): Homolog of NCBI NO: 30679796 NR Description: glycosyltransferase family [Arabidopsis thaliana]
  misc_feature (1)..(464): Homolog of NCBI NO: 4914344 NR Description: F14N23.30 [Arabidopsis thaliana]
  misc_feature (1)..(303): Homolog of NCBI NO: 30679790 NR Description: glycosyltransferase family [Arabidopsis thaliana] putative glucosyltransferase [Arabidopsis thaliana]
  misc_feature (97)..(464): Homolog of NCBI NO: 30681693 NR Description: glycosyltransferase family [Arabidopsis thaliana]
  misc_feature (97)..(464): Homolog of NCBI NO: 26449653 NR Description: putative glucosyl transferase [Arabidopsis
  misc_feature (1)..(468): Homolog of NCBI NO: 21742764 NR Description: OSJNBa0023J03.6 [Oryza sativa (japonica
  misc_feature (1)..(468): Homolog of NCBI NO: 15228037 NR Description: putative glucosyl transferase; protein id: supported by cDNA: gi_17065333 [Arabidopsis thaliana]
  misc_feature (1)..(461): Homolog of NCBI NO: 15228034 NR Description: putative glucosyl transferase; protein id: supported by cDNA: gi_15028388, supported by cDNA: gi_19310660
MSKGHTIPLLQFARLLLRHRRIVSVDDEEPTISVTVFTTPKNQPFVSNFLSDVASSIKVISLPFPENIAGIPPGVESTDMLPSISLYVPFTRATKSLQPFFEAELKNLEKVSFMVSDGFLWWTSESAAKFEIPRLAFYGMNSYASAMCSAISVHELFTKPESVKSDTEPVTVPDFPWICVKKCEFDPVLTEPDQSDPAFELLIDHLMSTKKSRGVIVNSFYELESTFVDYRLRDNDEPKPWCVGPLCLVNPPKPESDKPDWIHWLDRKLEERCPVMYVAFGTQAEISNEQLKEIALGLEDSKVNFLWVTRKDLEEVTGGLGFEKRVKEHGMIVRDWVDQWEILSHKSVKGFLSHCGWNSAQESICAGVPLLAWPMMAEQPLNAKLVVEELKIGVRIETEDVSVKGFVTREELSRKVKQLMEGEMGKTTMKNVKEYAKMAKKAMAQGTGSSWKSLDSLLEELCKSREPDGVNKLSSSDA

SEQ ID NO: 71433 - protein, 399 aa, Arabidopsis thaliana
  peptide (1)..(399): Ceres Seq. ID no. 3598786
  misc_feature (1)..(399): Homolog of NCBI NO: 15241515 NR Description: glucosyltransferase -like protein; protein id:
  misc_feature (1)..(393): Homolog of NCBI NO: 21553613 NR Description: putative glucosyltransferase [Arabidopsis
  misc_feature (1)..(393): Homolog of NCBI NO: 30679796 NR Description: glycosyltransferase family [Arabidopsis thaliana]
  misc_feature (1)..(385): Homolog of NCBI NO: 4914344 NR Description: F14N23.30 [Arabidopsis thaliana]
  misc_feature (1)..(224): Homolog of NCBI NO: 30679790 NR Description: glycosyltransferase family [Arabidopsis thaliana] putative glucosyltransferase [Arabidopsis thaliana]
  misc_feature (18)..(385): Homolog of NCBI NO: 30681693 NR Description: glycosyltransferase family [Arabidopsis thaliana]
  misc_feature (18)..(385): Homolog of NCBI NO: 26449653 NR Description: putative glucosyl transferase [Arabidopsis
  misc_feature (1)..(389): Homolog of NCBI NO: 21742764 NR Description: OSJNBa0023J03.6 [Oryza sativa (japonica
  misc_feature (1)..(389): Homolog of NCBI NO: 15228037 NR Description: putative glucosyl transferase; protein id: supported by cDNA: gi_17065333 [Arabidopsis thaliana]
  misc_feature (1)..(382): Homolog of NCBI NO: 15228034 NR Description: putative glucosyl transferase; protein id: supported by cDNA: gi_15028388, supported by cDNA: gi_19310660
MLPSISLYVPFTRATKSLQPFFEAELKNLEKVSFMVSDGFLWWTSESAAKFEIPRLAFYGMNSYASAMCSAISVHELFTKPESVKSDTEPVTVPDFPWICVKKCEFDPVLTEPDQSDPAFELLIDHLMSTKKSRGVIVNSFYELESTFVDYRLRDNDEPKPWCVGPLCLVNPPKPESDKPDWIHWLDRKLEERCPVMYVAFGTQAEISNEQLKEIALGLEDSKVNFLWVTRKDLEEVTGGLGFEKRVKEHGMIVRDWVDQWEILSHKSVKGFLSHCGWNSAQESICAGVPLLAWPMMAEQPLNAKLVVEELKIGVRIETEDVSVKGFVTREELSRKVKQLMEGEMGKTTMKNVKEYAKMAKKAMAQGTGSSWKSLDSLLEELCKSREPDGVNKLSSSDA

SEQ ID NO: 71434 - DNA, 2556 bp, Arabidopsis thaliana
  misc_feature (1)..(2556): Ceres Seq. ID no. 3599601
  misc_feature: MA Experiment ID: 20000227 Result: Down-regulated in Transcription
  misc_feature: MA Experiment 20000227 PARAMETER Experiment Name: At_Root-Tips-vs-Tops_P Parameter: Tissue Value: Root Tips vs. Root Tops
  misc_feature: Pfam Name: Pkinase Pfam Description: Protein kinase domain
atggaggatcgtcatcgttatctttttttcatatttgccattatacattatgttcaggctcaacaaggattcatcagtttggattgcgggttgccgagtaacgagcctccatatattgaaccggtaaccggattagtattctcatcggatgcggatcacatccctagtggaataagcggtagaatccagaagaatctggaagcagtacacataaagccgtatttgtttctgagatactttccagatgggctacgaaattgctatactctagatgtccttcagaaccgaagatacatgatcaaagctgtgtttgtgtatggaaattacgatggttataatgattatccgagttttgatctgtatctaggtcctaataagtgggtaagagttgacttggaaggaaaggtcaatggcagtgttgaagagattattcacataccaagttcaaactctctgcagatttgtcttgtcaagacaggtaattctttgccgttcatatccgccctggaactgaggcttttgagaaacgatacttatgttgtccaagacgtttccttgaagcatttatttcggaggtactatagacagtcagatcggttaatccggtatcctgacgatgtctatgatcgtgtttggtccccattcttcttaccggaatggacgcagataactaccagtttagatgtgaataactctaacaactacgagccaccaaaagcagcattaacatcagctgccacacctggagacaatggaacgcgattgaccattatttggactttggataaccctgatgagcaaattcacctgtatgttcactttgccgagcttgaacctgttggggaaaacactgacgaggccttgagaactttatttacaaggaccttttactttgtggtgaatggaaagattagttatgatgagagtattactcctttagacttggctgtaagtactgtagagactgtggtgaacaaatgcgatggcggtaactgcagtttgcagctggtacgcagcgaagcgtctccgggagtacgtgtacctctggttaatgctatggaggcattcactgcaatcaagtttccacattctgaaacaaatcctgatgatgtatggtatatctttaactctatgacagttatatctatcaaggttatccaagctacctatgaactgagcagagtcgactggcaaggagatccgtgtcttccccagcagtttttgtggactggcctaaactgcagctacatgaacatgtctacgtcaccaagaatcatttccttggacttgtcgaataacaagttgaccggaggtgtgcctgagtttctagccaacatgaagtcactgttgttcataaacctaagcaataacaatcttgttggttccattcctcaagcgcttcttgaccgaaaaaatctgaagttggagtttgaaggaaatccaaagctttgcgccacaggtccgtgtaacagttcaagtggaaataaagaaaccacagtcatagcacctgttgctgctgcaatagccatttttatagctgttttggttctcattattgttttcataaagaaaaggccatcaagtataagagctctacatccgtcacgggctaatttatctctggaaaataaaaaacgaaggatcacatattcagagatattgttgatgacaaataactttgaaagagttattggtgaaggagggtttggggtcgtctatcatggttatttgaatgatagtgagcaagtggctgttaaagtgctctctccgtcctcatctcaaggctataaagaattcaaagcagaggttgaacttctccttagagttcaccacataaatttggtaagccttgttggatattgtgatgaacaagcacacttagccctcatctacgagtacatggctaatggagacttaaaatcgcatctttcaggaaaacatggggactgtgttttaaaatgggaaaacagattaagcatagctgttgaaaccgcactaggattggagtacttgcatagtggatgcaaaccactaatggttcacagagatgtcaaaagcatgaatatactgttggatgagcacttccaagctaaactagcggatttcggactgtctagatctttttctgttggagaggaaagccatgtgtcgactggtgttgtaggcactcctggatacttagatcctgagtattacagaacatatcgcttgaccgaaaagagtgatgtctatagttttgggatcgtgttattggagataatcacaaatcaacccgtacttgagcaagctaacgaaaatcgacacatcgcagaacgtgtaaggactatgcttacaagaagtgatattagcaccattgttgatcctaacctcattggcgagtatgattctggttctgtgcggaaagctcttaaactagcgatgtcgtgtgtggatccatctccggttgcaagaccagacatgtcacatgttgttcaggagcttaaacagtgtatcaaatctgaaaacctgagactgaggacaggattgaaccaagtcatagactcgaaaagttcctag

SEQ ID NO: 71435 - protein, 851 aa, Arabidopsis thaliana
  peptide (1)..(851): Ceres Seq. ID no. 3599602
  misc_feature: Pfam Name: Pkinase Pfam Description: Protein kinase domain
  misc_feature (8)..(542): Homolog of NCBI NO: 7770331 NR Description: F27J15.13 [Arabidopsis thaliana]
  misc_feature (483)..(851): Homolog of NCBI NO: 7770331 NR Description: F27J15.13 [Arabidopsis thaliana]
  misc_feature (8)..(851): Homolog of NCBI NO: 15232537 NR Description: serine/threonine-specific protein kinase,
  misc_feature (425)..(851): Homolog of NCBI NO: 15231400 NR Description: receptor-like protein kinase homolog; protein id:
  misc_feature (7)..(367): Homolog of NCBI NO: 15231400 NR Description: receptor-like protein kinase homolog; protein id:
  misc_feature (13)..(851): Homolog of NCBI NO: 9758834 NR Description: receptor-like protein kinase [Arabidopsis
  misc_feature (15)..(839): Homolog of NCBI NO: 25387154 NR Description: protein F22G5.6 [imported] - Arabidopsis thaliana
  misc_feature (12)..(851): Homolog of NCBI NO: 9758831 NR Description: receptor-like protein kinase [Arabidopsis
  misc_feature (13)..(851): Homolog of NCBI NO: 15238493 NR Description: serine/threonine-specific protein kinase - like;
  misc_feature (19)..(839): Homolog of NCBI NO: 15222436 NR Description: protein kinase, putative; protein id: At1g07560.1
MEDRHRYLFFIFAIIHYVQAQQGFISLDCGLPSNEPPYIEPVTGLVFSSDADHIPSGISGRIQKNLEAVHIKPYLFLRYFPDGLRNCYTLDVLQNRRYMIKAVFVYGNYDGYNDYPSFDLYLGPNKWVRVDLEGKVNGSVEEIIHIPSSNSLQICLVKTGNSLPFISALELRLLRNDTYVVQDVSLKHLFRRYYRQSDRLIRYPDDVYDRVWSPFFLPEWTQITTSLDVNNSNNYEPPKAALTSAATPGDNGTRLTIIWTLDNPDEQIHLYVHFAELEPVGENTDEALRTLFTRTFYFVVNGKISYDESITPLDLAVSTVETVVNKCDGGNCSLQLVRSEASPGVRVPLVNAMEAFTAIKFPHSETNPDDVWYIFNSMTVISIKVIQATYELSRVDWQGDPCLPQQFLWTGLNCSYMNMSTSPRIISLDLSNNKLTGGVPEFLANMKSLLFINLSNNNLVGSIPQALLDRKNLKLEFEGNPKLCATGPCNSSSGNKETTVIAPVAAAIAIFIAVLVLIIVFIKKRPSSIRALHPSRANLSLENKKRRITYSEILLMTNNFERVIGEGGFGVVYHGYLNDSEQVAVKVLSPSSSQGYKEFKAEVELLLRVHHINLVSLVGYCDEQAHLALIYEYMANGDLKSHLSGKHGDCVLKWENRLSIAVETALGLEYLHSGCKPLMVHRDVKSMNILLDEHFQAKLADFGLSRSFSVGEESHVSTGVVGTPGYLDPEYYRTYRLTEKSDVYSFGIVLLEIITNQPVLEQANENRHIAERVRTMLTRSDISTIVDPNLIGEYDSGSVRKALKLAMSCVDPSPVARPDMSHVVQELKQCIKSENLRLRTGLNQVIDSKSS

SEQ ID NO: 71436 - protein, 753 aa, Arabidopsis thaliana
  peptide (1)..(753): Ceres Seq. ID no. 3599603
  misc_feature: Pfam Name: Pkinase Pfam Description: Protein kinase domain
  misc_feature (1)..(444): Homolog of NCBI NO: 7770331 NR Description: F27J15.13 [Arabidopsis thaliana]
  misc_feature (385)..(753): Homolog of NCBI NO: 7770331 NR Description: F27J15.13 [Arabidopsis thaliana]
  misc_feature (1)..(753): Homolog of NCBI NO: 15232537 NR Description: serine/threonine-specific protein kinase,
  misc_feature (327)..(753): Homolog of NCBI NO: 15231400 NR Description: receptor-like protein kinase homolog; protein id:
  misc_feature (1)..(269): Homolog of NCBI NO: 15231400 NR Description: receptor-like protein kinase homolog; protein id:
  misc_feature (1)..(753): Homolog of NCBI NO: 9758834 NR Description: receptor-like protein kinase [Arabidopsis
  misc_feature (1)..(741): Homolog of NCBI NO: 25387154 NR Description: protein F22G5.6 [imported] - Arabidopsis thaliana
  misc_feature (1)..(753): Homolog of NCBI NO: 9758831 NR Description: receptor-like protein kinase [Arabidopsis
  misc_feature (1)..(753): Homolog of NCBI NO: 15238493 NR Description: serine/threonine-specific protein kinase - like;
  misc_feature (1)..(741): Homolog of NCBI NO: 15222436 NR Description: protein kinase, putative; protein id: At1g07560.1
MIKAVFVYGNYDGYNDYPSFDLYLGPNKWVRVDLEGKVNGSVEEIIHIPSSNSLQICLVKTGNSLPFISALELRLLRNDTYVVQDVSLKHLFRRYYRQSDRLIRYPDDVYDRVWSPFFLPEWTQITTSLDVNNSNNYEPPKAALTSAATPGDNGTRLTIIWTLDNPDEQIHLYVHFAELEPVGENTDEALRTLFTRTFYFVVNGKISYDESITPLDLAVSTVETVVNKCDGGNCSLQLVRSEASPGVRVPLVNAMEAFTAIKFPHSETNPDDVWYIFNSMTVISIKVIQATYELSRVDWQGDPCLPQQFLWTGLNCSYMNMSTSPRIISLDLSNNKLTGGVPEFLANMKSLLFINLSNNNLVGSIPQALLDRKNLKLEFEGNPKLCATGPCNSSSGNKETTVIAPVAAAIAIFIAVLVLIIVFIKKRPSSIRALHPSRANLSLENKKRRITYSEILLMTNNFERVIGEGGFGVVYHGYLNDSEQVAVKVLSPSSSQGYKEFKAEVELLLRVHHINLVSLVGYCDEQAHLALIYEYMANGDLKSHLSGKHGDCVLKWENRLSIAVETALGLEYLHSGCKPLMVHRDVKSMNILLDEHFQAKLADFGLSRSFSVGEESHVSTGVVGTPGYLDPEYYRTYRLTEKSDVYSFGIVLLEIITNQPVLEQANENRHIAERVRTMLTRSDISTIVDPNLIGEYDSGSVRKALKLAMSCVDPSPVARPDMSHVVQELKQCIKSENLRLRTGLNQVIDSKSS

SEQ ID NO: 71437 - protein, 499 aa, Arabidopsis thaliana
  peptide (1)..(499): Ceres Seq. ID no. 3599604
  misc_feature: Pfam Name: Pkinase Pfam Description: Protein kinase domain
  misc_feature (1)..(499): Homolog of NCBI NO: 15232537 NR Description: serine/threonine-specific protein kinase,
  misc_feature (73)..(499): Homolog of NCBI NO: 15231400 NR Description: receptor-like protein kinase homolog; protein id:
  misc_feature (1)..(15): Homolog of NCBI NO: 15231400 NR Description: receptor-like protein kinase homolog; protein id:
  misc_feature (1)..(499): Homolog of NCBI NO: 9758834 NR Description: receptor-like protein kinase [Arabidopsis
  misc_feature (1)..(487): Homolog of NCBI NO: 25387154 NR Description: protein F22G5.6 [imported] - Arabidopsis thaliana
  misc_feature (1)..(499): Homolog of NCBI NO: 9758831 NR Description: receptor-like protein kinase [Arabidopsis
  misc_feature (1)..(499): Homolog of NCBI NO: 15238493 NR Description: serine/threonine-specific protein kinase - like;
  misc_feature (1)..(487): Homolog of NCBI NO: 15222436 NR Description: protein kinase, putative; protein id: At1g07560.1
  misc_feature (1)..(190): Homolog of NCBI NO: 7770331 NR Description: F27J15.13 [Arabidopsis thaliana]
  misc_feature (131)..(499): Homolog of NCBI NO: 7770331 NR Description: F27J15.13 [Arabidopsis thaliana]
MEAFTAIKFPHSETNPDDVWYIFNSMTVISIKVIQATYELSRVDWQGDPCLPQQFLWTGLNCSYMNMSTSPRIISLDLSNNKLTGGVPEFLANMKSLLFINLSNNNLVGSIPQALLDRKNLKLEFEGNPKLCATGPCNSSSGNKETTVIAPVAAAIAIFIAVLVLIIVFIKKRPSSIRALHPSRANLSLENKKRRITYSEILLMTNNFERVIGEGGFGVVYHGYLNDSEQVAVKVLSPSSSQGYKEFKAEVELLLRVHHINLVSLVGYCDEQAHLALIYEYMANGDLKSHLSGKHGDCVLKWENRLSIAVETALGLEYLHSGCKPLMVHRDVKSMNILLDEHFQAKLADFGLSRSFSVGEESHVSTGVVGTPGYLDPEYYRTYRLTEKSDVYSFGIVLLEIITNQPVLEQANENRHIAERVRTMLTRSDISTIVDPNLIGEYDSGSVRKALKLAMSCVDPSPVARPDMSHVVQELKQCIKSENLRLRTGLNQVIDSKSS

SEQ ID NO: 71438 - DNA, 936 bp, Arabidopsis thaliana
  misc_feature (1)..(936): Ceres Seq. ID no. 3599609
  misc_feature: MA Experiment ID: 20000306 Result: Down-regulated in Transcription
  misc_feature: MA Experiment 20000306 PARAMETER Experiment Name: At_Germinating_Seeds_Sub_P Parameter: Age (hr) Value: 6 vs. 0
  misc_feature: MA Experiment 20000306 PARAMETER Experiment Name: At_Germinating_Seeds_Sub_P Parameter: Organism Value: A. thaliana
  misc_feature: MA Experiment 20000306 PARAMETER Experiment Name: At_Germinating_Seeds_Sub_P Parameter: Plant Line Value: WS
  misc_feature: MA Experiment 20000306 PARAMETER Experiment Name: At_Germinating_Seeds_Sub_P Parameter: Tissue Value: Germinating Seeds
  misc_feature: MA Experiment ID: 20000307 Result: Down-regulated in Transcription
  misc_feature: MA Experiment 20000307 PARAMETER Experiment Name: At_Germinating_Seeds_Sub_P Parameter: Age (hr) Value: 24 vs. 0
  misc_feature: MA Experiment 20000307 PARAMETER Experiment Name: At_Germinating_Seeds_Sub_P Parameter: Organism Value: A. thaliana
  misc_feature: MA Experiment 20000307 PARAMETER Experiment Name: At_Germinating_Seeds_Sub_P Parameter: Plant Line Value: WS
  misc_feature: MA Experiment 20000307 PARAMETER Experiment Name: At_Germinating_Seeds_Sub_P Parameter: Tissue Value: Germinating Seeds
  misc_feature: MA Experiment ID: 20000314 Result: Down-regulated in Transcription
  misc_feature: MA Experiment 20000314 PARAMETER Experiment Name: At_14day_Shoots-Roots_Sub_P Parameter: Age (day) Value: 14
  misc_feature: MA Experiment 20000314 PARAMETER Experiment Name: At_14day_Shoots-Roots_Sub_P Parameter: Organism Value: A. thaliana
  misc_feature: MA Experiment 20000314 PARAMETER Experiment Name: At_14day_Shoots-Roots_Sub_P Parameter: Plant Line Value: WS
  misc_feature: MA Experiment 20000314 PARAMETER Experiment Name: At_14day_Shoots-Roots_Sub_P Parameter: Tissue Value: Roots vs. Whole Plant
  misc_feature: MA Experiment ID: 20000328 Result: Down-regulated in Transcription
  misc_feature: MA Experiment 20000328 PARAMETER Experiment Name: At_42deg_Heat_Sub_P Parameter: Age (day) Value: 14
  misc_feature: MA Experiment 20000328 PARAMETER Experiment Name: At_42deg_Heat_Sub_P Parameter: Organism Value: A. thaliana
  misc_feature: MA Experiment 20000328 PARAMETER Experiment Name: At_42deg_Heat_Sub_P Parameter: Plant Line Value: WS
  misc_feature: MA Experiment 20000328 PARAMETER Experiment Name: At_42deg_Heat_Sub_P Parameter: Temperature (deg C) Value: 42 vs. 22
  misc_feature: MA Experiment 20000328 PARAMETER Experiment Name: At_42deg_Heat_Sub_P Parameter: Timepoint (hr) Value: 6
  misc_feature: MA Experiment 20000328 PARAMETER Experiment Name: At_42deg_Heat_Sub_P Parameter: Tissue Value: Aerial
  misc_feature: MA Experiment ID: 20000346 Result: Up-regulated in Transcription
  misc_feature: MA Experiment 20000346 PARAMETER Experiment Name: At_2mM_SA_Sub_P Parameter: Age (day) Value: 14
  misc_feature: MA Experiment 20000346 PARAMETER Experiment Name: At_2mM_SA_Sub_P Parameter: Organism Value: A. thaliana
  misc_feature: MA Experiment 20000346 PARAMETER Experiment Name: At_2mM_SA_Sub_P Parameter: Plant Line Value: WS
  misc_feature: MA Experiment 20000346 PARAMETER Experiment Name: At_2mM_SA_Sub_P Parameter: Timepoint (hr) Value: 1
  misc_feature: MA Experiment 20000346 PARAMETER Experiment Name: At_2mM_SA_Sub_P Parameter: Tissue Value: Aerial
  misc_feature: MA Experiment 20000346 PARAMETER Experiment Name: At_2mM_SA_Sub_P Parameter: Treatment Value: 2mM SA vs. No Treatment
  misc_feature: MA Experiment ID: 20000347 Result: Up-regulated in Transcription
  misc_feature: MA Experiment 20000347 PARAMETER Experiment Name: At_2mM_SA_Sub_P Parameter: Age (day) Value: 14
  misc_feature: MA Experiment 20000347 PARAMETER Experiment Name: At_2mM_SA_Sub_P Parameter: Organism Value: A. thaliana
  misc_feature: MA Experiment 20000347 PARAMETER Experiment Name: At_2mM_SA_Sub_P Parameter: Plant Line Value: WS
  misc_feature: MA Experiment 20000347 PARAMETER Experiment Name: At_2mM_SA_Sub_P Parameter: Timepoint (hr) Value: 6
  misc_feature: MA Experiment 20000347 PARAMETER Experiment Name: At_2mM_SA_Sub_P Parameter: Tissue Value: Aerial
  misc_feature: MA Experiment 20000347 PARAMETER Experiment Name: At_2mM_SA_Sub_P Parameter: Treatment Value: 2mM SA vs. No Treatment
atgacgacggcgacgaacaagcaagttatattgaaagactacgtgagtggtttccctacggaatccaatttcgatttcactaccaccaccgtcgaacttagggttccggaaggtactaactctgttctggtgaagaacctatacttgtcatgcgatccttacatgagaatttgcatggggaaacctaatccttccactgctgctcttgctcaagcttacactcccggccaatgttatcacttgactcacgagcatttcaagatccaacatactgatgttccattgtcttactacactggacttctcggtatgcctggtatgaccgcatatgttgggttttatgagatctgttctccaaagaaaggagagacagtttatgtgtcagctgcatctggtgctgttggtcagcttgtgggacaatttgctaagatgatgggctgttatgttgttggaagtgctggtagcaaagaaaaggttgatctcctgaagaccaagtttgggtttgattatgcatttaactacaaggaagaacctgaccttagtgctgcgctcaaaaggtgtttccctaatggcattgacatatactttgagaatgtaggaggcaaaatgctagatgcagtgcttatgaacatgaacatgcacgggcgtatcgctgtctgtggaatgatctcacagtacaatcttgagaaccaagaaggtgtacacaacctatccaacataatctacaaacgaatccgcattcaaggctttgtagtgtctgatttctacgacgaatactcaaagttcttggagtttctgcatccgcacattaaagaagggaagataacgtacgtggaagatgtagctgatgggctcgagaaaggtcctgaagctctcgtgggactcttccatggtaagaatgttgggaaacaagttgttgttattgctcgtgaatga

SEQ ID NO: 71439 - protein, 311 aa, Arabidopsis thaliana
  peptide (1)..(311): Ceres Seq. ID no. 3599610
  misc_feature (100)..(308): Pfam Name: Zinc-binding dehydrogenase Pfam Description: Zinc-binding dehydrogenase
  misc_feature (1)..(311): Homolog of NCBI NO: 11358740 NR Description: quinone oxidoreductase-like protein - Arabidopsis
  misc_feature (81)..(311): Homolog of NCBI NO: 15237888 NR Description: quinone oxidoreductase -like protein; protein id:
  misc_feature (3)..(77): Homolog of NCBI NO: 15237888 NR Description: quinone oxidoreductase -like protein; protein id:
  misc_feature (81)..(311): Homolog of NCBI NO: 21539447 NR Description: quinone oxidoreductase-like protein [Arabidopsis
  misc_feature (3)..(77): Homolog of NCBI NO: 21539447 NR Description: quinone oxidoreductase-like protein [Arabidopsis
  misc_feature (81)..(311): Homolog of NCBI NO: 22326861 NR Description: quinone oxidoreductase - like protein; protein At5g17000.1, supported by cDNA: gi_16604343, supported by cDNA: [Arabidopsis thaliana] >gi|16604344|gb|AAL24178.1|
  misc_feature (3)..(77): Homolog of NCBI NO: 22326861 NR Description: quinone oxidoreductase - like protein; protein At5g17000.1, supported by cDNA: gi_16604343, supported by cDNA: [Arabidopsis thaliana] >gi|16604344|gb|AAL24178.1|
  misc_feature (81)..(311): Homolog of NCBI NO: 17529140 NR Description: putative quinone oxidoreductase [Arabidopsis
  misc_feature (3)..(77): Homolog of NCBI NO: 17529140 NR Description: putative quinone oxidoreductase [Arabidopsis
  misc_feature (81)..(311): Homolog of NCBI NO: 15237890 NR Description: quinone oxidoreductase - like protein; protein At5g16990.1, supported by cDNA: gi_17529037, supported by cDNA:
MTTATNKQVILKDYVSGFPTESNFDFTTTTVELRVPEGTNSVLVKNLYLSCDPYMRICMGKPNPSTAALAQAYTPGQCYHLTHEHFKIQHTDVPLSYYTGLLGMPGMTAYVGFYEICSPKKGETVYVSAASGAVGQLVGQFAKMMGCYVVGSAGSKEKVDLLKTKFGFDYAFNYKEEPDLSAALKRCFPNGIDIYFENVGGKMLDAVLMNMNMHGRIAVCGMISQYNLENQEGVHNLSNIIYKRIRIQGFVVSDFYDEYSKFLEFLHPHIKEGKITYVEDVADGLEKGPEALVGLFHGKNVGKQVVVIARE

SEQ ID NO: 71440 - protein, 257 aa, Arabidopsis thaliana
  peptide (1)..(257): Ceres Seq. ID no. 3599611
  misc_feature (46)..(254): Pfam Name: Zinc-binding dehydrogenase Pfam Description: Zinc-binding dehydrogenase
  misc_feature (1)..(257): Homolog of NCBI NO: 11358740 NR Description: quinone oxidoreductase-like protein - Arabidopsis
  misc_feature (27)..(257): Homolog of NCBI NO: 15237888 NR Description: quinone oxidoreductase -like protein; protein id:
  misc_feature (1)..(23): Homolog of NCBI NO: 15237888 NR Description: quinone oxidoreductase -like protein; protein id:
  misc_feature (27)..(257): Homolog of NCBI NO: 21539447 NR Description: quinone oxidoreductase-like protein [Arabidopsis
  misc_feature (1)..(23): Homolog of NCBI NO: 21539447 NR Description: quinone oxidoreductase-like protein [Arabidopsis
  misc_feature (27)..(257): Homolog of NCBI NO: 22326861 NR Description: quinone oxidoreductase - like protein; protein At5g17000.1, supported by cDNA: gi_16604343, supported by cDNA: [Arabidopsis thaliana] >gi|16604344|gb|AAL24178.1|
  misc_feature (1)..(23): Homolog of NCBI NO: 22326861 NR Description: quinone oxidoreductase - like protein; protein At5g17000.1, supported by cDNA: gi_16604343, supported by cDNA: [Arabidopsis thaliana] >gi|16604344|gb|AAL24178.1|
  misc_feature (27)..(257): Homolog of NCBI NO: 17529140 NR Description: putative quinone oxidoreductase [Arabidopsis
  misc_feature (1)..(23): Homolog of NCBI NO: 17529140 NR Description: putative quinone oxidoreductase [Arabidopsis
  misc_feature (27)..(257): Homolog of NCBI NO: 15237890 NR Description: quinone oxidoreductase - like protein; protein At5g16990.1, supported by cDNA: gi_17529037, supported by cDNA:
MRICMGKPNPSTAALAQAYTPGQCYHLTHEHFKIQHTDVPLSYYTGLLGMPGMTAYVGFYEICSPKKGETVYVSAASGAVGQLVGQFAKMMGCYVVGSAGSKEKVDLLKTKFGFDYAFNYKEEPDLSAALKRCFPNGIDIYFENVGGKMLDAVLMNMNMHGRIAVCGMISQYNLENQEGVHNLSNIIYKRIRIQGFVVSDFYDEYSKFLEFLHPHIKEGKITYVEDVADGLEKGPEALVGLFHGKNVGKQVVVIARE

SEQ ID NO: 71441 - protein, 253 aa, Arabidopsis thaliana
  peptide (1)..(253): Ceres Seq. ID no. 3599612
  misc_feature (42)..(250): Pfam Name: Zinc-binding dehydrogenase Pfam Description: Zinc-binding dehydrogenase
  misc_feature (1)..(253): Homolog of NCBI NO: 11358740 NR Description: quinone oxidoreductase-like protein - Arabidopsis
  misc_feature (23)..(253): Homolog of NCBI NO: 15237888 NR Description: quinone oxidoreductase -like protein; protein id:
  misc_feature (1)..(19): Homolog of NCBI NO: 15237888 NR Description: quinone oxidoreductase -like protein; protein id:
  misc_feature (23)..(253): Homolog of NCBI NO: 21539447 NR Description: quinone oxidoreductase-like protein [Arabidopsis
  misc_feature (1)..(19): Homolog of NCBI NO: 21539447 NR Description: quinone oxidoreductase-like protein [Arabidopsis
  misc_feature (23)..(253): Homolog of NCBI NO: 22326861 NR Description: quinone oxidoreductase - like protein; protein At5g17000.1, supported by cDNA: gi_16604343, supported by cDNA: [Arabidopsis thaliana] >gi|16604344|gb|AAL24178.1|
  misc_feature (1)..(19): Homolog of NCBI NO: 22326861 NR Description: quinone oxidoreductase - like protein; protein At5g17000.1, supported by cDNA: gi_16604343, supported by cDNA: [Arabidopsis thaliana] >gi|16604344|gb|AAL24178.1|
  misc_feature (23)..(253): Homolog of NCBI NO: 17529140 NR Description: putative quinone oxidoreductase [Arabidopsis
  misc_feature (1)..(19): Homolog of NCBI NO: 17529140 NR Description: putative quinone oxidoreductase [Arabidopsis
  misc_feature (23)..(253): Homolog of NCBI NO: 15237890 NR Description: quinone oxidoreductase - like protein; protein At5g16990.1, supported by cDNA: gi_17529037, supported by cDNA:
MGKPNPSTAALAQAYTPGQCYHLTHEHFKIQHTDVPLSYYTGLLGMPGMTAYVGFYEICSPKKGETVYVSAASGAVGQLVGQFAKMMGCYVVGSAGSKEKVDLLKTKFGFDYAFNYKEEPDLSAALKRCFPNGIDIYFENVGGKMLDAVLMNMNMHGRIAVCGMISQYNLENQEGVHNLSNIIYKRIRIQGFVVSDFYDEYSKFLEFLHPHIKEGKITYVEDVADGLEKGPEALVGLFHGKNVGKQVVVIARE

SEQ ID NO: 71442 - DNA, 1323 bp, Arabidopsis thaliana
  misc_feature (1)..(1323): Ceres Seq. ID no. 3599621
  misc_feature: MA Experiment ID: 20000265 Result: Up-regulated in Transcription
  misc_feature: MA Experiment 20000265 PARAMETER Experiment Name: At_Open_Flower_P Parameter: Age (day) Value: 21
  misc_feature: MA Experiment 20000265 PARAMETER Experiment Name: At_Open_Flower_P Parameter: Plant Line Value: WS
  misc_feature: MA Experiment 20000265 PARAMETER Experiment Name: At_Open_Flower_P Parameter: Tissue Value: Closed Flower vs. Whole Plant
atggcgcttgatcctgagcagcagcaaccaatctcctctgtttccagagagtcatctggtgagatcagcccagaaagggagcctcttattaaagagaatcatgtcccagaaaactactctgtcgttgccgccattctcccgtttttatttccagctctcggaggactgctttatggttatgaaattggtgcaacttcttgtgcaaccatttcacttcaggagcctatgactttgctatcttactatgctgttcccttttctgcagtcgccttcattaagtggaatttcatgaccagtggctcactttacggtgcattatttggctcaattgtggcttttactatcgctgacgttataggaagaagaaaggagctgattttggctgcattattgtatctcgttggagcccttgtgactgcactagccccaacctattccgttctgataattggacgggttatttatggggtctcagttggactggcaatgcatgcggctccgatgtacattgcagagactgctccaagtccgatacgtggacagctggtatcattaaaggaattcttcatagtccttgggatggttggaggttatggaatcggtagtcttacagtcaatgttcattctggttggcgatacatgtatgcaacaagtgtccctttggcagttattatgggaattgggatgtggtggctcccagcatcccctaggtggcttttgttgcgcgtcatacaggggaaagggaatgtggagaaccaacgagaggctgcaatcaaatctctctgctgccttagaggccctgcttttgttgattcagctgctgaacaagtaaatgagattttggctgaactaacttttgtgggcgaggataaagaagtcacatttggtgaattatttcaagggaagtgcttgaaagctctcatcataggaggaggtctagtcttgtttcagcagttgattatgacaggagtagctgttgtagttatcgacagacttggaaggagacctttacttcttggtggagttggtggcatgcgcctcaccagttgttgctgtagttgcactgctgctttatgtgggctgttaccagagatatttccccttaaactaagaggtcgaggtctcagtctagcagtgcttgtgaattttggtgcaaacgcacttgtgacatttgcgttttcacccctaaaggaactgctgggagctgggatactgttttgtgggtttggtgtgatatgtgtattgtctctggtattcatattcttcattgtgccagagacaaagggtctcactcttgaggaaattgaagccaaatgtctctaa

SEQ ID NO: 71443 - protein, 440 aa, Arabidopsis thaliana
  peptide (1)..(440): Ceres Seq. ID no. 3599622
  misc_feature (47)..(439): Pfam Name: Sugar (and other) transporter Pfam Description: Sugar (and other) transporter
  misc_feature (1)..(440): Homolog of NCBI NO: 15237892 NR Description: sugar transporter - like protein; protein id:
  misc_feature (1)..(440): Homolog of NCBI NO: 30686148 NR Description: sugar transporter family [Arabidopsis thaliana]
  misc_feature (1)..(319): Homolog of NCBI NO: 30678759 NR Description: sugar transporter family [Arabidopsis thaliana]
  misc_feature (361)..(440): Homolog of NCBI NO: 30678759 NR Description: sugar transporter family [Arabidopsis thaliana]
  misc_feature (318)..(345): Homolog of NCBI NO: 30678759 NR Description: sugar transporter family [Arabidopsis thaliana]
  misc_feature (23)..(319): Homolog of NCBI NO: 37537174 NR Description: putative sugar transporter protein [Oryza sativa
  misc_feature (361)..(437): Homolog of NCBI NO: 37537174 NR Description: putative sugar transporter protein [Oryza sativa
  misc_feature (318)..(348): Homolog of NCBI NO: 37537174 NR Description: putative sugar transporter protein [Oryza sativa
  misc_feature (163)..(319): Homolog of NCBI NO: 6714427 NR Description: hypothetical protein [Arabidopsis thaliana]
  misc_feature (361)..(440): Homolog of NCBI NO: 6714427 NR Description: hypothetical protein [Arabidopsis thaliana]
MALDPEQQQPISSVSRESSGEISPEREPLIKENHVPENYSVVAAILPFLFPALGGLLYGYEIGATSCATISLQEPMTLLSYYAVPFSAVAFIKWNFMTSGSLYGALFGSIVAFTIADVIGRRKELILAALLYLVGALVTALAPTYSVLIIGRVIYGVSVGLAMHAAPMYIAETAPSPIRGQLVSLKEFFIVLGMVGGYGIGSLTVNVHSGWRYMYATSVPLAVIMGIGMWWLPASPRWLLLRVIQGKGNVENQREAAIKSLCCLRGPAFVDSAAEQVNEILAELTFVGEDKEVTFGELFQGKCLKALIIGGGLVLFQQLIMTGVAVVVIDRLGRRPLLLGGVGGMRLTSCCCSCTAALCGLLPEIFPLKLRGRGLSLAVLVNFGANALVTFAFSPLKELLGAGILFCGFGVICVLSLVFIFFIVPETKGLTLEEIEAKCL

SEQ ID NO: 71444 - protein, 365 aa, Arabidopsis thaliana
  peptide (1)..(365): Ceres Seq. ID no. 3599623
  misc_feature (1)..(364): Pfam Name: Sugar (and other) transporter Pfam Description: Sugar (and other) transporter
  misc_feature (1)..(365): Homolog of NCBI NO: 15237892 NR Description: sugar transporter - like protein; protein id:
  misc_feature (1)..(365): Homolog of NCBI NO: 30686148 NR Description: sugar transporter family [Arabidopsis thaliana]
  misc_feature (1)..(244): Homolog of NCBI NO: 30678759 NR Description: sugar transporter family [Arabidopsis thaliana]
  misc_feature (286)..(365): Homolog of NCBI NO: 30678759 NR Description: sugar transporter family [Arabidopsis thaliana]
  misc_feature (243)..(270): Homolog of NCBI NO: 30678759 NR Description: sugar transporter family [Arabidopsis thaliana]
  misc_feature (1)..(244): Homolog of NCBI NO: 37537174 NR Description: putative sugar transporter protein [Oryza sativa
  misc_feature (286)..(362): Homolog of NCBI NO: 37537174 NR Description: putative sugar transporter protein [Oryza sativa
  misc_feature (243)..(273): Homolog of NCBI NO: 37537174 NR Description: putative sugar transporter protein [Oryza sativa
  misc_feature (88)..(244): Homolog of NCBI NO: 6714427 NR Description: hypothetical protein [Arabidopsis thaliana]
  misc_feature (286)..(365): Homolog of NCBI NO: 6714427 NR Description: hypothetical protein [Arabidopsis thaliana]
MTLLSYYAVPFSAVAFIKWNFMTSGSLYGALFGSIVAFTIADVIGRRKELILAALLYLVGALVTALAPTYSVLIIGRVIYGVSVGLAMHAAPMYIAETAPSPIRGQLVSLKEFFIVLGMVGGYGIGSLTVNVHSGWRYMYATSVPLAVIMGIGMWWLPASPRWLLLRVIQGKGNVENQREAAIKSLCCLRGPAFVDSAAEQVNEILAELTFVGEDKEVTFGELFQGKCLKALIIGGGLVLFQQLIMTGVAVVVIDRLGRRPLLLGGVGGMRLTSCCCSCTAALCGLLPEIFPLKLRGRGLSLAVLVNFGANALVTFAFSPLKELLGAGILFCGFGVICVLSLVFIFFIVPETKGLTLEEIEAKCL

SEQ ID NO: 71445 - protein, 344 aa, Arabidopsis thaliana
  peptide (1)..(344): Ceres Seq. ID no. 3599624
  misc_feature (1)..(343): Pfam Name: Sugar (and other) transporter Pfam Description: Sugar (and other) transporter
  misc_feature (1)..(344): Homolog of NCBI NO: 15237892 NR Description: sugar transporter - like protein; protein id:
  misc_feature (1)..(344): Homolog of NCBI NO: 30686148 NR Description: sugar transporter family [Arabidopsis thaliana]
  misc_feature (1)..(223): Homolog of NCBI NO: 30678759 NR Description: sugar transporter family [Arabidopsis thaliana]
  misc_feature (265)..(344): Homolog of NCBI NO: 30678759 NR Description: sugar transporter family [Arabidopsis thaliana]
  misc_feature (222)..(249): Homolog of NCBI NO: 30678759 NR Description: sugar transporter family [Arabidopsis thaliana]
  misc_feature (1)..(223): Homolog of NCBI NO: 37537174 NR Description: putative sugar transporter protein [Oryza sativa
  misc_feature (265)..(341): Homolog of NCBI NO: 37537174 NR Description: putative sugar transporter protein [Oryza sativa
  misc_feature (222)..(252): Homolog of NCBI NO: 37537174 NR Description: putative sugar transporter protein [Oryza sativa
  misc_feature (67)..(223): Homolog of NCBI NO: 6714427 NR Description: hypothetical protein [Arabidopsis thaliana]
  misc_feature (265)..(344): Homolog of NCBI NO: 6714427 NR Description: hypothetical protein [Arabidopsis thaliana]
MTSGSLYGALFGSIVAFTIADVIGRRKELILAALLYLVGALVTALAPTYSVLIIGRVIYGVSVGLAMHAAPMYIAETAPSPIRGQLVSLKEFFIVLGMVGGYGIGSLTVNVHSGWRYMYATSVPLAVIMGIGMWWLPASPRWLLLRVIQGKGNVENQREAAIKSLCCLRGPAFVDSAAEQVNEILAELTFVGEDKEVTFGELFQGKCLKALIIGGGLVLFQQLIMTGVAVVVIDRLGRRPLLLGGVGGMRLTSCCCSCTAALCGLLPEIFPLKLRGRGLSLAVLVNFGANALVTFAFSPLKELLGAGILFCGFGVICVLSLVFIFFIVPETKGLTLEEIEAKCL

SEQ ID NO: 71446 - DNA, 1803 bp, Arabidopsis thaliana
  misc_feature (1)..(1803): Ceres Seq. ID no. 3599680
  misc_feature: MA Experiment ID: 20000184 Result: Down-regulated in Transcription
  misc_feature: MA Experiment 20000184 PARAMETER Experiment Name: At_Shoots__P Parameter: Age (day) Value: 7
  misc_feature: MA Experiment 20000184 PARAMETER Experiment Name: At_Shoots__P Parameter: Tissue Value: Shoots vs. Whole Plant
  misc_feature: MA Experiment ID: 20000437 Result: Down-regulated in Transcription
  misc_feature: MA Experiment 20000437 PARAMETER Experiment Name: At_Drought_P Parameter: Age (day) Value: 8
  misc_feature: MA Experiment 20000437 PARAMETER Experiment Name: At_Drought_P Parameter: Organism Value: A. thaliana
  misc_feature: MA Experiment 20000437 PARAMETER Experiment Name: At_Drought_P Parameter: Plant Line Value: WS
  misc_feature: MA Experiment 20000437 PARAMETER Experiment Name: At_Drought_P Parameter: Timepoint (hr) Value: 24
  misc_feature: MA Experiment 20000437 PARAMETER Experiment Name: At_Drought_P Parameter: Tissue Value: Whole Plant
  misc_feature: MA Experiment 20000437 PARAMETER Experiment Name: At_Drought_P Parameter: Treatment Value: Drought vs. No Drought
  misc_feature: MA Experiment ID: 20001248 Result: Up-regulated in Transcription
  misc_feature: MA Experiment 20001248 PARAMETER Experiment Name: At_Far-red-induction_P Parameter: Age (day) Value: 7
  misc_feature: MA Experiment 20001248 PARAMETER Experiment Name: At_Far-red-induction_P Parameter: Light Value: Far-red vs. White
  misc_feature: MA Experiment 20001248 PARAMETER Experiment Name: At_Far-red-induction_P Parameter: Organism Value: A. thaliana
  misc_feature: MA Experiment 20001248 PARAMETER Experiment Name: At_Far-red-induction_P Parameter: Plant Line Value: Columbia
  misc_feature: MA Experiment 20001248 PARAMETER Experiment Name: At_Far-red-induction_P Parameter: Timepoint (hr) Value: 4
  misc_feature: MA Experiment 20001248 PARAMETER Experiment Name: At_Far-red-induction_P Parameter: Tissue Value: Whole Plant
  misc_feature: MA Experiment ID: 20001556 Result: Down-regulated in Transcription
  misc_feature: MA Experiment 20001556 PARAMETER Experiment Name: At_Drought_Soil_Dry_P Parameter: Age (day) Value: 26
  misc_feature: MA Experiment 20001556 PARAMETER Experiment Name: At_Drought_Soil_Dry_P Parameter: Organism Value: A. thaliana
  misc_feature: MA Experiment 20001556 PARAMETER Experiment Name: At_Drought_Soil_Dry_P Parameter: Plant Line Value: WS
  misc_feature: MA Experiment 20001556 PARAMETER Experiment Name: At_Drought_Soil_Dry_P Parameter: Post Timepoint (hr) Value: None
  misc_feature: MA Experiment 20001556 PARAMETER Experiment Name: At_Drought_Soil_Dry_P Parameter: Post-Treatment Value: None
  misc_feature: MA Experiment 20001556 PARAMETER Experiment Name: At_Drought_Soil_Dry_P Parameter: Timepoint (day) Value: 12
  misc_feature: MA Experiment 20001556 PARAMETER Experiment Name: At_Drought_Soil_Dry_P Parameter: Treatment Value: Drought vs. No Drought
  misc_feature: MA Experiment ID: 20001904 Result: Down-regulated in Transcription
  misc_feature: MA Experiment 20001904 PARAMETER Experiment Name: At_Drought_Reproduction_P Parameter: Age (day) Value: 37
  misc_feature: MA Experiment 20001904 PARAMETER Experiment Name: At_Drought_Reproduction_P Parameter: Organism Value: A. thaliana
  misc_feature: MA Experiment 20001904 PARAMETER Experiment Name: At_Drought_Reproduction_P Parameter: Plant Line Value: WS
  misc_feature: MA Experiment 20001904 PARAMETER Experiment Name: At_Drought_Reproduction_P Parameter: Timepoint (day) Value: 7
  misc_feature: MA Experiment 20001904 PARAMETER Experiment Name: At_Drought_Reproduction_P Parameter: Tissue Value: Rosettes
  misc_feature: MA Experiment 20001904 PARAMETER Experiment Name: At_Drought_Reproduction_P Parameter: Treatment Value: Drought vs. No Drought
  misc_feature: MA Experiment ID: 20001907 Result: Down-regulated in Transcription
  misc_feature: MA Experiment 20001907 PARAMETER Experiment Name: At_Drought_Reproduction_P Parameter: Age (day) Value: 37
  misc_feature: MA Experiment 20001907 PARAMETER Experiment Name: At_Drought_Reproduction_P Parameter: Organism Value: A. thaliana
  misc_feature: MA Experiment 20001907 PARAMETER Experiment Name: At_Drought_Reproduction_P Parameter: Plant Line Value: WS
  misc_feature: MA Experiment 20001907 PARAMETER Experiment Name: At_Drought_Reproduction_P Parameter: Timepoint (day) Value: 7
  misc_feature: MA Experiment 20001907 PARAMETER Experiment Name: At_Drought_Reproduction_P Parameter: Tissue Value: Siliques
  misc_feature: MA Experiment 20001907 PARAMETER Experiment Name: At_Drought_Reproduction_P Parameter: Treatment Value: Drought vs. No Drought
atggcggccaacaattttgcgacgaagctaagcagaaacaccaatagaattaccgtaatcttggtctacgcattccttgaatggcttctcatgttctttatcttcctcaattcctttttcacttactttatcgtcaaattcgcctctttcttcggtcttaagcaaaagagcttagcggataaaccataccctaattacttgcttctcaagtcatcaatttgggggaaaactttgggtgacagagaagatggaggattgatcttagagatgatcgatgatgataaatttggagatgggtttgagatagatagagaatcttatcccttagggttcttcagagataaagcagaagaaggaaagaagcaagaccagcagcaaaatggtgaagtgatttcagatgttgagagttatggattaagcttgagagaagtgtctgaagaggatgggttaagatctatcatcagcaataattctcctgggaacgaagctaaatcaagagtttcagaggatgaacaaaggaatgatgacacaagcaatgttgccacatatggggaagatcaaatttcagggcgtgtagaagaaaaagaagaagaaacaggagtagcagatttgttgtatgaccagtttgagagcaagaatttcactggtagccaaatcgaagaagaagaagaagatagagaagaaacgactaaggagcttgatccggaaactccaacttcagtcagtactttgtttaacaagaaacttcattttcttgctagaaatgagtatgcagctgctgaagatgcaggagatgggaatgtattagtgagtgagatggacggtggcgatcctttaaggactattgaaaggttgagagagacagtgagagcagaacaagaagcactgagagatttatatgcagagctggaagaagaaagaagcgcgtctgcaatatcggctaaccagacaatggcaatgatcacgaggctacaagaagagaaagcgaaagttcagatggaagcgttgcagtatcagagaatgatggaggaacaagccgagtatgatcaagaagccttgcagctattgaatcatttgatggtgaaacgagagaaagagaaggaacaactccagagagaacttgaggtttatcgggcaaaggttttggagtatgaatcgaaagctaagaacaagatcatcgttgtggaaaacgattgtgaggctgatgatgatgataaagaggaggagaatagagaagaggataattcttctgagatggatgtggatttggagaagataacattagattgcgtacaacatatgagcatgcttggtgaatctttatcagagtttgaggaagagaggttagtgattttggatcagcttaaggtgttagaggataggctagtaacaatgcaggacaaggaatctgctgaggatccgggagaattcagcaatagttatgaagaagcgagtaatggacatggaggactaacaatggcatcaatggcaaagagtctgctacctcttctagacgcagcagagaacgaatcagaagacgggtctcaaggactaccagaatcagatgaaaagaactttggttcggacagtgagaaactggagataatcaaacaagttgatagtgtctatgagaggttacaggagctggaaacagatggagagtttctgaaaaactgtatgagttcagcgaagaaaggtgacaaaggaacagatattcttaaagatatattgcaacatctccgcgatctcagaaccattgaactcactaacacaattgaaaaccagacgacacaggaagagtga

SEQ ID NO: 71447 - protein, 600 aa, Arabidopsis thaliana
  peptide (1)..(600): Ceres Seq. ID no. 3599681
  misc_feature (282)..(375): Pfam Name: Protein of unknown function, DUF593 Pfam Description: Protein of unknown function, DUF593
  misc_feature (1)..(600): Homolog of NCBI NO: 11357812 NR Description: hypothetical protein F5E19_60 - Arabidopsis >gi|9755724|emb|CAC01836.1| putative protein [Arabidopsis
  misc_feature (55)..(600): Homolog of NCBI NO: 30685989 NR Description: expressed protein [Arabidopsis thaliana]
  misc_feature (1)..(58): Homolog of NCBI NO: 30685989 NR Description: expressed protein [Arabidopsis thaliana]
  misc_feature (100)..(550): Homolog of NCBI NO: 25406071 NR Description: unknown protein F5A18.7 [imported] - Arabidopsis
  misc_feature (1)..(58): Homolog of NCBI NO: 25406071 NR Description: unknown protein F5A18.7 [imported] - Arabidopsis
  misc_feature (101)..(523): Homolog of NCBI NO: 13702818 NR Description: unknown protein [Oryza sativa]
  misc_feature (10)..(53): Homolog of NCBI NO: 13702818 NR Description: unknown protein [Oryza sativa]
  misc_feature (193)..(550): Homolog of NCBI NO: 18409667 NR Description: expressed protein; protein id: At1g70750.1,
  misc_feature (265)..(468): Homolog of NCBI NO: 15221903 NR Description: hypothetical protein; protein id: At1g18990.1 thaliana] >gi|8778293|gb|AAF79302.1|AC068602_25 F14D16.14 thaliana] >gi|27754600|gb|AAO22746.1| unknown protein
  misc_feature (1)..(54): Homolog of NCBI NO: 15221903 NR Description: hypothetical protein; protein id: At1g18990.1 thaliana] >gi|8778293|gb|AAF79302.1|AC068602_25 F14D16.14 thaliana] >gi|27754600|gb|AAO22746.1| unknown protein
MAANNFATKLSRNTNRITVILVYAFLEWLLMFFIFLNSFFTYFIVKFASFFGLKQKSLADKPYPNYLLLKSSIWGKTLGDREDGGLILEMIDDDKFGDGFEIDRESYPLGFFRDKAEEGKKQDQQQNGEVISDVESYGLSLREVSEEDGLRSIISNNSPGNEAKSRVSEDEQRNDDTSNVATYGEDQISGRVEEKEEETGVADLLYDQFESKNFTGSQIEEEEEDREETTKELDPETPTSVSTLFNKKLHFLARNEYAAAEDAGDGNVLVSEMDGGDPLRTIERLRETVRAEQEALRDLYAELEEERSASAISANQTMAMITRLQEEKAKVQMEALQYQRMMEEQAEYDQEALQLLNHLMVKREKEKEQLQRELEVYRAKVLEYESKAKNKIIVVENDCEADDDDKEEENREEDNSSEMDVDLEKITLDCVQHMSMLGESLSEFEEERLVILDQLKVLEDRLVTMQDKESAEDPGEFSNSYEEASNGHGGLTMASMAKSLLPLLDAAENESEDGSQGLPESDEKNFGSDSEKLEIIKQVDSVYERLQELETDGEFLKNCMSSAKKGDKGTDILKDILQHLRDLRTIELTNTIENQTTQEE

SEQ ID NO: 71448 - protein, 570 aa, Arabidopsis thaliana
  peptide (1)..(570): Ceres Seq. ID no. 3599682
  misc_feature (252)..(345): Pfam Name: Protein of unknown function, DUF593 Pfam Description: Protein of unknown function, DUF593
  misc_feature (1)..(570): Homolog of NCBI NO: 11357812 NR Description: hypothetical protein F5E19_60 - Arabidopsis >gi|9755724|emb|CAC01836.1| putative protein [Arabidopsis
  misc_feature (25)..(570): Homolog of NCBI NO: 30685989 NR Description: expressed protein [Arabidopsis thaliana]
  misc_feature (1)..(28): Homolog of NCBI NO: 30685989 NR Description: expressed protein [Arabidopsis thaliana]
  misc_feature (70)..(520): Homolog of NCBI NO: 25406071 NR Description: unknown protein F5A18.7 [imported] - Arabidopsis
  misc_feature (1)..(28): Homolog of NCBI NO: 25406071 NR Description: unknown protein F5A18.7 [imported] - Arabidopsis
  misc_feature (71)..(493): Homolog of NCBI NO: 13702818 NR Description: unknown protein [Oryza sativa]
  misc_feature (1)..(23): Homolog of NCBI NO: 13702818 NR Description: unknown protein [Oryza sativa]
  misc_feature (163)..(520): Homolog of NCBI NO: 18409667 NR Description: expressed protein; protein id: At1g70750.1,
  misc_feature (235)..(438): Homolog of NCBI NO: 15221903 NR Description: hypothetical protein; protein id: At1g18990.1 thaliana] >gi|8778293|gb|AAF79302.1|AC068602_25 F14D16.14 thaliana] >gi|27754600|gb|AAO22746.1| unknown protein
  misc_feature (1)..(24): Homolog of NCBI NO: 15221903 NR Description: hypothetical protein; protein id: At1g18990.1 thaliana] >gi|8778293|gb|AAF79302.1|AC068602_25 F14D16.14 thaliana] >gi|27754600|gb|AAO22746.1| unknown protein
MFFIFLNSFFTYFIVKFASFFGLKQKSLADKPYPNYLLLKSSIWGKTLGDREDGGLILEMIDDDKFGDGFEIDRESYPLGFFRDKAEEGKKQDQQQNGEVISDVESYGLSLREVSEEDGLRSIISNNSPGNEAKSRVSEDEQRNDDTSNVATYGEDQISGRVEEKEEETGVADLLYDQFESKNFTGSQIEEEEEDREETTKELDPETPTSVSTLFNKKLHFLARNEYAAAEDAGDGNVLVSEMDGGDPLRTIERLRETVRAEQEALRDLYAELEEERSASAISANQTMAMITRLQEEKAKVQMEALQYQRMMEEQAEYDQEALQLLNHLMVKREKEKEQLQRELEVYRAKVLEYESKAKNKIIVVENDCEADDDDKEEENREEDNSSEMDVDLEKITLDCVQHMSMLGESLSEFEEERLVILDQLKVLEDRLVTMQDKESAEDPGEFSNSYEEASNGHGGLTMASMAKSLLPLLDAAENESEDGSQGLPESDEKNFGSDSEKLEIIKQVDSVYERLQELETDGEFLKNCMSSAKKGDKGTDILKDILQHLRDLRTIELTNTIENQTTQEE

SEQ ID NO: 71449 - protein, 511 aa, Arabidopsis thaliana
  peptide (1)..(511): Ceres Seq. ID no. 3599683
  misc_feature (193)..(286): Pfam Name: Protein of unknown function, DUF593 Pfam Description: Protein of unknown function, DUF593
  misc_feature (1)..(511): Homolog of NCBI NO: 11357812 NR Description: hypothetical protein F5E19_60 - Arabidopsis >gi|9755724|emb|CAC01836.1| putative protein [Arabidopsis
  misc_feature (1)..(511): Homolog of NCBI NO: 30685989 NR Description: expressed protein [Arabidopsis thaliana]
  misc_feature (11)..(461): Homolog of NCBI NO: 25406071 NR Description: unknown protein F5A18.7 [imported] - Arabidopsis
  misc_feature (12)..(434): Homolog of NCBI NO: 13702818 NR Description: unknown protein [Oryza sativa]
  misc_feature (104)..(461): Homolog of NCBI NO: 18409667 NR Description: expressed protein; protein id: At1g70750.1,
  misc_feature (176)..(379): Homolog of NCBI NO: 15221903 NR Description: hypothetical protein; protein id: At1g18990.1 thaliana] >gi|8778293|gb|AAF79302.1|AC068602_25 F14D16.14 thaliana] >gi|27754600|gb|AAO22746.1| unknown protein
  misc_feature (104)..(337): Homolog of NCBI NO: 4101564 NR Description: IFA-binding protein [Arabidopsis thaliana]
  misc_feature (185)..(377): Homolog of NCBI NO: 25406384 NR Description: hypothetical protein F9E10.32 [imported] - thaliana >gi|5882740|gb|AAD55293.1|AC008263_24 F25A4.20
  misc_feature (185)..(377): Homolog of NCBI NO: 26451391 NR Description: unknown protein [Arabidopsis thaliana]
  misc_feature (185)..(377): Homolog of NCBI NO: 30699047 NR Description: expressed protein [Arabidopsis thaliana]
MIDDDKFGDGFEIDRESYPLGFFRDKAEEGKKQDQQQNGEVISDVESYGLSLREVSEEDGLRSIISNNSPGNEAKSRVSEDEQRNDDTSNVATYGEDQISGRVEEKEEETGVADLLYDQFESKNFTGSQIEEEEEDREETTKELDPETPTSVSTLFNKKLHFLARNEYAAAEDAGDGNVLVSEMDGGDPLRTIERLRETVRAEQEALRDLYAELEEERSASAISANQTMAMITRLQEEKAKVQMEALQYQRMMEEQAEYDQEALQLLNHLMVKREKEKEQLQRELEVYRAKVLEYESKAKNKIIVVENDCEADDDDKEEENREEDNSSEMDVDLEKITLDCVQHMSMLGESLSEFEEERLVILDQLKVLEDRLVTMQDKESAEDPGEFSNSYEEASNGHGGLTMASMAKSLLPLLDAAENESEDGSQGLPESDEKNFGSDSEKLEIIKQVDSVYERLQELETDGEFLKNCMSSAKKGDKGTDILKDILQHLRDLRTIELTNTIENQTTQEE

SEQ ID NO: 71450 - DNA, 1461 bp, Arabidopsis thaliana
  misc_feature (1)..(1461): Ceres Seq. ID no. 3599727
  misc_feature: MA Experiment ID: 20000307 Result: Up-regulated in Transcription
  misc_feature: MA Experiment 20000307 PARAMETER Experiment Name: At_Germinating_Seeds_Sub_P Parameter: Age (hr) Value: 24 vs. 0
  misc_feature: MA Experiment 20000307 PARAMETER Experiment Name: At_Germinating_Seeds_Sub_P Parameter: Organism Value: A. thaliana
  misc_feature: MA Experiment 20000307 PARAMETER Experiment Name: At_Germinating_Seeds_Sub_P Parameter: Plant Line Value: WS
  misc_feature: MA Experiment 20000307 PARAMETER Experiment Name: At_Germinating_Seeds_Sub_P Parameter: Tissue Value: Germinating Seeds
  misc_feature: MA Experiment ID: 20000355 Result: Up-regulated in Transcription
  misc_feature: MA Experiment 20000355 PARAMETER Experiment Name: At_Siliques_Sub_P Parameter: Age (day) Value: 21
  misc_feature: MA Experiment 20000355 PARAMETER Experiment Name: At_Siliques_Sub_P Parameter: Organism Value: A. thaliana
  misc_feature: MA Experiment 20000355 PARAMETER Experiment Name: At_Siliques_Sub_P Parameter: Plant Line Value: WS
  misc_feature: MA Experiment 20000355 PARAMETER Experiment Name: At_Siliques_Sub_P Parameter: Tissue Value: Less Than 5mm Siliques vs. Whole Plant
  misc_feature: MA Experiment ID: 20000440 Result: Up-regulated in Transcription
  misc_feature: MA Experiment 20000440 PARAMETER Experiment Name: At_Closed-Flower__Sub_P Parameter: Tissue Value: Closed Flower vs. Whole Plant
  misc_feature: Pfam Name: UDPGT Pfam Description: UDP-glucoronosyl and UDP-glucosyl transferase
atggccgtttcatcgtcgcatcatgcggttctcttcccttacatgtcaaaaggccacacgattcctctcctccaattcgcccgtctcctcctccgtcaccgccgtatcgtctccgtagacgacgaagaaccaaccatttccgtcaccgtcttcaccaccccaaaaaaccaaccattcgtctcaaacttcctctctgacgtcgcatcatctatcaaagtaatctccctccctttccctgaaaacatcgccggaatccctcccggcgtcgagagcaccgacatgctcccttccatatcactttacgtgcccttcacgcgcgcaaccaaatctctccagcctttcttcgaagcagaactcaagaatcttgagaaagtttctttcatggtctccgatggattcttatggtggacatcggaatccgccgctaaatttgagatcccgagacttgccttctacggcatgaactcctacgcatcggctatgtgctccgccatttcggtacacgagctctttaccaaaccggaaagtgttaaatctgatactgaaccggttactgtaccggattttccatggatatgtgttaagaagtgtgagttcgatccggttttgaccgaaccggatcaatcggatccagcgttcgagctactcattgaccatcttatgtccaccaagaaaagccgtggagttatagtgaacagcttttacgagctcgagtcaacgttcgttgactaccggctccgtgataacgatgaaccaaaaccgtggtgtgttgggcctttgtgtttggtaaatcctccaaaaccggagagtgataaaccggattggattcattggttggaccggaaactagaggaaagatgtccggttatgtatgtggcgtttggaacgcaggctgagatatcgaacgagcagctcaaggaaatagcattagggttggaagattccaaggtcaatttcttgtgggtcacgagaaaggacttggaagaagtaactggaggattagggttcgaaaagagagtgaaagagcatgggatgattgtgagagattgggtagaccaatgggagatattgtcacataaaagtgtcaaagggtttttgagtcattgtggatggaactcggcgcaagagagtatttgcgctggggttccactactcgcttggccaatgatggcagagcagccactcaatgcgaagttggtagtggaggagctaaagatcggagtaagaatcgaaacagaagatgtaagtgtgaaaggattcgtgacaagagaagaacttagtcgaaagggagagatggggaagacaacgatgaagaatgtaaaagagtatgcgaaaatggcgaaaaaagctatggctcaagggactggttcgtcttggaagagtttggattcgcttctggaagagctttgtaagagtagagagccagacggtgttaataagttgtcaagttctgatgcttag

SEQ ID NO: 71451 - protein, 486 aa, Arabidopsis thaliana
  peptide (1)..(486): Ceres Seq. ID no. 3599728
  misc_feature: Pfam Name: UDPGT Pfam Description: UDP-glucoronosyl and UDP-glucosyl transferase
  misc_feature (1)..(486): Homolog of NCBI NO: 15241515 NR Description: glucosyltransferase -like protein; protein id:
  misc_feature (1)..(480): Homolog of NCBI NO: 21553613 NR Description: putative glucosyltransferase [Arabidopsis
  misc_feature (1)..(480): Homolog of NCBI NO: 30679796 NR Description: glycosyltransferase family [Arabidopsis thaliana]
  misc_feature (8)..(472): Homolog of NCBI NO: 4914344 NR Description: F14N23.30 [Arabidopsis thaliana]
  misc_feature (1)..(317): Homolog of NCBI NO: 30679790 NR Description: glycosyltransferase family [Arabidopsis thaliana] putative glucosyltransferase [Arabidopsis thaliana]
  misc_feature (111)..(472): Homolog of NCBI NO: 30681693 NR Description: glycosyltransferase family [Arabidopsis thaliana]
  misc_feature (111)..(472): Homolog of NCBI NO: 26449653 NR Description: putative glucosyl transferase [Arabidopsis
  misc_feature (8)..(476): Homolog of NCBI NO: 21742764 NR Description: OSJNBa0023J03.6 [Oryza sativa (japonica
  misc_feature (4)..(476): Homolog of NCBI NO: 15228037 NR Description: putative glucosyl transferase; protein id: supported by cDNA: gi_17065333 [Arabidopsis thaliana]
  misc_feature (6)..(469): Homolog of NCBI NO: 15228034 NR Description: putative glucosyl transferase; protein id: supported by cDNA: gi_15028388, supported by cDNA: gi_19310660
MAVSSSHHAVLFPYMSKGHTIPLLQFARLLLRHRRIVSVDDEEPTISVTVFTTPKNQPFVSNFLSDVASSIKVISLPFPENIAGIPPGVESTDMLPSISLYVPFTRATKSLQPFFEAELKNLEKVSFMVSDGFLWWTSESAAKFEIPRLAFYGMNSYASAMCSAISVHELFTKPESVKSDTEPVTVPDFPWICVKKCEFDPVLTEPDQSDPAFELLIDHLMSTKKSRGVIVNSFYELESTFVDYRLRDNDEPKPWCVGPLCLVNPPKPESDKPDWIHWLDRKLEERCPVMYVAFGTQAEISNEQLKEIALGLEDSKVNFLWVTRKDLEEVTGGLGFEKRVKEHGMIVRDWVDQWEILSHKSVKGFLSHCGWNSAQESICAGVPLLAWPMMAEQPLNAKLVVEELKIGVRIETEDVSVKGFVTREELSRKGEMGKTTMKNVKEYAKMAKKAMAQGTGSSWKSLDSLLEELCKSREPDGVNKLSSSDA

SEQ ID NO: 71452 - protein, 472 aa, Arabidopsis thaliana
  peptide (1)..(472): Ceres Seq. ID no. 3599729
  misc_feature: Pfam Name: UDPGT Pfam Description: UDP-glucoronosyl and UDP-glucosyl transferase
  misc_feature (97)..(458): Homolog of NCBI NO: 26449653 NR Description: putative glucosyl transferase [Arabidopsis
  misc_feature (1)..(462): Homolog of NCBI NO: 21742764 NR Description: OSJNBa0023J03.6 [Oryza sativa (japonica
  misc_feature (1)..(462): Homolog of NCBI NO: 15228037 NR Description: putative glucosyl transferase; protein id: supported by cDNA: gi_17065333 [Arabidopsis thaliana]
  misc_feature (1)..(455): Homolog of NCBI NO: 15228034 NR Description: putative glucosyl transferase; protein id: supported by cDNA: gi_15028388, supported by cDNA: gi_19310660
  misc_feature (1)..(472): Homolog of NCBI NO: 15241515 NR Description: glucosyltransferase -like protein; protein id:
  misc_feature (1)..(466): Homolog of NCBI NO: 21553613 NR Description: putative glucosyltransferase [Arabidopsis
  misc_feature (1)..(466): Homolog of NCBI NO: 30679796 NR Description: glycosyltransferase family [Arabidopsis thaliana]
  misc_feature (1)..(458): Homolog of NCBI NO: 4914344 NR Description: F14N23.30 [Arabidopsis thaliana]
  misc_feature (1)..(303): Homolog of NCBI NO: 30679790 NR Description: glycosyltransferase family [Arabidopsis thaliana] putative glucosyltransferase [Arabidopsis thaliana]
  misc_feature (97)..(458): Homolog of NCBI NO: 30681693 NR Description: glycosyltransferase family [Arabidopsis thaliana]
MSKGHTIPLLQFARLLLRHRRIVSVDDEEPTISVTVFTTPKNQPFVSNFLSDVASSIKVISLPFPENIAGIPPGVESTDMLPSISLYVPFTRATKSLQPFFEAELKNLEKVSFMVSDGFLWWTSESAAKFEIPRLAFYGMNSYASAMCSAISVHELFTKPESVKSDTEPVTVPDFPWICVKKCEFDPVLTEPDQSDPAFELLIDHLMSTKKSRGVIVNSFYELESTFVDYRLRDNDEPKPWCVGPLCLVNPPKPESDKPDWIHWLDRKLEERCPVMYVAFGTQAEISNEQLKEIALGLEDSKVNFLWVTRKDLEEVTGGLGFEKRVKEHGMIVRDWVDQWEILSHKSVKGFLSHCGWNSAQESICAGVPLLAWPMMAEQPLNAKLVVEELKIGVRIETEDVSVKGFVTREELSRKGEMGKTTMKNVKEYAKMAKKAMAQGTGSSWKSLDSLLEELCKSREPDGVNKLSSSDA

SEQ ID NO: 71453 - protein, 393 aa, Arabidopsis thaliana
  peptide (1)..(393): Ceres Seq. ID no. 3599730
  misc_feature: Pfam Name: UDPGT Pfam Description: UDP-glucoronosyl and UDP-glucosyl transferase
  misc_feature (1)..(393): Homolog of NCBI NO: 15241515 NR Description: glucosyltransferase -like protein; protein id:
  misc_feature (1)..(387): Homolog of NCBI NO: 21553613 NR Description: putative glucosyltransferase [Arabidopsis
  misc_feature (1)..(387): Homolog of NCBI NO: 30679796 NR Description: glycosyltransferase family [Arabidopsis thaliana]
  misc_feature (1)..(379): Homolog of NCBI NO: 4914344 NR Description: F14N23.30 [Arabidopsis thaliana]
  misc_feature (1)..(224): Homolog of NCBI NO: 30679790 NR Description: glycosyltransferase family [Arabidopsis thaliana] putative glucosyltransferase [Arabidopsis thaliana]
  misc_feature (18)..(379): Homolog of NCBI NO: 30681693 NR Description: glycosyltransferase family [Arabidopsis thaliana]
  misc_feature (18)..(379): Homolog of NCBI NO: 26449653 NR Description: putative glucosyl transferase [Arabidopsis
  misc_feature (1)..(383): Homolog of NCBI NO: 21742764 NR Description: OSJNBa0023J03.6 [Oryza sativa (japonica
  misc_feature (1)..(383): Homolog of NCBI NO: 15228037 NR Description: putative glucosyl transferase; protein id: supported by cDNA: gi_17065333 [Arabidopsis thaliana]
  misc_feature (1)..(376): Homolog of NCBI NO: 15228034 NR Description: putative glucosyl transferase; protein id: supported by cDNA: gi_15028388, supported by cDNA: gi_19310660
MLPSISLYVPFTRATKSLQPFFEAELKNLEKVSFMVSDGFLWWTSESAAKFEIPRLAFYGMNSYASAMCSAISVHELFTKPESVKSDTEPVTVPDFPWICVKKCEFDPVLTEPDQSDPAFELLIDHLMSTKKSRGVIVNSFYELESTFVDYRLRDNDEPKPWCVGPLCLVNPPKPESDKPDWIHWLDRKLEERCPVMYVAFGTQAEISNEQLKEIALGLEDSKVNFLWVTRKDLEEVTGGLGFEKRVKEHGMIVRDWVDQWEILSHKSVKGFLSHCGWNSAQESICAGVPLLAWPMMAEQPLNAKLVVEELKIGVRIETEDVSVKGFVTREELSRKGEMGKTTMKNVKEYAKMAKKAMAQGTGSSWKSLDSLLEELCKSREPDGVNKLSSSDA

SEQ ID NO: 71454 - DNA, 522 bp, Arabidopsis thaliana
  misc_feature (1)..(522): Ceres Seq. ID no. 3599785
  misc_feature: MA Experiment ID: 20000179 Result: Up-regulated in Transcription
  misc_feature: MA Experiment 20000179 PARAMETER Experiment Name: At_Germinating_Seeds_P Parameter: Age (hr) Value: 6 vs. 0
  misc_feature: MA Experiment 20000179 PARAMETER Experiment Name: At_Germinating_Seeds_P Parameter: Tissue Value: Germinating Seeds
  misc_feature: MA Experiment ID: 20000180 Result: Up-regulated in Transcription
  misc_feature: MA Experiment 20000180 PARAMETER Experiment Name: At_Germinating_Seeds_P Parameter: Age (hr) Value: 24 vs. 0
  misc_feature: MA Experiment 20000180 PARAMETER Experiment Name: At_Germinating_Seeds_P Parameter: Tissue Value: Germinating Seeds
  misc_feature: MA Experiment ID: 20000227 Result: Down-regulated in Transcription
  misc_feature: MA Experiment 20000227 PARAMETER Experiment Name: At_Root-Tips-vs-Tops_P Parameter: Tissue Value: Root Tips vs. Root Tops
  misc_feature: MA Experiment ID: 20000234 Result: Down-regulated in Transcription
  misc_feature: MA Experiment 20000234 PARAMETER Experiment Name: At_Siliques_P Parameter: Age (day) Value: 21
  misc_feature: MA Experiment 20000234 PARAMETER Experiment Name: At_Siliques_P Parameter: Organism Value: A. thaliana
  misc_feature: MA Experiment 20000234 PARAMETER Experiment Name: At_Siliques_P Parameter: Plant Line Value: WS
  misc_feature: MA Experiment 20000234 PARAMETER Experiment Name: At_Siliques_P Parameter: Tissue Value: Less Than 5mm Siliques vs. Whole Plant
  misc_feature: MA Experiment ID: 20000265 Result: Down-regulated in Transcription
  misc_feature: MA Experiment 20000265 PARAMETER Experiment Name: At_Open_Flower_P Parameter: Age (day) Value: 21
  misc_feature: MA Experiment 20000265 PARAMETER Experiment Name: At_Open_Flower_P Parameter: Plant Line Value: WS
  misc_feature: MA Experiment 20000265 PARAMETER Experiment Name: At_Open_Flower_P Parameter: Tissue Value: Closed Flower vs. Whole Plant
  misc_feature: MA Experiment ID: 20000437 Result: Up-regulated in Transcription
  misc_feature: MA Experiment 20000437 PARAMETER Experiment Name: At_Drought_P Parameter: Age (day) Value: 8
  misc_feature: MA Experiment 20000437 PARAMETER Experiment Name: At_Drought_P Parameter: Organism Value: A. thaliana
  misc_feature: MA Experiment 20000437 PARAMETER Experiment Name: At_Drought_P Parameter: Plant Line Value: WS
  misc_feature: MA Experiment 20000437 PARAMETER Experiment Name: At_Drought_P Parameter: Timepoint (hr) Value: 24
  misc_feature: MA Experiment 20000437 PARAMETER Experiment Name: At_Drought_P Parameter: Tissue Value: Whole Plant
  misc_feature: MA Experiment 20000437 PARAMETER Experiment Name: At_Drought_P Parameter: Treatment Value: Drought vs. No Drought
  misc_feature: MA Experiment ID: 20001905 Result: Up-regulated in Transcription
  misc_feature: MA Experiment 20001905 PARAMETER Experiment Name: At_Drought_Reproduction_P Parameter: Age (day) Value: 40
  misc_feature: MA Experiment 20001905 PARAMETER Experiment Name: At_Drought_Reproduction_P Parameter: Organism Value: A. thaliana
  misc_feature: MA Experiment 20001905 PARAMETER Experiment Name: At_Drought_Reproduction_P Parameter: Plant Line Value: WS
  misc_feature: MA Experiment 20001905 PARAMETER Experiment Name: At_Drought_Reproduction_P Parameter: Timepoint (day) Value: 10
  misc_feature: MA Experiment 20001905 PARAMETER Experiment Name: At_Drought_Reproduction_P Parameter: Tissue Value: Rosettes
  misc_feature: MA Experiment 20001905 PARAMETER Experiment Name: At_Drought_Reproduction_P Parameter: Treatment Value: Drought vs. No Drought
  misc_feature: MA Experiment ID: 20001911 Result: Up-regulated in Transcription
  misc_feature: MA Experiment 20001911 PARAMETER Experiment Name: At_Drought_Reproduction_P Parameter: Age (day) Value: 40
  misc_feature: MA Experiment 20001911 PARAMETER Experiment Name: At_Drought_Reproduction_P Parameter: Organism Value: A. thaliana
  misc_feature: MA Experiment 20001911 PARAMETER Experiment Name: At_Drought_Reproduction_P Parameter: Plant Line Value: WS
  misc_feature: MA Experiment 20001911 PARAMETER Experiment Name: At_Drought_Reproduction_P Parameter: Timepoint (day) Value: 10
  misc_feature: MA Experiment 20001911 PARAMETER Experiment Name: At_Drought_Reproduction_P Parameter: Tissue Value: Flowers
  misc_feature: MA Experiment 20001911 PARAMETER Experiment Name: At_Drought_Reproduction_P Parameter: Treatment Value: Drought vs. No Drought
atgggaaatgatcaacataaccacagtgacagaggattcttccacaacttagcagggtttgcaggcggccaatacccgcctcacggtcatggttacggtcatcatggtcacggttatggatcttcttatccatacccgcctcctcctcctcctcatggctatccaccagttgcttatcctccacatggtggttaccctcctgctggttatcctcccgctggttatcctccagccggttatcctgctcacggttatccatctcacggttatccccgtccatctcactcaggacatcaccatggaggcataggagcgattatagcgggtggagtggctgcagcagctggtgctcaccatatgtctcaccaccatggacactatggtcaccaccatggtcatggctatggctacgggtatcacggtcacgggaagttcaaacacggtaagttcaagcacggaaaattcggtaaacacggcatgtttgggaagcataaagggaaattcttcaagaaatggaagtga

SEQ ID NO: 71455 - protein, 173 aa, Arabidopsis thaliana
  peptide (1)..(173): Ceres Seq. ID no. 3599786
  misc_feature (54)..(116): Pfam Name: Bindin Pfam Description: Bindin
  misc_feature (1)..(173): Homolog of NCBI NO: 15238005 NR Description: glycine/proline-rich protein; protein id:
  misc_feature (1)..(173): Homolog of NCBI NO: 18422542 NR Description: expressed protein; protein id: At5g45350.1, by cDNA: 22538., supported by cDNA: gi_15529251 [Arabidopsis
  misc_feature (2)..(173): Homolog of NCBI NO: 13543234 NR Description: Unknown (protein for MGC:12025) [Mus musculus]
  misc_feature (2)..(173): Homolog of NCBI NO: 33668156 NR Description: GPRP [Oryza sativa (indica cultivar-group)]
  misc_feature (2)..(173): Homolog of NCBI NO: 15234178 NR Description: putative protein; protein id: At4g19200.1, by cDNA: 8188. [Arabidopsis thaliana] >gi|25407569|pir||A85217
  misc_feature (2)..(167): Homolog of NCBI NO: 6478148 NR Description: putative glycine and proline-rich protein
  misc_feature (1)..(173): Homolog of NCBI NO: 18398103 NR Description: expressed protein; protein id: At1g31750.1, by cDNA: 144447. [Arabidopsis thaliana] >gi|25518325|pir||A86441
  misc_feature (1)..(173): Homolog of NCBI NO: 21553447 NR Description: putative glycine and proline-rich protein
  misc_feature (2)..(154): Homolog of NCBI NO: 7487135 NR Description: hypothetical protein T18B16.170 - Arabidopsis >gi|2828295|emb|CAA16709.1| putative protein [Arabidopsis
  misc_feature (2)..(136): Homolog of NCBI NO: 585217 NR Description: GLYCINE RICH PROTEIN A3 >gi|322728|pir||S32123
MGNDQHNHSDRGFFHNLAGFAGGQYPPHGHGYGHHGHGYGSSYPYPPPPPPHGYPPVAYPPHGGYPPAGYPPAGYPPAGYPAHGYPSHGYPRPSHSGHHHGGIGAIIAGGVAAAAGAHHMSHHHGHYGHHHGHGYGYGYHGHGKFKHGKFKHGKFGKHGMFGKHKGKFFKKWK

SEQ ID NO: 71456 - DNA, 1296 bp, Arabidopsis thaliana
  misc_feature (1)..(1296): Ceres Seq. ID no. 3600122
  misc_feature: MA Experiment ID: 20000264 Result: Down-regulated in Transcription
  misc_feature: MA Experiment 20000264 PARAMETER Experiment Name: At_Open_Flower_P Parameter: Age (day) Value: 21
  misc_feature: MA Experiment 20000264 PARAMETER Experiment Name: At_Open_Flower_P Parameter: Plant Line Value: WS
  misc_feature: MA Experiment 20000264 PARAMETER Experiment Name: At_Open_Flower_P Parameter: Tissue Value: Open Flower vs. Whole Plant
  misc_feature: MA Experiment ID: 20001773 Result: Up-regulated in Transcription
  misc_feature: MA Experiment 20001773 PARAMETER Experiment Name: At_Far-red-enriched-adult_P Parameter: Age (day) Value: 30
  misc_feature: MA Experiment 20001773 PARAMETER Experiment Name: At_Far-red-enriched-adult_P Parameter: Light Value: Far-red enriched vs. White
  misc_feature: MA Experiment 20001773 PARAMETER Experiment Name: At_Far-red-enriched-adult_P Parameter: Organism Value: A. thaliana
  misc_feature: MA Experiment 20001773 PARAMETER Experiment Name: At_Far-red-enriched-adult_P Parameter: Plant Line Value: Columbia
  misc_feature: MA Experiment 20001773 PARAMETER Experiment Name: At_Far-red-enriched-adult_P Parameter: Timepoint (hr) Value: 48
  misc_feature: MA Experiment 20001773 PARAMETER Experiment Name: At_Far-red-enriched-adult_P Parameter: Tissue Value: Aerial
  misc_feature: MA Experiment ID: 20001906 Result: Down-regulated in Transcription
  misc_feature: MA Experiment 20001906 PARAMETER Experiment Name: At_Drought_Reproduction_P Parameter: Age (day) Value: 35
  misc_feature: MA Experiment 20001906 PARAMETER Experiment Name: At_Drought_Reproduction_P Parameter: Organism Value: A. thaliana
  misc_feature: MA Experiment 20001906 PARAMETER Experiment Name: At_Drought_Reproduction_P Parameter: Plant Line Value: WS
  misc_feature: MA Experiment 20001906 PARAMETER Experiment Name: At_Drought_Reproduction_P Parameter: Timepoint (day) Value: 5
  misc_feature: MA Experiment 20001906 PARAMETER Experiment Name: At_Drought_Reproduction_P Parameter: Tissue Value: Siliques
  misc_feature: MA Experiment 20001906 PARAMETER Experiment Name: At_Drought_Reproduction_P Parameter: Treatment Value: Drought vs. No Drought
atgaggctcctcttcagcttctgcttcttcttcttcatgatcatctttaccgcaactgcttatgatccattagatcctagtggtaacattacaatcaaatgggatattatgtcctggacggcagatggctatgtggctacggtaactatgaacaacttccaaatctaccggcacatacaaaaccctggttggacattaggttggacatgggcaaagaaagaggtgatttggtcaatggttggtgcacaaacaacagaacaaggagactgttccaagtttaagggaaatgtacctcattgctgtaagaaaacccctacagttgttgatctcttgccaggtgtgccttataatcaacagttctcaaactgttgcaaaggaggtgtaattggagcttggggtcaagatccatcagccgctgtatcccagtttcaggttagtgctggtttagctggaactacaaacaagactgtcaagcttcctaagaacttcactttgcttggtcccggccctggttacacttgcggtcctgccaaaatcgtgccctctaccgtttttctcacaactgacaaacggcgaaaaacacaagctttgatgacatggaatgttacctgcacatactcacagtttttagcaagaaagcatccaagctgttgtgtctccttctcttctttctacaacgacaccataactccttgcccgtcttgtgcctgtggctgcgagaacaaaaagagctgcgtcaaggctgattctaagattctaaccaagaaaggtctcaacacaccaaaaaaggacaacactcctttgttgcaatgcacacatcacatgtgccctgttagagtccactggcacgttaaaactaactacaaagactattggcgagtgaagatagcaatcacaaatttcaattaccggatgaatcatacactctggactttagcaattcagcatccaaatctcaacaatgtgactcaagttttcagctttgactacaaaccagtctctccttacggatccataaatgatactggaatgttctatggaacgaagttttacaatgatttattaatggaagctggaccttcagggaatgtgcaatcagaggttttgctacagaaagatcaaaagacttttactttcaagcaaggttgggcttttcctagaaaagtttactttaatggtgatgaatgtatgttacctccaccagattcatacccttttctaccaaactctgcacaagggaactttgcttcgttctcactcaccattcttcttctcctattcatctcaatatggtga

SEQ ID NO: 71457 - protein, 431 aa, Arabidopsis thaliana
  peptide (1)..(431): Ceres Seq. ID no. 3600123
  misc_feature (1)..(431): Homolog of NCBI NO: 30685446 NR Description: phytochelatin synthetase -related [Arabidopsis
  misc_feature (37)..(431): Homolog of NCBI NO: 11358657 NR Description: probable phytochelatin synthetase - Arabidopsis >gi|9755608|emb|CAC01762.1| putative phytochelatin synthetase
  misc_feature (2)..(428): Homolog of NCBI NO: 21553837 NR Description: phytochelatin synthetase-like protein
  misc_feature (2)..(428): Homolog of NCBI NO: 18424412 NR Description: phytochelatin synthetase - like protein; protein At5g60920.1, supported by cDNA: 17250., supported by cDNA: [Arabidopsis thaliana] >gi|14193657|gb|AAK56072.1|AF319663_1
  misc_feature (1)..(430): Homolog of NCBI NO: 13477083 NR Description: phytochelatin synthetase-like protein
  misc_feature (1)..(430): Homolog of NCBI NO: 21618129 NR Description: phytochelatin synthetase-like protein
  misc_feature (1)..(430): Homolog of NCBI NO: 18406342 NR Description: phytochelatin synthetase-like protein; protein
  misc_feature (3)..(426): Homolog of NCBI NO: 15232863 NR Description: unknown protein; protein id: At3g02210.1 thaliana] >gi|6041808|gb|AAF02128.1|AC009755_21 unknown protein
  misc_feature (17)..(427): Homolog of NCBI NO: 30090026 NR Description: phytochelatin synthetase-like protein 2 [Sorghum
  misc_feature (11)..(424): Homolog of NCBI NO: 30090032 NR Description: phytochelatin synthetase [Triticum monococcum]
MRLLFSFCFFFFMIIFTATAYDPLDPSGNITIKWDIMSWTADGYVATVTMNNFQIYRHIQNPGWTLGWTWAKKEVIWSMVGAQTTEQGDCSKFKGNVPHCCKKTPTVVDLLPGVPYNQQFSNCCKGGVIGAWGQDPSAAVSQFQVSAGLAGTTNKTVKLPKNFTLLGPGPGYTCGPAKIVPSTVFLTTDKRRKTQALMTWNVTCTYSQFLARKHPSCCVSFSSFYNDTITPCPSCACGCENKKSCVKADSKILTKKGLNTPKKDNTPLLQCTHHMCPVRVHWHVKTNYKDYWRVKIAITNFNYRMNHTLWTLAIQHPNLNNVTQVFSFDYKPVSPYGSINDTGMFYGTKFYNDLLMEAGPSGNVQSEVLLQKDQKTFTFKQGWAFPRKVYFNGDECMLPPPDSYPFLPNSAQGNFASFSLTILLLLFISIW

SEQ ID NO: 71458 - protein, 419 aa, Arabidopsis thaliana
  peptide (1)..(419): Ceres Seq. ID no. 3600124
  misc_feature (1)..(419): Homolog of NCBI NO: 30685446 NR Description: phytochelatin synthetase -related [Arabidopsis
  misc_feature (25)..(419): Homolog of NCBI NO: 11358657 NR Description: probable phytochelatin synthetase - Arabidopsis >gi|9755608|emb|CAC01762.1| putative phytochelatin synthetase
  misc_feature (1)..(416): Homolog of NCBI NO: 21553837 NR Description: phytochelatin synthetase-like protein
  misc_feature (1)..(416): Homolog of NCBI NO: 18424412 NR Description: phytochelatin synthetase - like protein; protein At5g60920.1, supported by cDNA: 17250., supported by cDNA: [Arabidopsis thaliana] >gi|14193657|gb|AAK56072.1|AF319663_1
  misc_feature (1)..(418): Homolog of NCBI NO: 13477083 NR Description: phytochelatin synthetase-like protein
  misc_feature (1)..(418): Homolog of NCBI NO: 21618129 NR Description: phytochelatin synthetase-like protein
  misc_feature (1)..(418): Homolog of NCBI NO: 18406342 NR Description: phytochelatin synthetase-like protein; protein
  misc_feature (1)..(414): Homolog of NCBI NO: 15232863 NR Description: unknown protein; protein id: At3g02210.1 thaliana] >gi|6041808|gb|AAF02128.1|AC009755_21 unknown protein
  misc_feature (5)..(415): Homolog of NCBI NO: 30090026 NR Description: phytochelatin synthetase-like protein 2 [Sorghum
  misc_feature (1)..(412): Homolog of NCBI NO: 30090032 NR Description: phytochelatin synthetase [Triticum monococcum]
MIIFTATAYDPLDPSGNITIKWDIMSWTADGYVATVTMNNFQIYRHIQNPGWTLGWTWAKKEVIWSMVGAQTTEQGDCSKFKGNVPHCCKKTPTVVDLLPGVPYNQQFSNCCKGGVIGAWGQDPSAAVSQFQVSAGLAGTTNKTVKLPKNFTLLGPGPGYTCGPAKIVPSTVFLTTDKRRKTQALMTWNVTCTYSQFLARKHPSCCVSFSSFYNDTITPCPSCACGCENKKSCVKADSKILTKKGLNTPKKDNTPLLQCTHHMCPVRVHWHVKTNYKDYWRVKIAITNFNYRMNHTLWTLAIQHPNLNNVTQVFSFDYKPVSPYGSINDTGMFYGTKFYNDLLMEAGPSGNVQSEVLLQKDQKTFTFKQGWAFPRKVYFNGDECMLPPPDSYPFLPNSAQGNFASFSLTILLLLFISIW

SEQ ID NO: 71459 - protein, 395 aa, Arabidopsis thaliana
  peptide (1)..(395): Ceres Seq. ID no. 3600125
  misc_feature (1)..(395): Homolog of NCBI NO: 30685446 NR Description: phytochelatin synthetase -related [Arabidopsis
  misc_feature (1)..(395): Homolog of NCBI NO: 11358657 NR Description: probable phytochelatin synthetase - Arabidopsis >gi|9755608|emb|CAC01762.1| putative phytochelatin synthetase
  misc_feature (1)..(392): Homolog of NCBI NO: 21553837 NR Description: phytochelatin synthetase-like protein
  misc_feature (1)..(392): Homolog of NCBI NO: 18424412 NR Description: phytochelatin synthetase - like protein; protein At5g60920.1, supported by cDNA: 17250., supported by cDNA: [Arabidopsis thaliana] >gi|14193657|gb|AAK56072.1|AF319663_1
  misc_feature (1)..(394): Homolog of NCBI NO: 13477083 NR Description: phytochelatin synthetase-like protein
  misc_feature (1)..(394): Homolog of NCBI NO: 21618129 NR Description: phytochelatin synthetase-like protein
  misc_feature (1)..(394): Homolog of NCBI NO: 18406342 NR Description: phytochelatin synthetase-like protein; protein
  misc_feature (1)..(390): Homolog of NCBI NO: 15232863 NR Description: unknown protein; protein id: At3g02210.1 thaliana] >gi|6041808|gb|AAF02128.1|AC009755_21 unknown protein
  misc_feature (1)..(391): Homolog of NCBI NO: 30090026 NR Description: phytochelatin synthetase-like protein 2 [Sorghum
  misc_feature (1)..(388): Homolog of NCBI NO: 30090032 NR Description: phytochelatin synthetase [Triticum monococcum]
MSWTADGYVATVTMNNFQIYRHIQNPGWTLGWTWAKKEVIWSMVGAQTTEQGDCSKFKGNVPHCCKKTPTVVDLLPGVPYNQQFSNCCKGGVIGAWGQDPSAAVSQFQVSAGLAGTTNKTVKLPKNFTLLGPGPGYTCGPAKIVPSTVFLTTDKRRKTQALMTWNVTCTYSQFLARKHPSCCVSFSSFYNDTITPCPSCACGCENKKSCVKADSKILTKKGLNTPKKDNTPLLQCTHHMCPVRVHWHVKTNYKDYWRVKIAITNFNYRMNHTLWTLAIQHPNLNNVTQVFSFDYKPVSPYGSINDTGMFYGTKFYNDLLMEAGPSGNVQSEVLLQKDQKTFTFKQGWAFPRKVYFNGDECMLPPPDSYPFLPNSAQGNFASFSLTILLLLFISIW

SEQ ID NO: 71460 - DNA, 624 bp, Arabidopsis thaliana
  misc_feature (1)..(624): Ceres Seq. ID no. 3630021
  misc_feature: MA Experiment ID: 20000315 Result: Down-regulated in Transcription
  misc_feature: MA Experiment 20000315 PARAMETER Experiment Name: At_14day_Shoots-Roots_Sub_P Parameter: Age (day) Value: 14
  misc_feature: MA Experiment 20000315 PARAMETER Experiment Name: At_14day_Shoots-Roots_Sub_P Parameter: Organism Value: A. thaliana
  misc_feature: MA Experiment 20000315 PARAMETER Experiment Name: At_14day_Shoots-Roots_Sub_P Parameter: Plant Line Value: WS
  misc_feature: MA Experiment 20000315 PARAMETER Experiment Name: At_14day_Shoots-Roots_Sub_P Parameter: Tissue Value: Shoots vs. Whole Plant
  misc_feature: MA Experiment ID: 20000327 Result: Up-regulated in Transcription
  misc_feature: MA Experiment 20000327 PARAMETER Experiment Name: At_42deg_Heat_Sub_P Parameter: Age (day) Value: 14
  misc_feature: MA Experiment 20000327 PARAMETER Experiment Name: At_42deg_Heat_Sub_P Parameter: Organism Value: A. thaliana
  misc_feature: MA Experiment 20000327 PARAMETER Experiment Name: At_42deg_Heat_Sub_P Parameter: Plant Line Value: WS
  misc_feature: MA Experiment 20000327 PARAMETER Experiment Name: At_42deg_Heat_Sub_P Parameter: Temperature (deg C) Value: 42 vs. 22
  misc_feature: MA Experiment 20000327 PARAMETER Experiment Name: At_42deg_Heat_Sub_P Parameter: Timepoint (hr) Value: 1
  misc_feature: MA Experiment 20000327 PARAMETER Experiment Name: At_42deg_Heat_Sub_P Parameter: Tissue Value: Aerial
atggaatcagagagcgttaagtttggaggtcctagagaattgggtggtgcactagatcttataacacaatacaagttgttgccacaccatgaattcttttgcaagagatcacttccagagtcactgtcagatgctcattatcttcataatttggttggagacacagagattagaaaaggagaaggaatgcaattagatcagcttattcctaatgcatcacttagtagccgagatacgaatgctcgcatccaaccttttgttcttgatgaacttaaggaggcttttgagcttaatgatacagctcctgttgaattgcctccagcagagaagggagctcctaccactgtatcaaaatcaaaaagtgagtcaaaagataaggataggaaacatagaaaacataaagacaagaaggagaaagatagggaacataagaagcacaagcacaagcataaagataggatcaaagataaggataaagacaaggatcgagacaaaaagaaggaaaaaagtggacaccatgataagaaaaggaagaacaatgggactgaagatgctgatgacgttcagaggcacaaaaagagtaagcataagagctcaaagcttgatgagatgggagcgatgtag

SEQ ID NO: 71461 - protein, 207 aa, Arabidopsis thaliana
  peptide (1)..(207): Ceres Seq. ID no. 3630022
  misc_feature (122)..(186): Pfam Name: Dehydrin Pfam Description: Dehydrin
  misc_feature (1)..(207): Homolog of NCBI NO: 15239764 NR Description: putative protein; protein id: At5g19480.1
  misc_feature (1)..(207): Homolog of NCBI NO: 15239910 NR Description: unknown protein; protein id: At5g12230.1 thaliana] >gi|9759390|dbj|BAB10041.1| gene_id:MXC9.19~unknown
  misc_feature (1)..(207): Homolog of NCBI NO: 38454176 NR Description: At5g12230 [Arabidopsis thaliana]
  misc_feature (85)..(200): Homolog of NCBI NO: 29246869 NR Description: GLP_191_32543_34384 [Giardia lamblia ATCC 50803]
  misc_feature (120)..(198): Homolog of NCBI NO: 23612468 NR Description: heat shock protein 86 family protein [Plasmodium
  misc_feature (117)..(197): Homolog of NCBI NO: 28828350 NR Description: hypothetical protein [Dictyostelium discoideum]
  misc_feature (120)..(203): Homolog of NCBI NO: 2642506 NR Description: O1 [Plasmodium falciparum]
  misc_feature (118)..(203): Homolog of NCBI NO: 21040255 NR Description: splicing factor, arginine/serine-rich 12;
  misc_feature (68)..(180): Homolog of NCBI NO: 29246869 NR Description: GLP_191_32543_34384 [Giardia lamblia ATCC 50803]
  misc_feature (115)..(198): Homolog of NCBI NO: 9910564 NR Description: serine-arginine-rich splicing regulatory protein
MESESVKFGGPRELGGALDLITQYKLLPHHEFFCKRSLPESLSDAHYLHNLVGDTEIRKGEGMQLDQLIPNASLSSRDTNARIQPFVLDELKEAFELNDTAPVELPPAEKGAPTTVSKSKSESKDKDRKHRKHKDKKEKDREHKKHKHKHKDRIKDKDKDKDRDKKKEKSGHHDKKRKNNGTEDADDVQRHKKSKHKSSKLDEMGAM

SEQ ID NO: 71462 - protein, 145 aa, Arabidopsis thaliana
  peptide (1)..(145): Ceres Seq. ID no. 3630023
  misc_feature (60)..(124): Pfam Name: Dehydrin Pfam Description: Dehydrin
  misc_feature (1)..(145): Homolog of NCBI NO: 15239764 NR Description: putative protein; protein id: At5g19480.1
  misc_feature (1)..(145): Homolog of NCBI NO: 15239910 NR Description: unknown protein; protein id: At5g12230.1 thaliana] >gi|9759390|dbj|BAB10041.1| gene_id:MXC9.19~unknown
  misc_feature (1)..(145): Homolog of NCBI NO: 38454176 NR Description: At5g12230 [Arabidopsis thaliana]
  misc_feature (23)..(138): Homolog of NCBI NO: 29246869 NR Description: GLP_191_32543_34384 [Giardia lamblia ATCC 50803]
  misc_feature (58)..(136): Homolog of NCBI NO: 23612468 NR Description: heat shock protein 86 family protein [Plasmodium
  misc_feature (55)..(135): Homolog of NCBI NO: 28828350 NR Description: hypothetical protein [Dictyostelium discoideum]
  misc_feature (58)..(141): Homolog of NCBI NO: 2642506 NR Description: O1 [Plasmodium falciparum]
  misc_feature (56)..(141): Homolog of NCBI NO: 21040255 NR Description: splicing factor, arginine/serine-rich 12;
  misc_feature (6)..(118): Homolog of NCBI NO: 29246869 NR Description: GLP_191_32543_34384 [Giardia lamblia ATCC 50803]
  misc_feature (53)..(136): Homolog of NCBI NO: 9910564 NR Description: serine-arginine-rich splicing regulatory protein
MQLDQLIPNASLSSRDTNARIQPFVLDELKEAFELNDTAPVELPPAEKGAPTTVSKSKSESKDKDRKHRKHKDKKEKDREHKKHKHKHKDRIKDKDKDKDRDKKKEKSGHHDKKRKNNGTEDADDVQRHKKSKHKSSKLDEMGAM

SEQ ID NO: 71463 - protein, 137 aa, Arabidopsis thaliana
  peptide (1)..(137): Ceres Seq. ID no. 3630024
MHHLVAEIRMLASNLLFLMNLRRLLSLMIQLLLNCLQQRRELLPLYQNQKVSQKIRIGNIENIKTRRRKIGNIRSTSTSIKIGSKIRIKTRIETKRRKKVDTMIRKGRTMGLKMLMTFRGTKRVSIRAQSLMRWERC

SEQ ID NO: 71464 - DNA, 2361 bp, Arabidopsis thaliana
  misc_feature (1)..(2361): Ceres Seq. ID no. 3630609
atggccactcaaggagaagcgacgttctccgcggccgcgacgacgacgtcgagctatccgacgggaggtgttggtggcaaattgaagcggcaatcggcgaggaggcatgcggcgacaccttattctcgaccaacacagaaccaggtacaacggaggccgtggatctcgagaatcgtcgatcctgcttatcggattatttccggcggcgctaccagaatacttccatatttcttctcgaacgccgcctccgctcctgctcttgctgctcctccagaggatcaaaatcaacatcaaggagtatctagggttttgttgaaattgtttcgatgctgtaaattagatgtgccaatcgccaggatagaagaaggtgagttgcagaataatccacaggacaatgatcccagtgtaaccccaatttcaaataaaccggagccagcatcaattgaagtgggaggtcctagtggtactgcaaacgtgaacgaaggcaatttcagtatcagtgcacagagaagagggaaagcagctttaaatgacgacgttgcaatctcggagcttgaaaggctaatggaaggaaaaacgttttcacaagctgaaattgatcgtctcatagagatgataagttcgagggctattgatctacctgatgtcaagagagacgagagaaatttggagattcctttgagagagggagccaagaaaaatatgagtttatttgataaggcaaaagagcccattggtggcaaggatgctaatagtgaaatatgggctacaccaaccccacttgcaaagtcaataatacttgacggagacaaaatacgagatgaagttggtctttcaccggcagaacttgccaaggcatatatgggaggtcagacatcatcaagtagttcccaaggttttgtagcaagaaatgaaaaggattgtttagataggagtatgcttgtagggaaatcatcacttgcatcaccatcaagcaagccttctgcttgttggcctggtatcaagtcaagtgagcaatctggttttgcaactcctcaaagccgacgagagagctatgggcttcaaaattttccaaggactccttattctagaaccattctttcaaattctaagtcaaagttgatgcaattgcagaacgatagtagcaagcacctaagcaacctccagtctccctctcaaagtgtggagagaagatatggccagcttagcaagggaagggatggtggactttttggacccagtagaagaactcgtcagagcgccacgccgtccatggtgtctccttattcacgaccttcccgtggtgcatctcgttttgaaaattctgctatcatgaagagctctgaagcaggggaatcaagttacctatctaggtcccagataacaacttatggtaagcataaagaggcagaagttggtaccctgactgtgcctacacattctagtcagattgctaggacaatattggatcaccttgaacggacccaatcccaatccaccccaaaaaataaaactgccgagttaaagcttgccacttcctggagacatccacagtcttcgaaaaccgttgaaaaaagcagctcggacgtcaccaatgtgaaaaaggatggctcagctaaattgcatgaagatatccagaacattttctctcagaatcagccatcctctgttcttaaaccacctgcaactaccactggtgacattcaaaatggaatgaacaagaccgcttcagcgacaaatggaatattccgtggaacacaagcagcaagtagcggtggtaacgcactccaatatgagtttgggaagcctaagggttctctttccagaagcatgcatgatgagttgggtacttcttctcaggacgctgcaaaagctgttccctattcttttggaggggaaactgcaaatctccccaaaccaccatctcactcactgggaaataacaaaccggtacttccatcgatctcagtagccaagcccttccaaaaatgggcagtcccttcgggttcaaacgctggcttcacattcccggtctcttcatctgatggaacaacatcatcagagcccacaactccatccatcatgcccttcacaacaagcccaccagtagcaagtggtggtggtgttgccattacgaatcatcacgaagcgagaaaagattacgagattcctcaatttagtttcgacggcagcaacagaagaggagataagtcgcccctggtgttttcgtttccctctgtaagcgaagaggtggtcagtgaggatgatgatgcgaggtttggtatcaaatacacatttgggtcagaaaagccggagaggatatcattcagctcagcaggaagtgacggtgtctgctgttaa

SEQ ID NO: 71465 - protein, 786 aa, Arabidopsis thaliana
  peptide (1)..(786): Ceres Seq. ID no. 3630610
  misc_feature (149)..(455): Homolog of NCBI NO: 15228349 NR Description: hypothetical protein; protein id: At3g10650.1, by cDNA: gi_20260253 [Arabidopsis thaliana]
  misc_feature (10)..(138): Homolog of NCBI NO: 15228349 NR Description: hypothetical protein; protein id: At3g10650.1, by cDNA: gi_20260253 [Arabidopsis thaliana]
  misc_feature (149)..(393): Homolog of NCBI NO: 8567799 NR Description: hypothetical protein [Arabidopsis thaliana]
  misc_feature (10)..(138): Homolog of NCBI NO: 8567799 NR Description: hypothetical protein [Arabidopsis thaliana]
MATQGEATFSAAATTTSSYPTGGVGGKLKRQSARRHAATPYSRPTQNQVQRRPWISRIVDPAYRIISGGATRILPYFFSNAASAPALAAPPEDQNQHQGVSRVLLKLFRCCKLDVPIARIEEGELQNNPQDNDPSVTPISNKPEPASIEVGGPSGTANVNEGNFSISAQRRGKAALNDDVAISELERLMEGKTFSQAEIDRLIEMISSRAIDLPDVKRDERNLEIPLREGAKKNMSLFDKAKEPIGGKDANSEIWATPTPLAKSIILDGDKIRDEVGLSPAELAKAYMGGQTSSSSSQGFVARNEKDCLDRSMLVGKSSLASPSSKPSACWPGIKSSEQSGFATPQSRRESYGLQNFPRTPYSRTILSNSKSKLMQLQNDSSKHLSNLQSPSQSVERRYGQLSKGRDGGLFGPSRRTRQSATPSMVSPYSRPSRGASRFENSAIMKSSEAGESSYLSRSQITTYGKHKEAEVGTLTVPTHSSQIARTILDHLERTQSQSTPKNKTAELKLATSWRHPQSSKTVEKSSSDVTNVKKDGSAKLHEDIQNIFSQNQPSSVLKPPATTTGDIQNGMNKTASATNGIFRGTQAASSGGNALQYEFGKPKGSLSRSMHDELGTSSQDAAKAVPYSFGGETANLPKPPSHSLGNNKPVLPSISVAKPFQKWAVPSGSNAGFTFPVSSSDGTTSSEPTTPSIMPFTTSPPVASGGGVAITNHHEARKDYEIPQFSFDGSNRRGDKSPLVFSFPSVSEEVVSEDDDARFGIKYTFGSEKPERISFSSAGSDGVCC

SEQ ID NO: 71466 - protein, 598 aa, Arabidopsis thaliana
  peptide (1)..(598): Ceres Seq. ID no. 3630611
  misc_feature (1)..(267): Homolog of NCBI NO: 15228349 NR Description: hypothetical protein; protein id: At3g10650.1, by cDNA: gi_20260253 [Arabidopsis thaliana]
  misc_feature (1)..(205): Homolog of NCBI NO: 8567799 NR Description: hypothetical protein [Arabidopsis thaliana]
MEGKTFSQAEIDRLIEMISSRAIDLPDVKRDERNLEIPLREGAKKNMSLFDKAKEPIGGKDANSEIWATPTPLAKSIILDGDKIRDEVGLSPAELAKAYMGGQTSSSSSQGFVARNEKDCLDRSMLVGKSSLASPSSKPSACWPGIKSSEQSGFATPQSRRESYGLQNFPRTPYSRTILSNSKSKLMQLQNDSSKHLSNLQSPSQSVERRYGQLSKGRDGGLFGPSRRTRQSATPSMVSPYSRPSRGASRFENSAIMKSSEAGESSYLSRSQITTYGKHKEAEVGTLTVPTHSSQIARTILDHLERTQSQSTPKNKTAELKLATSWRHPQSSKTVEKSSSDVTNVKKDGSAKLHEDIQNIFSQNQPSSVLKPPATTTGDIQNGMNKTASATNGIFRGTQAASSGGNALQYEFGKPKGSLSRSMHDELGTSSQDAAKAVPYSFGGETANLPKPPSHSLGNNKPVLPSISVAKPFQKWAVPSGSNAGFTFPVSSSDGTTSSEPTTPSIMPFTTSPPVASGGGVAITNHHEARKDYEIPQFSFDGSNRRGDKSPLVFSFPSVSEEVVSEDDDARFGIKYTFGSEKPERISFSSAGSDGVCC

SEQ ID NO: 71467 - protein, 582 aa, Arabidopsis thaliana
  peptide (1)..(582): Ceres Seq. ID no. 3630612
  misc_feature (1)..(251): Homolog of NCBI NO: 15228349 NR Description: hypothetical protein; protein id: At3g10650.1, by cDNA: gi_20260253 [Arabidopsis thaliana]
  misc_feature (1)..(189): Homolog of NCBI NO: 8567799 NR Description: hypothetical protein [Arabidopsis thaliana]
MISSRAIDLPDVKRDERNLEIPLREGAKKNMSLFDKAKEPIGGKDANSEIWATPTPLAKSIILDGDKIRDEVGLSPAELAKAYMGGQTSSSSSQGFVARNEKDCLDRSMLVGKSSLASPSSKPSACWPGIKSSEQSGFATPQSRRESYGLQNFPRTPYSRTILSNSKSKLMQLQNDSSKHLSNLQSPSQSVERRYGQLSKGRDGGLFGPSRRTRQSATPSMVSPYSRPSRGASRFENSAIMKSSEAGESSYLSRSQITTYGKHKEAEVGTLTVPTHSSQIARTILDHLERTQSQSTPKNKTAELKLATSWRHPQSSKTVEKSSSDVTNVKKDGSAKLHEDIQNIFSQNQPSSVLKPPATTTGDIQNGMNKTASATNGIFRGTQAASSGGNALQYEFGKPKGSLSRSMHDELGTSSQDAAKAVPYSFGGETANLPKPPSHSLGNNKPVLPSISVAKPFQKWAVPSGSNAGFTFPVSSSDGTTSSEPTTPSIMPFTTSPPVASGGGVAITNHHEARKDYEIPQFSFDGSNRRGDKSPLVFSFPSVSEEVVSEDDDARFGIKYTFGSEKPERISFSSAGSDGVCC

SEQ ID NO: 71468 - DNA, 1953 bp, Arabidopsis thaliana
  misc_feature (1)..(1953): Ceres Seq. ID no. 3631006
atggtgcggacattaggacgtaaactaagctggccaagatcttttagttttagaaagatgttcgatggtcggaactctggacattcatctttctcttctcgtggggatggcatgcatacacccgagcacgaactcgccggacatgctgcaccatccactcgtagaggcaagcaaaataggagatcagacatggaagtgatgaaggaaagattcgcaaaactgcttcttggagaggacatgtcaggcggtgggacaggggagacctctgcgttagctttgtcaaacgccatcaccaaactcgctgattcgatgtttggagagcagatgaaattgcagcctatgtatccggagacaaaagagaattggaggaaagaaatgggttggttattatctgtgattgatcacattgtccagtttgttccttctagacaaatgggtaaaaatggccaattcactgagatcatggttacaaaacaaagagatgatttgctgacgaacattccagctttacgcaaacttgactcggttcttctcgaaactttggacaacttcaaggatcagaaagacttttggtatgtgccaagagatatggaggatgcagatcacaatggagattggaggagggatgagaactggtggttaccagttgttaaggttccaacagatggcttgtctgaggaatcacgtagatggttgcagaatcagaaagattctgtggctcaagtccttaaagccgccacggccatcaatgctcatgtattgtctgaaatgcacgttcctgaaaactacattgattcccttccaaagaatgggaagacaagcttgggagattttctttacaagagcataacagaggagagctttgatcctgactactttgtctctttcttggatttgtcaacggaacacaaagtacttgatctaaagaacaggattgaagcttccatggtgatctggaagaggaagatgtgccagaaagagaaagacgggaaatctcagtggggatccactgttagcttagagaagagggagcttttcgaagtccgagctgagaccattttggttatgctcaaacaacaatttcctgggatcccacaatcctcccttgaagtctccaagattaaaaacaacaaggatgttggacaggcgattttggagagctattcaagggtactagagagtcttgcttcaaagataatgtcaagaatagaggatgttcttgaagccgatcggctagttcaaagacagttgatgggagaggcagagacaagatcagaaagcgaggcagaatcagaatacgaggaaactgaaaaggtggttgcagcggaaacaccaaactcgaggaaactatcagacttcatagggtggagattgtcatctgatactaagaagcatagttcaatgagtgatatagaattcttccacaaagttgagcaggagaaggagaagcccatgatgaagtctccaagagctctaccgaagaaattttcatatctagcaaaaacaacggaaaaggcaaatcgggatcagccaccggcgatgaaggaagacatggataagatggtggcggtagggctcgtatggggagccaccaatgctctgatccgtcgtggcgctcttgcctgggataaaacaaagtcttcttcgacaacagaatctcattctcctcctcttcagatccgccgcaaaatcatgattgctctccgcgactggatcaatctcctcctcttctggcaatactcaattcctttcctcataaacctctccgcctccgccacattcttcgcccttctcagtcacgctcccatctctcttgccgttccggtgactaacgccacaacctttgccgcaaccgccgcttttgggatccttttaggggaagaaactcaaatcggacttgctttgttaggtacgagctttattgtatttggaatttggctttgtgttctgtga

SEQ ID NO: 71469 - protein, 650 aa, Arabidopsis thaliana
  peptide (1)..(650): Ceres Seq. ID no. 3631007
  misc_feature (50)..(416): Pfam Name: Domain of unknown function (DUF315) Pfam Description: Domain of unknown function (DUF315)
  misc_feature (20)..(501): Homolog of NCBI NO: 15239773 NR Description: putative protein; protein id: At5g19560.1
  misc_feature (1)..(512): Homolog of NCBI NO: 15235630 NR Description: putative protein; protein id: At4g13240.1
  misc_feature (50)..(512): Homolog of NCBI NO: 15230137 NR Description: hypothetical protein; protein id: At3g24620.1 thaliana] >gi|9294058|dbj|BAB02015.1|
  misc_feature (64)..(499): Homolog of NCBI NO: 25349303 NR Description: unknown protein [imported] - Arabidopsis thaliana
  misc_feature (42)..(467): Homolog of NCBI NO: 15220004 NR Description: hypothetical protein; protein id: At1g79860.1
  misc_feature (49)..(461): Homolog of NCBI NO: 34909732 NR Description: contains EST AU069857(E4450)~similar to
  misc_feature (62)..(467): Homolog of NCBI NO: 9294460 NR Description: gb|AAF29411.1~gene_id:MSL1.17~strong similarity
  misc_feature (62)..(467): Homolog of NCBI NO: 15233289 NR Description: unknown protein; protein id: At3g16130.1
  misc_feature (51)..(481): Homolog of NCBI NO: 34911076 NR Description: P0485G01.25 [Oryza sativa (japonica
  misc_feature (64)..(378): Homolog of NCBI NO: 30695174 NR Description: expressed protein [Arabidopsis thaliana]
MVRTLGRKLSWPRSFSFRKMFDGRNSGHSSFSSRGDGMHTPEHELAGHAAPSTRRGKQNRRSDMEVMKERFAKLLLGEDMSGGGTGETSALALSNAITKLADSMFGEQMKLQPMYPETKENWRKEMGWLLSVIDHIVQFVPSRQMGKNGQFTEIMVTKQRDDLLTNIPALRKLDSVLLETLDNFKDQKDFWYVPRDMEDADHNGDWRRDENWWLPVVKVPTDGLSEESRRWLQNQKDSVAQVLKAATAINAHVLSEMHVPENYIDSLPKNGKTSLGDFLYKSITEESFDPDYFVSFLDLSTEHKVLDLKNRIEASMVIWKRKMCQKEKDGKSQWGSTVSLEKRELFEVRAETILVMLKQQFPGIPQSSLEVSKIKNNKDVGQAILESYSRVLESLASKIMSRIEDVLEADRLVQRQLMGEAETRSESEAESEYEETEKVVAAETPNSRKLSDFIGWRLSSDTKKHSSMSDIEFFHKVEQEKEKPMMKSPRALPKKFSYLAKTTEKANRDQPPAMKEDMDKMVAVGLVWGATNALIRRGALAWDKTKSSSTTESHSPPLQIRRKIMIALRDWINLLLFWQYSIPFLINLSASATFFALLSHAPISLAVPVTNATTFAATAAFGILLGEETQIGLALLGTSFIVFGIWLCVL

SEQ ID NO: 71470 - protein, 631 aa, Arabidopsis thaliana
  peptide (1)..(631): Ceres Seq. ID no. 3631008
  misc_feature (31)..(397): Pfam Name: Domain of unknown function (DUF315) Pfam Description: Domain of unknown function (DUF315)
  misc_feature (1)..(482): Homolog of NCBI NO: 15239773 NR Description: putative protein; protein id: At5g19560.1
  misc_feature (1)..(493): Homolog of NCBI NO: 15235630 NR Description: putative protein; protein id: At4g13240.1
  misc_feature (31)..(493): Homolog of NCBI NO: 15230137 NR Description: hypothetical protein; protein id: At3g24620.1 thaliana] >gi|9294058|dbj|BAB02015.1|
  misc_feature (45)..(480): Homolog of NCBI NO: 25349303 NR Description: unknown protein [imported] - Arabidopsis thaliana
  misc_feature (23)..(448): Homolog of NCBI NO: 15220004 NR Description: hypothetical protein; protein id: At1g79860.1
  misc_feature (30)..(442): Homolog of NCBI NO: 34909732 NR Description: contains EST AU069857(E4450)~similar to
  misc_feature (43)..(448): Homolog of NCBI NO: 9294460 NR Description: gb|AAF29411.1~gene_id:MSL1.17~strong similarity
  misc_feature (43)..(448): Homolog of NCBI NO: 15233289 NR Description: unknown protein; protein id: At3g16130.1
  misc_feature (32)..(462): Homolog of NCBI NO: 34911076 NR Description: P0485G01.25 [Oryza sativa (japonica
  misc_feature (45)..(359): Homolog of NCBI NO: 30695174 NR Description: expressed protein [Arabidopsis thaliana]
MFDGRNSGHSSFSSRGDGMHTPEHELAGHAAPSTRRGKQNRRSDMEVMKERFAKLLLGEDMSGGGTGETSALALSNAITKLADSMFGEQMKLQPMYPETKENWRKEMGWLLSVIDHIVQFVPSRQMGKNGQFTEIMVTKQRDDLLTNIPALRKLDSVLLETLDNFKDQKDFWYVPRDMEDADHNGDWRRDENWWLPVVKVPTDGLSEESRRWLQNQKDSVAQVLKAATAINAHVLSEMHVPENYIDSLPKNGKTSLGDFLYKSITEESFDPDYFVSFLDLSTEHKVLDLKNRIEASMVIWKRKMCQKEKDGKSQWGSTVSLEKRELFEVRAETILVMLKQQFPGIPQSSLEVSKIKNNKDVGQAILESYSRVLESLASKIMSRIEDVLEADRLVQRQLMGEAETRSESEAESEYEETEKVVAAETPNSRKLSDFIGWRLSSDTKKHSSMSDIEFFHKVEQEKEKPMMKSPRALPKKFSYLAKTTEKANRDQPPAMKEDMDKMVAVGLVWGATNALIRRGALAWDKTKSSSTTESHSPPLQIRRKIMIALRDWINLLLFWQYSIPFLINLSASATFFALLSHAPISLAVPVTNATTFAATAAFGILLGEETQIGLALLGTSFIVFGIWLCVL

SEQ ID NO: 71471 - protein, 613 aa, Arabidopsis thaliana
  peptide (1)..(613): Ceres Seq. ID no. 3631009
  misc_feature (13)..(379): Pfam Name: Domain of unknown function (DUF315) Pfam Description: Domain of unknown function (DUF315)
  misc_feature (1)..(464): Homolog of NCBI NO: 15239773 NR Description: putative protein; protein id: At5g19560.1
  misc_feature (1)..(475): Homolog of NCBI NO: 15235630 NR Description: putative protein; protein id: At4g13240.1
  misc_feature (13)..(475): Homolog of NCBI NO: 15230137 NR Description: hypothetical protein; protein id: At3g24620.1 thaliana] >gi|9294058|dbj|BAB02015.1|
  misc_feature (27)..(462): Homolog of NCBI NO: 25349303 NR Description: unknown protein [imported] - Arabidopsis thaliana
  misc_feature (5)..(430): Homolog of NCBI NO: 15220004 NR Description: hypothetical protein; protein id: At1g79860.1
  misc_feature (12)..(424): Homolog of NCBI NO: 34909732 NR Description: contains EST AU069857(E4450)~similar to
  misc_feature (25)..(430): Homolog of NCBI NO: 9294460 NR Description: gb|AAF29411.1~gene_id:MSL1.17~strong similarity
  misc_feature (25)..(430): Homolog of NCBI NO: 15233289 NR Description: unknown protein; protein id: At3g16130.1
  misc_feature (14)..(444): Homolog of NCBI NO: 34911076 NR Description: P0485G01.25 [Oryza sativa (japonica
  misc_feature (27)..(341): Homolog of NCBI NO: 30695174 NR Description: expressed protein [Arabidopsis thaliana]
MHTPEHELAGHAAPSTRRGKQNRRSDMEVMKERFAKLLLGEDMSGGGTGETSALALSNAITKLADSMFGEQMKLQPMYPETKENWRKEMGWLLSVIDHIVQFVPSRQMGKNGQFTEIMVTKQRDDLLTNIPALRKLDSVLLETLDNFKDQKDFWYVPRDMEDADHNGDWRRDENWWLPVVKVPTDGLSEESRRWLQNQKDSVAQVLKAATAINAHVLSEMHVPENYIDSLPKNGKTSLGDFLYKSITEESFDPDYFVSFLDLSTEHKVLDLKNRIEASMVIWKRKMCQKEKDGKSQWGSTVSLEKRELFEVRAETILVMLKQQFPGIPQSSLEVSKIKNNKDVGQAILESYSRVLESLASKIMSRIEDVLEADRLVQRQLMGEAETRSESEAESEYEETEKVVAAETPNSRKLSDFIGWRLSSDTKKHSSMSDIEFFHKVEQEKEKPMMKSPRALPKKFSYLAKTTEKANRDQPPAMKEDMDKMVAVGLVWGATNALIRRGALAWDKTKSSSTTESHSPPLQIRRKIMIALRDWINLLLFWQYSIPFLINLSASATFFALLSHAPISLAVPVTNATTFAATAAFGILLGEETQIGLALLGTSFIVFGIWLCVL

SEQ ID NO: 71472 - DNA, 783 bp, Arabidopsis thaliana
  misc_feature (1)..(783): Ceres Seq. ID no. 3631246
  misc_feature: MA Experiment ID: 20000315 Result: Down-regulated in Transcription
  misc_feature: MA Experiment 20000315 PARAMETER Experiment Name: At_14day_Shoots-Roots_Sub_P Parameter: Age (day) Value: 14
  misc_feature: MA Experiment 20000315 PARAMETER Experiment Name: At_14day_Shoots-Roots_Sub_P Parameter: Organism Value: A. thaliana
  misc_feature: MA Experiment 20000315 PARAMETER Experiment Name: At_14day_Shoots-Roots_Sub_P Parameter: Plant Line Value: WS
  misc_feature: MA Experiment 20000315 PARAMETER Experiment Name: At_14day_Shoots-Roots_Sub_P Parameter: Tissue Value: Shoots vs. Whole Plant
atggaaggaggaactgcgcactacagccctcgaactgtcgaagaagtctttcgagattttaagggccgtcgagctggcatcatccaagctctcaccactgatgtggaagattttttccagcaatgcgaccctgagaagcagaatctctgcttgtatggattcccaaatgaagtgtgggaagttaacttaccagctgaagaagtgcctcctgagcttcccgaacctgcactcggcattaactttgccagagatgggatgcaggaaagaaactggctttctctcgttgctgtccacagtgatgcgtggttactttctgtgtctttttactttggttcaagatttggtttcgatagagctgacaggaagcgcttgtttagtatgataaatgaggttcctactgtatatgaagttgtaactggaaatgcagagaagcaaacaaaggaaatgccctcttcagcaaatcaaaatggcaacagatccaagtcaaattcaaaaatgagaggtttagaaagtaaaagttcaaagacgatacatgccaaggatgaggaagaaggattagagttagaagaaggggaagaggaagaggatgaggatgaagacgaacacggtgaaaccctatgtggagcatgtggagataactatgcttctgatgaattctggatttgctgtgacatgtgcgagaaatggttccacggggagtgtgtgaagatcactccagctagagcggagcatatcaagcattacaagtgccctacttgcagcaacaaaagagcacgaccctag

SEQ ID NO: 71473 - protein, 260 aa, Arabidopsis thaliana
  peptide (1)..(260): Ceres Seq. ID no. 3631247
  misc_feature (206)..(256): Pfam Name: PHD-finger Pfam Description: PHD-finger
  misc_feature (1)..(260): Homolog of NCBI NO: 15226967 NR Description: putative PHD-type zinc finger protein; protein
  misc_feature (1)..(260): Homolog of NCBI NO: 21593407 NR Description: putative PHD-type zinc finger protein
  misc_feature (6)..(254): Homolog of NCBI NO: 14192880 NR Description: Putative nucleic acid binding protein [Oryza
  misc_feature (6)..(254): Homolog of NCBI NO: 34394182 NR Description: putative nucleic acid binding protein [Oryza
  misc_feature (1)..(259): Homolog of NCBI NO: 15229157 NR Description: nucleic acid binding protein-like; protein id: supported by cDNA: gi_17065549 [Arabidopsis thaliana]
  misc_feature (1)..(259): Homolog of NCBI NO: 15239624 NR Description: nucleic acid binding protein - like; protein id:
  misc_feature (1)..(260): Homolog of NCBI NO: 30687843 NR Description: zinc finger protein - like [Arabidopsis thaliana]
  misc_feature (3)..(259): Homolog of NCBI NO: 4091080 NR Description: nucleic acid binding protein [Oryza sativa]
  misc_feature (1)..(259): Homolog of NCBI NO: 7488751 NR Description: probable zinc finger protein - alfalfa (fragment)
  misc_feature (3)..(259): Homolog of NCBI NO: 34907474 NR Description: nucleic acid binding protein [Oryza sativa
MEGGTAHYSPRTVEEVFRDFKGRRAGIIQALTTDVEDFFQQCDPEKQNLCLYGFPNEVWEVNLPAEEVPPELPEPALGINFARDGMQERNWLSLVAVHSDAWLLSVSFYFGSRFGFDRADRKRLFSMINEVPTVYEVVTGNAEKQTKEMPSSANQNGNRSKSNSKMRGLESKSSKTIHAKDEEEGLELEEGEEEEDEDEDEHGETLCGACGDNYASDEFWICCDMCEKWFHGECVKITPARAEHIKHYKCPTCSNKRARP

SEQ ID NO: 71474 - protein, 175 aa, Arabidopsis thaliana
  peptide (1)..(175): Ceres Seq. ID no. 3631248
  misc_feature (121)..(171): Pfam Name: PHD-finger Pfam Description: PHD-finger
  misc_feature (1)..(175): Homolog of NCBI NO: 30687843 NR Description: zinc finger protein - like [Arabidopsis thaliana]
  misc_feature (1)..(174): Homolog of NCBI NO: 15229157 NR Description: nucleic acid binding protein-like; protein id: supported by cDNA: gi_17065549 [Arabidopsis thaliana]
  misc_feature (1)..(174): Homolog of NCBI NO: 15239624 NR Description: nucleic acid binding protein - like; protein id:
  misc_feature (1)..(175): Homolog of NCBI NO: 15226967 NR Description: putative PHD-type zinc finger protein; protein
  misc_feature (1)..(175): Homolog of NCBI NO: 21593407 NR Description: putative PHD-type zinc finger protein
  misc_feature (1)..(169): Homolog of NCBI NO: 14192880 NR Description: Putative nucleic acid binding protein [Oryza
  misc_feature (1)..(169): Homolog of NCBI NO: 34394182 NR Description: putative nucleic acid binding protein [Oryza
  misc_feature (1)..(174): Homolog of NCBI NO: 4091080 NR Description: nucleic acid binding protein [Oryza sativa]
  misc_feature (1)..(174): Homolog of NCBI NO: 7488751 NR Description: probable zinc finger protein - alfalfa (fragment)
  misc_feature (1)..(174): Homolog of NCBI NO: 34907474 NR Description: nucleic acid binding protein [Oryza sativa
MQERNWLSLVAVHSDAWLLSVSFYFGSRFGFDRADRKRLFSMINEVPTVYEVVTGNAEKQTKEMPSSANQNGNRSKSNSKMRGLESKSSKTIHAKDEEEGLELEEGEEEEDEDEDEHGETLCGACGDNYASDEFWICCDMCEKWFHGECVKITPARAEHIKHYKCPTCSNKRARP

SEQ ID NO: 71475 - protein, 134 aa, Arabidopsis thaliana
  peptide (1)..(134): Ceres Seq. ID no. 3631249
  misc_feature (80)..(130): Pfam Name: PHD-finger Pfam Description: PHD-finger
  misc_feature (1)..(134): Homolog of NCBI NO: 30687843 NR Description: zinc finger protein - like [Arabidopsis thaliana]
  misc_feature (1)..(133): Homolog of NCBI NO: 15229157 NR Description: nucleic acid binding protein-like; protein id: supported by cDNA: gi_17065549 [Arabidopsis thaliana]
  misc_feature (1)..(133): Homolog of NCBI NO: 15239624 NR Description: nucleic acid binding protein - like; protein id:
  misc_feature (1)..(134): Homolog of NCBI NO: 15226967 NR Description: putative PHD-type zinc finger protein; protein
  misc_feature (1)..(134): Homolog of NCBI NO: 21593407 NR Description: putative PHD-type zinc finger protein
  misc_feature (1)..(128): Homolog of NCBI NO: 14192880 NR Description: Putative nucleic acid binding protein [Oryza
  misc_feature (1)..(128): Homolog of NCBI NO: 34394182 NR Description: putative nucleic acid binding protein [Oryza
  misc_feature (1)..(133): Homolog of NCBI NO: 4091080 NR Description: nucleic acid binding protein [Oryza sativa]
  misc_feature (1)..(133): Homolog of NCBI NO: 7488751 NR Description: probable zinc finger protein - alfalfa (fragment)
  misc_feature (1)..(133): Homolog of NCBI NO: 34907474 NR Description: nucleic acid binding protein [Oryza sativa
MINEVPTVYEVVTGNAEKQTKEMPSSANQNGNRSKSNSKMRGLESKSSKTIHAKDEEEGLELEEGEEEEDEDEDEHGETLCGACGDNYASDEFWICCDMCEKWFHGECVKITPARAEHIKHYKCPTCSNKRARP

SEQ ID NO: 71476 - DNA, 1851 bp, Arabidopsis thaliana
  misc_feature (1)..(1851): Ceres Seq. ID no. 3658934
  misc_feature: MA Experiment ID: 20000180 Result: Down-regulated in Transcription
  misc_feature: MA Experiment 20000180 PARAMETER Experiment Name: At_Germinating_Seeds_P Parameter: Age (hr) Value: 24 vs. 0
  misc_feature: MA Experiment 20000180 PARAMETER Experiment Name: At_Germinating_Seeds_P Parameter: Tissue Value: Germinating Seeds
  misc_feature: MA Experiment ID: 20000182 Result: Up-regulated in Transcription
  misc_feature: MA Experiment 20000182 PARAMETER Experiment Name: At_2mM_SA_P Parameter: Age (day) Value: 14
  misc_feature: MA Experiment 20000182 PARAMETER Experiment Name: At_2mM_SA_P Parameter: Organism Value: A. thaliana
  misc_feature: MA Experiment 20000182 PARAMETER Experiment Name: At_2mM_SA_P Parameter: Plant Line Value: WS
  misc_feature: MA Experiment 20000182 PARAMETER Experiment Name: At_2mM_SA_P Parameter: Timepoint (hr) Value: 6
  misc_feature: MA Experiment 20000182 PARAMETER Experiment Name: At_2mM_SA_P Parameter: Tissue Value: Aerial
  misc_feature: MA Experiment 20000182 PARAMETER Experiment Name: At_2mM_SA_P Parameter: Treatment Value: 2mM SA vs. No Treatment
  misc_feature: MA Experiment ID: 20000184 Result: Down-regulated in Transcription
  misc_feature: MA Experiment 20000184 PARAMETER Experiment Name: At_Shoots__P Parameter: Age (day) Value: 7
  misc_feature: MA Experiment 20000184 PARAMETER Experiment Name: At_Shoots__P Parameter: Tissue Value: Shoots vs. Whole Plant
  misc_feature: MA Experiment ID: 20001558 Result: Up-regulated in Transcription
  misc_feature: MA Experiment 20001558 PARAMETER Experiment Name: At_Drought_Soil_Dry_P Parameter: Age (day) Value: 27
  misc_feature: MA Experiment 20001558 PARAMETER Experiment Name: At_Drought_Soil_Dry_P Parameter: Organism Value: A. thaliana
  misc_feature: MA Experiment 20001558 PARAMETER Experiment Name: At_Drought_Soil_Dry_P Parameter: Plant Line Value: WS
  misc_feature: MA Experiment 20001558 PARAMETER Experiment Name: At_Drought_Soil_Dry_P Parameter: Post Timepoint (hr) Value: 6
  misc_feature: MA Experiment 20001558 PARAMETER Experiment Name: At_Drought_Soil_Dry_P Parameter: Post-Treatment Value: Re-Water vs. No Drought
  misc_feature: MA Experiment 20001558 PARAMETER Experiment Name: At_Drought_Soil_Dry_P Parameter: Timepoint (day) Value: 13
  misc_feature: MA Experiment 20001558 PARAMETER Experiment Name: At_Drought_Soil_Dry_P Parameter: Treatment Value: Drought vs. No Drought
atgtcgaatacgctttctttgattcaaagcaatgcctcgaatcccaaagtttgggtagtgatcggcgtgacggtggccgggatcgtgattctggcggagacccggaagcggcggattagagcccttagagaagaagactttggtgctttcttagatcgtttcgagcttcttcctttccctccgcctcctcctcctgctgctaaacaatctctctctggtcttaccttctccatctccgacgcgttcgatgttaaggattatatcacaggatttggttgtccacaatggaagaagactcatgaggctgctgagaaaactgctgtggttgtcacgacgctcttgaaaaatggagctacttgtgttggcaagactataatggatgagctgggttttgggattattggagaaaacaagcactatggaactcctattaatccattgatgccagataatgttcctggaggatgttccagtggctcagcagtttctgttggggctgaactcgttgacttttcacttgggattgataccactggtggtgttagagtcccagcagccttttgtggtattcttggttttcgaccatctcaggggactgtttcttcagttggagttttgcccaattctcagagcctagagactgttggatggtttgcctctgatccatccgttttgtgtcaagttggacatgccttactaaatctgagtgcagtaacacatagaaggcaaagatctttaatctttgctgatgatttattcgagctctctgacattcctaagcaaaagtcggtgcaagttgtcagaaaggcaatcgagaatctatctggctacaagactccaaaacatgttaacgttggccaatatgtcgcttcaaatgtaccaagtcttgcggaattctgtgagcaatctgggaaatcccaaaattcagcatcaactttaagggctctttcatctgtgatgttggctatacaaaggcatgagttcaaaacaaatcatgaagaatggtggcaaacatgcaaatcgtttctagggccaagattttccaatgatgttgttacagctctgaagagcaaaaacgagagcattaaatccctctacagagtgaaaaatgagatgcgggccaccattcaaagccttttaaaggaagatggaattctggtaatccccacagttgctgatccccctccaaggcttaacacaaagagaaataaatctttgaatgagtttcttgatcgtacttatgcactctcctgcattgcaagcatgtctggatgttgtcaggttacaattcctttaggggaacatggtgatcgtccaatatccgtgtcgcttcttacttactatggaggtgataagttccttctcgatacaactctcgatgtatatgcatcccttcaagaccaagccaaacttgcatccaacttagctccagtgtctgacaccaatggtaacatggaggcttctgaagttatgaaagaaaagggcaatgctgcatacaaggggaaacaatggaataaggcggtaaacttttatacagaagctataaaattgaatggagcaaatgctacttattattgcaatagagctgcagctttcttggaactttgctgcttccaacaagccgaacaagattgtaccaaggccatgttgatcgataagaagaatgtgaaggcatatttgagacgagggactgctagagaatcacttgtacggtacaaggaagctgctgcagggtattggagcgtaacattatggttgatcatctctgcagatttcaggcacgcattggtccttgaaccacagaacaagacggcaaaggttgctgagaagagactccgaaaacacatatga

SEQ ID NO: 71477 - protein, 616 aa, Arabidopsis thaliana
  peptide (1)..(616): Ceres Seq. ID no. 3658935
  misc_feature (29)..(455): Pfam Name: Amidase Pfam Description: Amidase
  misc_feature (8)..(614): Homolog of NCBI NO: 7453538 NR Description: Toc64 [Pisum sativum]
  misc_feature (10)..(614): Homolog of NCBI NO: 30684733 NR Description: chloroplast outer membrane translocon subunit, [Arabidopsis thaliana] >gi|9294499|dbj|BAB02718.1|
  misc_feature (7)..(575): Homolog of NCBI NO: 13937285 NR Description: chloroplast protein-translocon-like protein
  misc_feature (46)..(455): Homolog of NCBI NO: 18390964 NR Description: expressed protein; protein id: At1g08980.1, by cDNA: gi_11493701, supported by cDNA: gi_14335037 [Arabidopsis >gi|11493702|gb|AAG35612.1|AF202077_1 amidase [Arabidopsis
  misc_feature (46)..(469): Homolog of NCBI NO: 32451277 NR Description: OSJNBa0020P07.1 [Oryza sativa (japonica
  misc_feature (45)..(381): Homolog of NCBI NO: 38344119 NR Description: OSJNBb0050O03.16 [Oryza sativa (japonica
  misc_feature (318)..(614): Homolog of NCBI NO: 13937285 NR Description: chloroplast protein-translocon-like protein
  misc_feature (46)..(296): Homolog of NCBI NO: 25402505 NR Description: hypothetical protein [imported] - Arabidopsis >gi|2342685|gb|AAB70409.1| Contains similarity to Rhodococcus (gb|D16207). ESTs gb|T20504,gb|H36650,gb|N97423,gb|H36595 come
  misc_feature (71)..(307): Homolog of NCBI NO: 23015866 NR Description: hypothetical protein [Magnetospirillum
  misc_feature (314)..(455): Homolog of NCBI NO: 23015866 NR Description: hypothetical protein [Magnetospirillum
MSNTLSLIQSNASNPKVWVVIGVTVAGIVILAETRKRRIRALREEDFGAFLDRFELLPFPPPPPPAAKQSLSGLTFSISDAFDVKDYITGFGCPQWKKTHEAAEKTAVVVTTLLKNGATCVGKTIMDELGFGIIGENKHYGTPINPLMPDNVPGGCSSGSAVSVGAELVDFSLGIDTTGGVRVPAAFCGILGFRPSQGTVSSVGVLPNSQSLETVGWFASDPSVLCQVGHALLNLSAVTHRRQRSLIFADDLFELSDIPKQKSVQVVRKAIENLSGYKTPKHVNVGQYVASNVPSLAEFCEQSGKSQNSASTLRALSSVMLAIQRHEFKTNHEEWWQTCKSFLGPRFSNDVVTALKSKNESIKSLYRVKNEMRATIQSLLKEDGILVIPTVADPPPRLNTKRNKSLNEFLDRTYALSCIASMSGCCQVTIPLGEHGDRPISVSLLTYYGGDKFLLDTTLDVYASLQDQAKLASNLAPVSDTNGNMEASEVMKEKGNAAYKGKQWNKAVNFYTEAIKLNGANATYYCNRAAAFLELCCFQQAEQDCTKAMLIDKKNVKAYLRRGTARESLVRYKEAAAGYWSVTLWLIISADFRHALVLEPQNKTAKVAEKRLRKHI

SEQ ID NO: 71478 - protein, 491 aa, Arabidopsis thaliana
  peptide (1)..(491): Ceres Seq. ID no. 3658936
  misc_feature (1)..(330): Pfam Name: Amidase Pfam Description: Amidase
  misc_feature (1)..(489): Homolog of NCBI NO: 7453538 NR Description: Toc64 [Pisum sativum]
  misc_feature (1)..(489): Homolog of NCBI NO: 30684733 NR Description: chloroplast outer membrane translocon subunit, [Arabidopsis thaliana] >gi|9294499|dbj|BAB02718.1|
  misc_feature (1)..(450): Homolog of NCBI NO: 13937285 NR Description: chloroplast protein-translocon-like protein
  misc_feature (1)..(330): Homolog of NCBI NO: 18390964 NR Description: expressed protein; protein id: At1g08980.1, by cDNA: gi_11493701, supported by cDNA: gi_14335037 [Arabidopsis >gi|11493702|gb|AAG35612.1|AF202077_1 amidase [Arabidopsis
  misc_feature (1)..(344): Homolog of NCBI NO: 32451277 NR Description: OSJNBa0020P07.1 [Oryza sativa (japonica
  misc_feature (1)..(256): Homolog of NCBI NO: 38344119 NR Description: OSJNBb0050O03.16 [Oryza sativa (japonica
  misc_feature (193)..(489): Homolog of NCBI NO: 13937285 NR Description: chloroplast protein-translocon-like protein
  misc_feature (1)..(171): Homolog of NCBI NO: 25402505 NR Description: hypothetical protein [imported] - Arabidopsis >gi|2342685|gb|AAB70409.1| Contains similarity to Rhodococcus (gb|D16207). ESTs gb|T20504,gb|H36650,gb|N97423,gb|H36595 come
  misc_feature (1)..(182): Homolog of NCBI NO: 23015866 NR Description: hypothetical protein [Magnetospirillum
  misc_feature (189)..(330): Homolog of NCBI NO: 23015866 NR Description: hypothetical protein [Magnetospirillum
MDELGFGIIGENKHYGTPINPLMPDNVPGGCSSGSAVSVGAELVDFSLGIDTTGGVRVPAAFCGILGFRPSQGTVSSVGVLPNSQSLETVGWFASDPSVLCQVGHALLNLSAVTHRRQRSLIFADDLFELSDIPKQKSVQVVRKAIENLSGYKTPKHVNVGQYVASNVPSLAEFCEQSGKSQNSASTLRALSSVMLAIQRHEFKTNHEEWWQTCKSFLGPRFSNDVVTALKSKNESIKSLYRVKNEMRATIQSLLKEDGILVIPTVADPPPRLNTKRNKSLNEFLDRTYALSCIASMSGCCQVTIPLGEHGDRPISVSLLTYYGGDKFLLDTTLDVYASLQDQAKLASNLAPVSDTNGNMEASEVMKEKGNAAYKGKQWNKAVNFYTEAIKLNGANATYYCNRAAAFLELCCFQQAEQDCTKAMLIDKKNVKAYLRRGTARESLVRYKEAAAGYWSVTLWLIISADFRHALVLEPQNKTAKVAEKRLRKHI

SEQ ID NO: 71479 - protein, 469 aa, Arabidopsis thaliana
  peptide (1)..(469): Ceres Seq. ID no. 3658937
  misc_feature (1)..(308): Pfam Name: Amidase Pfam Description: Amidase
  misc_feature (1)..(467): Homolog of NCBI NO: 7453538 NR Description: Toc64 [Pisum sativum]
  misc_feature (1)..(467): Homolog of NCBI NO: 30684733 NR Description: chloroplast outer membrane translocon subunit, [Arabidopsis thaliana] >gi|9294499|dbj|BAB02718.1|
  misc_feature (1)..(428): Homolog of NCBI NO: 13937285 NR Description: chloroplast protein-translocon-like protein
  misc_feature (1)..(308): Homolog of NCBI NO: 18390964 NR Description: expressed protein; protein id: At1g08980.1, by cDNA: gi_11493701, supported by cDNA: gi_14335037 [Arabidopsis >gi|11493702|gb|AAG35612.1|AF202077_1 amidase [Arabidopsis
  misc_feature (1)..(322): Homolog of NCBI NO: 32451277 NR Description: OSJNBa0020P07.1 [Oryza sativa (japonica
  misc_feature (1)..(234): Homolog of NCBI NO: 38344119 NR Description: OSJNBb0050O03.16 [Oryza sativa (japonica
  misc_feature (171)..(467): Homolog of NCBI NO: 13937285 NR Description: chloroplast protein-translocon-like protein
  misc_feature (1)..(149): Homolog of NCBI NO: 25402505 NR Description: hypothetical protein [imported] - Arabidopsis >gi|2342685|gb|AAB70409.1| Contains similarity to Rhodococcus (gb|D16207). ESTs gb|T20504,gb|H36650,gb|N97423,gb|H36595 come
  misc_feature (1)..(160): Homolog of NCBI NO: 23015866 NR Description: hypothetical protein [Magnetospirillum
  misc_feature (167)..(308): Homolog of NCBI NO: 23015866 NR Description: hypothetical protein [Magnetospirillum
MPDNVPGGCSSGSAVSVGAELVDFSLGIDTTGGVRVPAAFCGILGFRPSQGTVSSVGVLPNSQSLETVGWFASDPSVLCQVGHALLNLSAVTHRRQRSLIFADDLFELSDIPKQKSVQVVRKAIENLSGYKTPKHVNVGQYVASNVPSLAEFCEQSGKSQNSASTLRALSSVMLAIQRHEFKTNHEEWWQTCKSFLGPRFSNDVVTALKSKNESIKSLYRVKNEMRATIQSLLKEDGILVIPTVADPPPRLNTKRNKSLNEFLDRTYALSCIASMSGCCQVTIPLGEHGDRPISVSLLTYYGGDKFLLDTTLDVYASLQDQAKLASNLAPVSDTNGNMEASEVMKEKGNAAYKGKQWNKAVNFYTEAIKLNGANATYYCNRAAAFLELCCFQQAEQDCTKAMLIDKKNVKAYLRRGTARESLVRYKEAAAGYWSVTLWLIISADFRHALVLEPQNKTAKVAEKRLRKHI

SEQ ID NO: 71480 - DNA, 912 bp, Arabidopsis thaliana
  misc_feature (1)..(912): Ceres Seq. ID no. 3658938
  misc_feature: MA Experiment ID: 20000179 Result: Up-regulated in Transcription
  misc_feature: MA Experiment 20000179 PARAMETER Experiment Name: At_Germinating_Seeds_P Parameter: Age (hr) Value: 6 vs. 0
  misc_feature: MA Experiment 20000179 PARAMETER Experiment Name: At_Germinating_Seeds_P Parameter: Tissue Value: Germinating Seeds
  misc_feature: MA Experiment ID: 20000185 Result: Up-regulated in Transcription
  misc_feature: MA Experiment 20000185 PARAMETER Experiment Name: At_Roots__P Parameter: Age (day) Value: 7 vs. 21
  misc_feature: MA Experiment 20000185 PARAMETER Experiment Name: At_Roots__P Parameter: Organism Value: A. thaliana
  misc_feature: MA Experiment 20000185 PARAMETER Experiment Name: At_Roots__P Parameter: Tissue Value: Roots vs. Whole Plant
  misc_feature: MA Experiment ID: 20000264 Result: Up-regulated in Transcription
  misc_feature: MA Experiment 20000264 PARAMETER Experiment Name: At_Open_Flower_P Parameter: Age (day) Value: 21
  misc_feature: MA Experiment 20000264 PARAMETER Experiment Name: At_Open_Flower_P Parameter: Plant Line Value: WS
  misc_feature: MA Experiment 20000264 PARAMETER Experiment Name: At_Open_Flower_P Parameter: Tissue Value: Open Flower vs. Whole Plant
  misc_feature: MA Experiment ID: 20000265 Result: Up-regulated in Transcription
  misc_feature: MA Experiment 20000265 PARAMETER Experiment Name: At_Open_Flower_P Parameter: Age (day) Value: 21
  misc_feature: MA Experiment 20000265 PARAMETER Experiment Name: At_Open_Flower_P Parameter: Plant Line Value: WS
  misc_feature: MA Experiment 20000265 PARAMETER Experiment Name: At_Open_Flower_P Parameter: Tissue Value: Closed Flower vs. Whole Plant
  misc_feature: MA Experiment ID: 20000286 Result: Up-regulated in Transcription
  misc_feature: MA Experiment 20000286 PARAMETER Experiment Name: At_Open_Flower_P Parameter: Age (day) Value: 21
  misc_feature: MA Experiment 20000286 PARAMETER Experiment Name: At_Open_Flower_P Parameter: Plant Line Value: WS
  misc_feature: MA Experiment 20000286 PARAMETER Experiment Name: At_Open_Flower_P Parameter: Tissue Value: Half Open vs. Whole Plant
  misc_feature: MA Experiment ID: 20000437 Result: Up-regulated in Transcription
  misc_feature: MA Experiment 20000437 PARAMETER Experiment Name: At_Drought_P Parameter: Age (day) Value: 8
  misc_feature: MA Experiment 20000437 PARAMETER Experiment Name: At_Drought_P Parameter: Organism Value: A. thaliana
  misc_feature: MA Experiment 20000437 PARAMETER Experiment Name: At_Drought_P Parameter: Plant Line Value: WS
  misc_feature: MA Experiment 20000437 PARAMETER Experiment Name: At_Drought_P Parameter: Timepoint (hr) Value: 24
  misc_feature: MA Experiment 20000437 PARAMETER Experiment Name: At_Drought_P Parameter: Tissue Value: Whole Plant
  misc_feature: MA Experiment 20000437 PARAMETER Experiment Name: At_Drought_P Parameter: Treatment Value: Drought vs. No Drought
  misc_feature: MA Experiment ID: 20000794 Result: Up-regulated in Transcription
  misc_feature: MA Experiment 20000794 PARAMETER Experiment Name: At_Petals_P Parameter: Age (day) Value: 23-25 days
  misc_feature: MA Experiment 20000794 PARAMETER Experiment Name: At_Petals_P Parameter: Plant Line Value: WS
  misc_feature: MA Experiment 20000794 PARAMETER Experiment Name: At_Petals_P Parameter: Tissue Value: Petals vs. Whole plant
  misc_feature: MA Experiment ID: 20001910 Result: Up-regulated in Transcription
  misc_feature: MA Experiment 20001910 PARAMETER Experiment Name: At_Drought_Reproduction_P Parameter: Age (day) Value: 37
  misc_feature: MA Experiment 20001910 PARAMETER Experiment Name: At_Drought_Reproduction_P Parameter: Organism Value: A. thaliana
  misc_feature: MA Experiment 20001910 PARAMETER Experiment Name: At_Drought_Reproduction_P Parameter: Plant Line Value: WS
  misc_feature: MA Experiment 20001910 PARAMETER Experiment Name: At_Drought_Reproduction_P Parameter: Timepoint (day) Value: 7
  misc_feature: MA Experiment 20001910 PARAMETER Experiment Name: At_Drought_Reproduction_P Parameter: Tissue Value: Flowers
  misc_feature: MA Experiment 20001910 PARAMETER Experiment Name: At_Drought_Reproduction_P Parameter: Treatment Value: Drought vs. No Drought
atgtttgatcatatgaaactgctgcgatgcttcagcttcacggcgtcgcgagattggttattccggcaatcattcgcaaacgccggtctacgttccgtaacgacagatctctcccacggcaattcaatcgcatcaacagctatgcattgttggattcctaaatccccgaatcgatctaaacctaatctcctcctcctccacggattcggcgccaacgcaatgtggcaatacggagaacatctccgagctttcaccggccgattcaacgtctacgttcccgatctcctcttcttcgggttatcatccacatcggaaccaaaccgaaccgaatctttccaggctcggtgtctgatgaggttaatggaagcgcacggagtccagaggatgaacatcgtcgggattagttacggtggattcgttgggtatagtttagcggcgcagtttccggagaacgttgagaagcttgtgctgtgctgcgcaggggtttgtttggaggagaaagatatggaggacggattgtttaaggtgccgaatctagaagaagctaccggaattttgattcctcagacgccggaaaagcttaaggaactcataagattctctttcgttaaaccaatcaaaggtgttccttcgttttttctctgggattttatcgatgagaagagagatttgatcaaatcaatactcaaagataggagactttctgatcttcctaggatcaaacagaaatcgttgatcatatggggagaagaagatcaaatatttccactggaactaggttacagattaaaaagacatataggagagagtgcagagatagtggtgatcaagaaagcaggacatgctgtgaatttggagaagtccaaggaatttgtcaagcatttgaaatcttttctcattgactctttgtga

SEQ ID NO: 71481 - protein, 303 aa, Arabidopsis thaliana
  peptide (1)..(303): Ceres Seq. ID no. 3658939
  misc_feature (88)..(297): Pfam Name: alpha/beta hydrolase fold Pfam Description: alpha/beta hydrolase fold
  misc_feature (1)..(303): Homolog of NCBI NO: 15242419 NR Description: putative hydrolase; protein id: At5g09430.1 thaliana] >gi|9955530|emb|CAC05469.1| putative hydrolase
  misc_feature (10)..(299): Homolog of NCBI NO: 18420566 NR Description: Expressed protein; protein id: At4g39955.1,
  misc_feature (10)..(299): Homolog of NCBI NO: 21536873 NR Description: putative hydrolase [Arabidopsis thaliana]
  misc_feature (10)..(302): Homolog of NCBI NO: 18411865 NR Description: hypothetical protein; protein id: At1g78210.1, by cDNA: gi_19699018 [Arabidopsis thaliana] unknown protein [Arabidopsis thaliana]
  misc_feature (12)..(298): Homolog of NCBI NO: 33146617 NR Description: hydrolase-like protein [Oryza sativa (japonica
  misc_feature (14)..(301): Homolog of NCBI NO: 37533664 NR Description: putative hydrolase [Oryza sativa (japonica >gi|19920100|gb|AAM08532.1| Putative hydrolase [Oryza sativa]
  misc_feature (1)..(246): Homolog of NCBI NO: 27436747 NR Description: Hypothetical protein [Oryza sativa (japonica
  misc_feature (220)..(302): Homolog of NCBI NO: 27436747 NR Description: Hypothetical protein [Oryza sativa (japonica
  misc_feature (10)..(219): Homolog of NCBI NO: 25406548 NR Description: hypothetical protein T11I11.15 [imported] -
  misc_feature (20)..(300): Homolog of NCBI NO: 22326938 NR Description: similar to putative hydrolase; protein id: [Arabidopsis thaliana] >gi|29294062|gb|AAO73899.1| hydrolase,
MFDHMKLLRCFSFTASRDWLFRQSFANAGLRSVTTDLSHGNSIASTAMHCWIPKSPNRSKPNLLLLHGFGANAMWQYGEHLRAFTGRFNVYVPDLLFFGLSSTSEPNRTESFQARCLMRLMEAHGVQRMNIVGISYGGFVGYSLAAQFPENVEKLVLCCAGVCLEEKDMEDGLFKVPNLEEATGILIPQTPEKLKELIRFSFVKPIKGVPSFFLWDFIDEKRDLIKSILKDRRLSDLPRIKQKSLIIWGEEDQIFPLELGYRLKRHIGESAEIVVIKKAGHAVNLEKSKEFVKHLKSFLIDSL

SEQ ID NO: 71482 - protein, 299 aa, Arabidopsis thaliana
  peptide (1)..(299): Ceres Seq. ID no. 3658940
  misc_feature (84)..(293): Pfam Name: alpha/beta hydrolase fold Pfam Description: alpha/beta hydrolase fold
  misc_feature (1)..(299): Homolog of NCBI NO: 15242419 NR Description: putative hydrolase; protein id: At5g09430.1 thaliana] >gi|9955530|emb|CAC05469.1| putative hydrolase
  misc_feature (6)..(295): Homolog of NCBI NO: 18420566 NR Description: Expressed protein; protein id: At4g39955.1,
  misc_feature (6)..(295): Homolog of NCBI NO: 21536873 NR Description: putative hydrolase [Arabidopsis thaliana]
  misc_feature (6)..(298): Homolog of NCBI NO: 18411865 NR Description: hypothetical protein; protein id: At1g78210.1, by cDNA: gi_19699018 [Arabidopsis thaliana] unknown protein [Arabidopsis thaliana]
  misc_feature (8)..(294): Homolog of NCBI NO: 33146617 NR Description: hydrolase-like protein [Oryza sativa (japonica
  misc_feature (10)..(297): Homolog of NCBI NO: 37533664 NR Description: putative hydrolase [Oryza sativa (japonica >gi|19920100|gb|AAM08532.1| Putative hydrolase [Oryza sativa]
  misc_feature (1)..(242): Homolog of NCBI NO: 27436747 NR Description: Hypothetical protein [Oryza sativa (japonica
  misc_feature (216)..(298): Homolog of NCBI NO: 27436747 NR Description: Hypothetical protein [Oryza sativa (japonica
  misc_feature (6)..(215): Homolog of NCBI NO: 25406548 NR Description: hypothetical protein T11I11.15 [imported] -
  misc_feature (16)..(296): Homolog of NCBI NO: 22326938 NR Description: similar to putative hydrolase; protein id: [Arabidopsis thaliana] >gi|29294062|gb|AAO73899.1| hydrolase,
MKLLRCFSFTASRDWLFRQSFANAGLRSVTTDLSHGNSIASTAMHCWIPKSPNRSKPNLLLLHGFGANAMWQYGEHLRAFTGRFNVYVPDLLFFGLSSTSEPNRTESFQARCLMRLMEAHGVQRMNIVGISYGGFVGYSLAAQFPENVEKLVLCCAGVCLEEKDMEDGLFKVPNLEEATGILIPQTPEKLKELIRFSFVKPIKGVPSFFLWDFIDEKRDLIKSILKDRRLSDLPRIKQKSLIIWGEEDQIFPLELGYRLKRHIGESAEIVVIKKAGHAVNLEKSKEFVKHLKSFLIDSL

SEQ ID NO: 71483 - protein, 256 aa, Arabidopsis thaliana
  peptide (1)..(256): Ceres Seq. ID no. 3658941
  misc_feature (41)..(250): Pfam Name: alpha/beta hydrolase fold Pfam Description: alpha/beta hydrolase fold
  misc_feature (1)..(256): Homolog of NCBI NO: 15242419 NR Description: putative hydrolase; protein id: At5g09430.1 thaliana] >gi|9955530|emb|CAC05469.1| putative hydrolase
  misc_feature (1)..(252): Homolog of NCBI NO: 18420566 NR Description: Expressed protein; protein id: At4g39955.1,
  misc_feature (1)..(252): Homolog of NCBI NO: 21536873 NR Description: putative hydrolase [Arabidopsis thaliana]
  misc_feature (1)..(255): Homolog of NCBI NO: 18411865 NR Description: hypothetical protein; protein id: At1g78210.1, by cDNA: gi_19699018 [Arabidopsis thaliana] unknown protein [Arabidopsis thaliana]
  misc_feature (1)..(251): Homolog of NCBI NO: 33146617 NR Description: hydrolase-like protein [Oryza sativa (japonica
  misc_feature (1)..(254): Homolog of NCBI NO: 37533664 NR Description: putative hydrolase [Oryza sativa (japonica >gi|19920100|gb|AAM08532.1| Putative hydrolase [Oryza sativa]
  misc_feature (1)..(199): Homolog of NCBI NO: 27436747 NR Description: Hypothetical protein [Oryza sativa (japonica
  misc_feature (173)..(255): Homolog of NCBI NO: 27436747 NR Description: Hypothetical protein [Oryza sativa (japonica
  misc_feature (1)..(172): Homolog of NCBI NO: 25406548 NR Description: hypothetical protein T11I11.15 [imported] -
  misc_feature (1)..(253): Homolog of NCBI NO: 22326938 NR Description: similar to putative hydrolase; protein id: [Arabidopsis thaliana] >gi|29294062|gb|AAO73899.1| hydrolase,
MHCWIPKSPNRSKPNLLLLHGFGANAMWQYGEHLRAFTGRFNVYVPDLLFFGLSSTSEPNRTESFQARCLMRLMEAHGVQRMNIVGISYGGFVGYSLAAQFPENVEKLVLCCAGVCLEEKDMEDGLFKVPNLEEATGILIPQTPEKLKELIRFSFVKPIKGVPSFFLWDFIDEKRDLIKSILKDRRLSDLPRIKQKSLIIWGEEDQIFPLELGYRLKRHIGESAEIVVIKKAGHAVNLEKSKEFVKHLKSFLIDSL

SEQ ID NO: 71484 - DNA, 855 bp, Arabidopsis thaliana
  misc_feature (1)..(855): Ceres Seq. ID no. 3659026
  misc_feature: MA Experiment ID: 20001248 Result: Up-regulated in Transcription
  misc_feature: MA Experiment 20001248 PARAMETER Experiment Name: At_Far-red-induction_P Parameter: Age (day) Value: 7
  misc_feature: MA Experiment 20001248 PARAMETER Experiment Name: At_Far-red-induction_P Parameter: Light Value: Far-red vs. White
  misc_feature: MA Experiment 20001248 PARAMETER Experiment Name: At_Far-red-induction_P Parameter: Organism Value: A. thaliana
  misc_feature: MA Experiment 20001248 PARAMETER Experiment Name: At_Far-red-induction_P Parameter: Plant Line Value: Columbia
  misc_feature: MA Experiment 20001248 PARAMETER Experiment Name: At_Far-red-induction_P Parameter: Timepoint (hr) Value: 4
  misc_feature: MA Experiment 20001248 PARAMETER Experiment Name: At_Far-red-induction_P Parameter: Tissue Value: Whole Plant
atgggtttcgtgtattacgtcacactgtttgttttcatcgatgattgggttggtttacaaagctcagctgggaaattaaacgccttactcttcagcttattggcgtctctctgtctcttctcgctctcaatttgcgttcttgtagatccaggtcgtgttcctgcatcttatgctcctgatgttgaggactctggctggtccaatagtaacgtgaaagtcgatggcttttttctttggtgttacaaaaggaggtttgatgttggtgttaagcttaggaagaatggctttatcgttgatgctgttacagaaacaaggaaatgtgataagtgctttgcatataagcctcttcggactcaccattgccgggtttgcagaagatgcgtcttgaagatggaccatcattgcctctggataaataactgtgttggttatgcaaactataaggctttcttcattcttgtgttttatgcaaccgtggcttccatctactctacagtgttgctggtttgctgtgcattcaagaacggagattcctatgcgggaaatgttccgctcaaaactttcattgtttcttgtgggatcttcatgatcggactaagcataacacttgggactctcctttgttggcatatctacctcatcacacacaatatgaccaccattgagcattatgattcaaagcgggcctcatggttagctagaaaatcaggacaaagctataggcatcaattcgatgttggcttttacaaaaacctcacctcggtgttaggccctaacatgatcaaatggctatgccccacatttactaggaatcctgaagacggtattagcttttctgcatcgagagacagctag

SEQ ID NO: 71485 - protein, 284 aa, Arabidopsis thaliana
  peptide (1)..(284): Ceres Seq. ID no. 3659027
  misc_feature (97)..(160): Pfam Name: DHHC zinc finger domain Pfam Description: DHHC zinc finger domain
  misc_feature (1)..(284): Homolog of NCBI NO: 15237665 NR Description: rec - like protein; protein id: At5g04270.1
  misc_feature (128)..(283): Homolog of NCBI NO: 34908228 NR Description: P0406G08.29 [Oryza sativa (japonica
  misc_feature (1)..(79): Homolog of NCBI NO: 34908228 NR Description: P0406G08.29 [Oryza sativa (japonica
  misc_feature (103)..(284): Homolog of NCBI NO: 18398471 NR Description: expressed protein; protein id: At3g09320.1, by cDNA: gi_14517365, supported by cDNA: gi_16323273 [Arabidopsis >gi|14517366|gb|AAK62574.1| AT3g09320/F3L24_19 [Arabidopsis
  misc_feature (103)..(284): Homolog of NCBI NO: 6478924 NR Description: unknown protein [Arabidopsis thaliana]
  misc_feature (103)..(278): Homolog of NCBI NO: 23613303 NR Description: cell cycle regulator with zn-finger domain, [Plasmodium falciparum 3D7] >gi|23504864|emb|CAD51645.1| cell
  misc_feature (18)..(283): Homolog of NCBI NO: 22331887 NR Description: putative protein; protein id: At3g60800.1, by cDNA: gi_20466004 [Arabidopsis thaliana] unknown protein [Arabidopsis thaliana]
  misc_feature (103)..(278): Homolog of NCBI NO: 19112493 NR Description: hypothetical protein [Schizosaccharomyces pombe]
  misc_feature (189)..(257): Homolog of NCBI NO: 31210737 NR Description: ENSANGP00000013082 [Anopheles gambiae]
  misc_feature (107)..(163): Homolog of NCBI NO: 31210737 NR Description: ENSANGP00000013082 [Anopheles gambiae]
MGFVYYVTLFVFIDDWVGLQSSAGKLNALLFSLLASLCLFSLSICVLVDPGRVPASYAPDVEDSGWSNSNVKVDGFFLWCYKRRFDVGVKLRKNGFIVDAVTETRKCDKCFAYKPLRTHHCRVCRRCVLKMDHHCLWINNCVGYANYKAFFILVFYATVASIYSTVLLVCCAFKNGDSYAGNVPLKTFIVSCGIFMIGLSITLGTLLCWHIYLITHNMTTIEHYDSKRASWLARKSGQSYRHQFDVGFYKNLTSVLGPNMIKWLCPTFTRNPEDGISFSASRDS

SEQ ID NO: 71486 - protein, 154 aa, Arabidopsis thaliana
  peptide (1)..(154): Ceres Seq. ID no. 3659028
  misc_feature (1)..(148): Homolog of NCBI NO: 19112493 NR Description: hypothetical protein [Schizosaccharomyces pombe]
  misc_feature (59)..(127): Homolog of NCBI NO: 31210737 NR Description: ENSANGP00000013082 [Anopheles gambiae]
  misc_feature (1)..(33): Homolog of NCBI NO: 31210737 NR Description: ENSANGP00000013082 [Anopheles gambiae]
  misc_feature (1)..(148): Homolog of NCBI NO: 26328697 NR Description: unnamed protein product [Mus musculus]
  misc_feature (1)..(154): Homolog of NCBI NO: 15237665 NR Description: rec - like protein; protein id: At5g04270.1
  misc_feature (1)..(153): Homolog of NCBI NO: 34908228 NR Description: P0406G08.29 [Oryza sativa (japonica
  misc_feature (1)..(154): Homolog of NCBI NO: 18398471 NR Description: expressed protein; protein id: At3g09320.1, by cDNA: gi_14517365, supported by cDNA: gi_16323273 [Arabidopsis >gi|14517366|gb|AAK62574.1| AT3g09320/F3L24_19 [Arabidopsis
  misc_feature (1)..(154): Homolog of NCBI NO: 6478924 NR Description: unknown protein [Arabidopsis thaliana]
  misc_feature (1)..(148): Homolog of NCBI NO: 23613303 NR Description: cell cycle regulator with zn-finger domain, [Plasmodium falciparum 3D7] >gi|23504864|emb|CAD51645.1| cell
  misc_feature (1)..(153): Homolog of NCBI NO: 22331887 NR Description: putative protein; protein id: At3g60800.1, by cDNA: gi_20466004 [Arabidopsis thaliana] unknown protein [Arabidopsis thaliana]
MDHHCLWINNCVGYANYKAFFILVFYATVASIYSTVLLVCCAFKNGDSYAGNVPLKTFIVSCGIFMIGLSITLGTLLCWHIYLITHNMTTIEHYDSKRASWLARKSGQSYRHQFDVGFYKNLTSVLGPNMIKWLCPTFTRNPEDGISFSASRDS

SEQ ID NO: 71487 - DNA, 1812 bp, Arabidopsis thaliana
  misc_feature (1)..(1812): Ceres Seq. ID no. 3659142
  misc_feature: MA Experiment ID: 20000180 Result: Down-regulated in Transcription
  misc_feature: MA Experiment 20000180 PARAMETER Experiment Name: At_Germinating_Seeds_P Parameter: Age (hr) Value: 24 vs. 0
  misc_feature: MA Experiment 20000180 PARAMETER Experiment Name: At_Germinating_Seeds_P Parameter: Tissue Value: Germinating Seeds
  misc_feature: MA Experiment ID: 20000182 Result: Up-regulated in Transcription
  misc_feature: MA Experiment 20000182 PARAMETER Experiment Name: At_2mM_SA_P Parameter: Age (day) Value: 14
  misc_feature: MA Experiment 20000182 PARAMETER Experiment Name: At_2mM_SA_P Parameter: Organism Value: A. thaliana
  misc_feature: MA Experiment 20000182 PARAMETER Experiment Name: At_2mM_SA_P Parameter: Plant Line Value: WS
  misc_feature: MA Experiment 20000182 PARAMETER Experiment Name: At_2mM_SA_P Parameter: Timepoint (hr) Value: 6
  misc_feature: MA Experiment 20000182 PARAMETER Experiment Name: At_2mM_SA_P Parameter: Tissue Value: Aerial
  misc_feature: MA Experiment 20000182 PARAMETER Experiment Name: At_2mM_SA_P Parameter: Treatment Value: 2mM SA vs. No Treatment
  misc_feature: MA Experiment ID: 20000184 Result: Down-regulated in Transcription
  misc_feature: MA Experiment 20000184 PARAMETER Experiment Name: At_Shoots__P Parameter: Age (day) Value: 7
  misc_feature: MA Experiment 20000184 PARAMETER Experiment Name: At_Shoots__P Parameter: Tissue Value: Shoots vs. Whole Plant
  misc_feature: MA Experiment ID: 20001558 Result: Up-regulated in Transcription
  misc_feature: MA Experiment 20001558 PARAMETER Experiment Name: At_Drought_Soil_Dry_P Parameter: Age (day) Value: 27
  misc_feature: MA Experiment 20001558 PARAMETER Experiment Name: At_Drought_Soil_Dry_P Parameter: Organism Value: A. thaliana
  misc_feature: MA Experiment 20001558 PARAMETER Experiment Name: At_Drought_Soil_Dry_P Parameter: Plant Line Value: WS
  misc_feature: MA Experiment 20001558 PARAMETER Experiment Name: At_Drought_Soil_Dry_P Parameter: Post Timepoint (hr) Value: 6
  misc_feature: MA Experiment 20001558 PARAMETER Experiment Name: At_Drought_Soil_Dry_P Parameter: Post-Treatment Value: Re-Water vs. No Drought
  misc_feature: MA Experiment 20001558 PARAMETER Experiment Name: At_Drought_Soil_Dry_P Parameter: Timepoint (day) Value: 13
  misc_feature: MA Experiment 20001558 PARAMETER Experiment Name: At_Drought_Soil_Dry_P Parameter: Treatment Value: Drought vs. No Drought
atgtcgaatacgctttctttgattcaaagcaatgcctcgaatcccaaagtttgggtagtgatcggcgtgacggtggccgggatcgtgattctggcggagacccggaagcggcggattagagcccttagagaagaagactttggtgctttcttagatcgtttcgagcttcttcctttccctccgcctcctcctcctgctgctaaacaatctctctctggtcttaccttctccatctccgacgcgttcgatgttaaggattatatcacaggatttggttgtccacaatggaagaagactcatgaggctgctgagaaaactgctgtggttgtcacgacgctcttgaaaaatggagctacttgtgttggcaagactataatggatgagctgggttttgggattattggagaaaacaagcactatggaactcctattaatccattgatgccagataatgttcctggaggatgttccagtggctcagcagtttctgttggggctgaactcgttgacttttcacttgggattgataccactggtggtgttagagtcccagcagccttttgtggtattcttggttttcgaccatctcaggggactgtttcttcagttggagttttgcccaattctcagagcctagagactgttggatggtttgcctctgatccatccgttttgtgtcaagttggacatgccttactaaatctgagtgcagtaacacatagaaggcaaagatctttaatctttgctgatgatttattcgagctctctgacattcctaagcaaaagtcggtgcaagttgtcagaaaggcaatcgagaatctatctggctacaagactccaaaacatgttaacgttggccaatatgtcgcttcaaatgtaccaagtcttgcggaattctgtgagcaatctgggaaatcccaaaattcagcatcaactttaagggctctttcatctgtgatgttggctatacaaaggcatgagttcaaaacaaatcatgaagaatggtggcaaacatgcaaatcgtttctagggccaagattttccaatgatgttgttacagctctgaagagcaaaaacgagagcattaaatccctctacagagtgaaaaatgagatgcgggccaccattcaaagccttttaaaggaagatggaattctggtaatccccacagttgctgatccccctccaaggcttaacacaaagagaaataaatctttgaatgagtttcttgatcgtacttatgcactctcctgcattgcaagcatgtctggatgttgtcaggttacaattcctttaggggaacatggtgatcgtccaatatccgtgtcgcttcttacttactatggaggtgataagttccttctcgatacaactctcgatgtatatgcatcccttcaagaccaagccaaacttgcatccaacttagctccagtgtctgacaccaatggtaacatggaggcttctgaagttatgaaagaaaagggcaatgctgcatacaaggggaaacaatggaataaggcggtaaacttttatacagaagctataaaattgaatggagcaaatgctacttattattgcaatagagctgcagctttcttggaactttgctgcttccaacaagccgaacaagattgtaccaaggccatgttgatcgataagaagaatgtgaaggcatatttgagacgagggactgctagagaatcacttgtacggtacaaggaagctgctgcagatttcaggcacgcattggtccttgaaccacagaacaagacggcaaaggttgctgagaagagactccgaaaacacatatga

SEQ ID NO: 71488 - protein, 603 aa, Arabidopsis thaliana
  peptide (1)..(603): Ceres Seq. ID no. 3659143
  misc_feature (29)..(455): Pfam Name: Amidase Pfam Description: Amidase
  misc_feature (8)..(601): Homolog of NCBI NO: 7453538 NR Description: Toc64 [Pisum sativum]
  misc_feature (10)..(601): Homolog of NCBI NO: 30684733 NR Description: chloroplast outer membrane translocon subunit, [Arabidopsis thaliana] >gi|9294499|dbj|BAB02718.1|
  misc_feature (7)..(601): Homolog of NCBI NO: 13937285 NR Description: chloroplast protein-translocon-like protein
  misc_feature (46)..(455): Homolog of NCBI NO: 18390964 NR Description: expressed protein; protein id: At1g08980.1, by cDNA: gi_11493701, supported by cDNA: gi_14335037 [Arabidopsis >gi|11493702|gb|AAG35612.1|AF202077_1 amidase [Arabidopsis
  misc_feature (46)..(469): Homolog of NCBI NO: 32451277 NR Description: OSJNBa0020P07.1 [Oryza sativa (japonica
  misc_feature (45)..(381): Homolog of NCBI NO: 38344119 NR Description: OSJNBb0050O03.16 [Oryza sativa (japonica
  misc_feature (46)..(296): Homolog of NCBI NO: 25402505 NR Description: hypothetical protein [imported] - Arabidopsis >gi|2342685|gb|AAB70409.1| Contains similarity to Rhodococcus (gb|D16207). ESTs gb|T20504,gb|H36650,gb|N97423,gb|H36595 come
  misc_feature (71)..(307): Homolog of NCBI NO: 23015866 NR Description: hypothetical protein [Magnetospirillum
  misc_feature (314)..(455): Homolog of NCBI NO: 23015866 NR Description: hypothetical protein [Magnetospirillum
  misc_feature (47)..(281): Homolog of NCBI NO: 13472622 NR Description: glutamyl-tRNA(Gln) amidotransferase, subunitA
MSNTLSLIQSNASNPKVWVVIGVTVAGIVILAETRKRRIRALREEDFGAFLDRFELLPFPPPPPPAAKQSLSGLTFSISDAFDVKDYITGFGCPQWKKTHEAAEKTAVVVTTLLKNGATCVGKTIMDELGFGIIGENKHYGTPINPLMPDNVPGGCSSGSAVSVGAELVDFSLGIDTTGGVRVPAAFCGILGFRPSQGTVSSVGVLPNSQSLETVGWFASDPSVLCQVGHALLNLSAVTHRRQRSLIFADDLFELSDIPKQKSVQVVRKAIENLSGYKTPKHVNVGQYVASNVPSLAEFCEQSGKSQNSASTLRALSSVMLAIQRHEFKTNHEEWWQTCKSFLGPRFSNDVVTALKSKNESIKSLYRVKNEMRATIQSLLKEDGILVIPTVADPPPRLNTKRNKSLNEFLDRTYALSCIASMSGCCQVTIPLGEHGDRPISVSLLTYYGGDKFLLDTTLDVYASLQDQAKLASNLAPVSDTNGNMEASEVMKEKGNAAYKGKQWNKAVNFYTEAIKLNGANATYYCNRAAAFLELCCFQQAEQDCTKAMLIDKKNVKAYLRRGTARESLVRYKEAAADFRHALVLEPQNKTAKVAEKRLRKHI

SEQ ID NO: 71489 - protein, 478 aa, Arabidopsis thaliana
  peptide (1)..(478): Ceres Seq. ID no. 3659144
  misc_feature (1)..(330): Pfam Name: Amidase Pfam Description: Amidase
  misc_feature (1)..(476): Homolog of NCBI NO: 7453538 NR Description: Toc64 [Pisum sativum]
  misc_feature (1)..(476): Homolog of NCBI NO: 30684733 NR Description: chloroplast outer membrane translocon subunit, [Arabidopsis thaliana] >gi|9294499|dbj|BAB02718.1|
  misc_feature (1)..(476): Homolog of NCBI NO: 13937285 NR Description: chloroplast protein-translocon-like protein
  misc_feature (1)..(330): Homolog of NCBI NO: 18390964 NR Description: expressed protein; protein id: At1g08980.1, by cDNA: gi_11493701, supported by cDNA: gi_14335037 [Arabidopsis >gi|11493702|gb|AAG35612.1|AF202077_1 amidase [Arabidopsis
  misc_feature (1)..(344): Homolog of NCBI NO: 32451277 NR Description: OSJNBa0020P07.1 [Oryza sativa (japonica
  misc_feature (1)..(256): Homolog of NCBI NO: 38344119 NR Description: OSJNBb0050O03.16 [Oryza sativa (japonica
  misc_feature (1)..(171): Homolog of NCBI NO: 25402505 NR Description: hypothetical protein [imported] - Arabidopsis >gi|2342685|gb|AAB70409.1| Contains similarity to Rhodococcus (gb|D16207). ESTs gb|T20504,gb|H36650,gb|N97423,gb|H36595 come
  misc_feature (1)..(182): Homolog of NCBI NO: 23015866 NR Description: hypothetical protein [Magnetospirillum
  misc_feature (189)..(330): Homolog of NCBI NO: 23015866 NR Description: hypothetical protein [Magnetospirillum
  misc_feature (1)..(156): Homolog of NCBI NO: 13472622 NR Description: glutamyl-tRNA(Gln) amidotransferase, subunitA
MDELGFGIIGENKHYGTPINPLMPDNVPGGCSSGSAVSVGAELVDFSLGIDTTGGVRVPAAFCGILGFRPSQGTVSSVGVLPNSQSLETVGWFASDPSVLCQVGHALLNLSAVTHRRQRSLIFADDLFELSDIPKQKSVQVVRKAIENLSGYKTPKHVNVGQYVASNVPSLAEFCEQSGKSQNSASTLRALSSVMLAIQRHEFKTNHEEWWQTCKSFLGPRFSNDVVTALKSKNESIKSLYRVKNEMRATIQSLLKEDGILVIPTVADPPPRLNTKRNKSLNEFLDRTYALSCIASMSGCCQVTIPLGEHGDRPISVSLLTYYGGDKFLLDTTLDVYASLQDQAKLASNLAPVSDTNGNMEASEVMKEKGNAAYKGKQWNKAVNFYTEAIKLNGANATYYCNRAAAFLELCCFQQAEQDCTKAMLIDKKNVKAYLRRGTARESLVRYKEAAADFRHALVLEPQNKTAKVAEKRLRKHI

SEQ ID NO: 71490 - protein, 456 aa, Arabidopsis thaliana
  peptide (1)..(456): Ceres Seq. ID no. 3659145
  misc_feature (1)..(308): Pfam Name: Amidase Pfam Description: Amidase
  misc_feature (1)..(454): Homolog of NCBI NO: 7453538 NR Description: Toc64 [Pisum sativum]
  misc_feature (1)..(454): Homolog of NCBI NO: 30684733 NR Description: chloroplast outer membrane translocon subunit, [Arabidopsis thaliana] >gi|9294499|dbj|BAB02718.1|
  misc_feature (1)..(454): Homolog of NCBI NO: 13937285 NR Description: chloroplast protein-translocon-like protein
  misc_feature (1)..(308): Homolog of NCBI NO: 18390964 NR Description: expressed protein; protein id: At1g08980.1, by cDNA: gi_11493701, supported by cDNA: gi_14335037 [Arabidopsis >gi|11493702|gb|AAG35612.1|AF202077_1 amidase [Arabidopsis
  misc_feature (1)..(322): Homolog of NCBI NO: 32451277 NR Description: OSJNBa0020P07.1 [Oryza sativa (japonica
  misc_feature (1)..(234): Homolog of NCBI NO: 38344119 NR Description: OSJNBb0050O03.16 [Oryza sativa (japonica
  misc_feature (1)..(149): Homolog of NCBI NO: 25402505 NR Description: hypothetical protein [imported] - Arabidopsis >gi|2342685|gb|AAB70409.1| Contains similarity to Rhodococcus (gb|D16207). ESTs gb|T20504,gb|H36650,gb|N97423,gb|H36595 come
  misc_feature (1)..(160): Homolog of NCBI NO: 23015866 NR Description: hypothetical protein [Magnetospirillum
  misc_feature (167)..(308): Homolog of NCBI NO: 23015866 NR Description: hypothetical protein [Magnetospirillum
  misc_feature (1)..(134): Homolog of NCBI NO: 13472622 NR Description: glutamyl-tRNA(Gln) amidotransferase, subunitA
MPDNVPGGCSSGSAVSVGAELVDFSLGIDTTGGVRVPAAFCGILGFRPSQGTVSSVGVLPNSQSLETVGWFASDPSVLCQVGHALLNLSAVTHRRQRSLIFADDLFELSDIPKQKSVQVVRKAIENLSGYKTPKHVNVGQYVASNVPSLAEFCEQSGKSQNSASTLRALSSVMLAIQRHEFKTNHEEWWQTCKSFLGPRFSNDVVTALKSKNESIKSLYRVKNEMRATIQSLLKEDGILVIPTVADPPPRLNTKRNKSLNEFLDRTYALSCIASMSGCCQVTIPLGEHGDRPISVSLLTYYGGDKFLLDTTLDVYASLQDQAKLASNLAPVSDTNGNMEASEVMKEKGNAAYKGKQWNKAVNFYTEAIKLNGANATYYCNRAAAFLELCCFQQAEQDCTKAMLIDKKNVKAYLRRGTARESLVRYKEAAADFRHALVLEPQNKTAKVAEKRLRKHI

SEQ ID NO: 71491 - DNA, 936 bp, Arabidopsis thaliana
  misc_feature (1)..(936): Ceres Seq. ID no. 3659146
  misc_feature: MA Experiment ID: 20000179 Result: Up-regulated in Transcription
  misc_feature: MA Experiment 20000179 PARAMETER Experiment Name: At_Germinating_Seeds_P Parameter: Age (hr) Value: 6 vs. 0
  misc_feature: MA Experiment 20000179 PARAMETER Experiment Name: At_Germinating_Seeds_P Parameter: Tissue Value: Germinating Seeds
  misc_feature: MA Experiment ID: 20000185 Result: Up-regulated in Transcription
  misc_feature: MA Experiment 20000185 PARAMETER Experiment Name: At_Roots__P Parameter: Age (day) Value: 7 vs. 21
  misc_feature: MA Experiment 20000185 PARAMETER Experiment Name: At_Roots__P Parameter: Organism Value: A. thaliana
  misc_feature: MA Experiment 20000185 PARAMETER Experiment Name: At_Roots__P Parameter: Tissue Value: Roots vs. Whole Plant
  misc_feature: MA Experiment ID: 20000264 Result: Up-regulated in Transcription
  misc_feature: MA Experiment 20000264 PARAMETER Experiment Name: At_Open_Flower_P Parameter: Age (day) Value: 21
  misc_feature: MA Experiment 20000264 PARAMETER Experiment Name: At_Open_Flower_P Parameter: Plant Line Value: WS
  misc_feature: MA Experiment 20000264 PARAMETER Experiment Name: At_Open_Flower_P Parameter: Tissue Value: Open Flower vs. Whole Plant
  misc_feature: MA Experiment ID: 20000265 Result: Up-regulated in Transcription
  misc_feature: MA Experiment 20000265 PARAMETER Experiment Name: At_Open_Flower_P Parameter: Age (day) Value: 21
  misc_feature: MA Experiment 20000265 PARAMETER Experiment Name: At_Open_Flower_P Parameter: Plant Line Value: WS
  misc_feature: MA Experiment 20000265 PARAMETER Experiment Name: At_Open_Flower_P Parameter: Tissue Value: Closed Flower vs. Whole Plant
  misc_feature: MA Experiment ID: 20000286 Result: Up-regulated in Transcription
  misc_feature: MA Experiment 20000286 PARAMETER Experiment Name: At_Open_Flower_P Parameter: Age (day) Value: 21
  misc_feature: MA Experiment 20000286 PARAMETER Experiment Name: At_Open_Flower_P Parameter: Plant Line Value: WS
  misc_feature: MA Experiment 20000286 PARAMETER Experiment Name: At_Open_Flower_P Parameter: Tissue Value: Half Open vs. Whole Plant
  misc_feature: MA Experiment ID: 20000437 Result: Up-regulated in Transcription
  misc_feature: MA Experiment 20000437 PARAMETER Experiment Name: At_Drought_P Parameter: Age (day) Value: 8
  misc_feature: MA Experiment 20000437 PARAMETER Experiment Name: At_Drought_P Parameter: Organism Value: A. thaliana
  misc_feature: MA Experiment 20000437 PARAMETER Experiment Name: At_Drought_P Parameter: Plant Line Value: WS
  misc_feature: MA Experiment 20000437 PARAMETER Experiment Name: At_Drought_P Parameter: Timepoint (hr) Value: 24
  misc_feature: MA Experiment 20000437 PARAMETER Experiment Name: At_Drought_P Parameter: Tissue Value: Whole Plant
  misc_feature: MA Experiment 20000437 PARAMETER Experiment Name: At_Drought_P Parameter: Treatment Value: Drought vs. No Drought
  misc_feature: MA Experiment ID: 20000794 Result: Up-regulated in Transcription
  misc_feature: MA Experiment 20000794 PARAMETER Experiment Name: At_Petals_P Parameter: Age (day) Value: 23-25 days
  misc_feature: MA Experiment 20000794 PARAMETER Experiment Name: At_Petals_P Parameter: Plant Line Value: WS
  misc_feature: MA Experiment 20000794 PARAMETER Experiment Name: At_Petals_P Parameter: Tissue Value: Petals vs. Whole plant
  misc_feature: MA Experiment ID: 20001910 Result: Up-regulated in Transcription
  misc_feature: MA Experiment 20001910 PARAMETER Experiment Name: At_Drought_Reproduction_P Parameter: Age (day) Value: 37
  misc_feature: MA Experiment 20001910 PARAMETER Experiment Name: At_Drought_Reproduction_P Parameter: Organism Value: A. thaliana
  misc_feature: MA Experiment 20001910 PARAMETER Experiment Name: At_Drought_Reproduction_P Parameter: Plant Line Value: WS
  misc_feature: MA Experiment 20001910 PARAMETER Experiment Name: At_Drought_Reproduction_P Parameter: Timepoint (day) Value: 7
  misc_feature: MA Experiment 20001910 PARAMETER Experiment Name: At_Drought_Reproduction_P Parameter: Tissue Value: Flowers
  misc_feature: MA Experiment 20001910 PARAMETER Experiment Name: At_Drought_Reproduction_P Parameter: Treatment Value: Drought vs. No Drought
atgtttgatcatatgaaactgctgcgatgcttcagcttcacggcgtcgcgagattggttattccggcaatcattcgcaaacgccggtctacgttccgtaacgacagatctctcccacggcaattcaatcgcatcaacagctatgcattgttggattcctaaatccccgaatcgatctaaacctaatctcctcctcctccacggattcggcgccaacgcaatgtggcaatacggagaacatctccgagctttcaccggccgattcaacgtctacgttcccgatctcctcttcttcgggttatcatccacatcggaaccaaaccgaaccgaatctttccaggctcggtgtctgatgaggttaatggaagcgcacggagtccagaggatgaacatcgtcgggattagttacggtggattcgttgggtatagtttagcggcgcagtttccggagaacgttgagaagcttgtgctgtgctgcgcaggggtttgtttggaggagaaagatatggaggacggattgtttaaggtgccgaatctagaagaagctaccggaattttgattcctcagacgccggaaaagcttaaggaactcataagattctctttcgttaaaccaatcaaaggtgttccttcgttttttctctgggattttatcgatgtaatgtgtacggagtttgtagaggagaagagagatttgatcaaatcaatactcaaagataggagactttctgatcttcctaggatcaaacagaaatcgttgatcatatggggagaagaagatcaaatatttccactggaactaggttacagattaaaaagacatataggagagagtgcagagatagtggtgatcaagaaagcaggacatgctgtgaatttggagaagtccaaggaatttgtcaagcatttgaaatcttttctcattgactctttgtga

SEQ ID NO: 71492 - protein, 311 aa, Arabidopsis thaliana
  peptide (1)..(311): Ceres Seq. ID no. 3659147
  misc_feature (88)..(305): Pfam Name: alpha/beta hydrolase fold Pfam Description: alpha/beta hydrolase fold
  misc_feature (1)..(311): Homolog of NCBI NO: 15242419 NR Description: putative hydrolase; protein id: At5g09430.1 thaliana] >gi|9955530|emb|CAC05469.1| putative hydrolase
  misc_feature (10)..(307): Homolog of NCBI NO: 18420566 NR Description: Expressed protein; protein id: At4g39955.1,
  misc_feature (10)..(307): Homolog of NCBI NO: 21536873 NR Description: putative hydrolase [Arabidopsis thaliana]
  misc_feature (10)..(310): Homolog of NCBI NO: 18411865 NR Description: hypothetical protein; protein id: At1g78210.1, by cDNA: gi_19699018 [Arabidopsis thaliana] unknown protein [Arabidopsis thaliana]
  misc_feature (12)..(306): Homolog of NCBI NO: 33146617 NR Description: hydrolase-like protein [Oryza sativa (japonica
  misc_feature (14)..(309): Homolog of NCBI NO: 37533664 NR Description: putative hydrolase [Oryza sativa (japonica >gi|19920100|gb|AAM08532.1| Putative hydrolase [Oryza sativa]
  misc_feature (10)..(219): Homolog of NCBI NO: 25406548 NR Description: hypothetical protein T11I11.15 [imported] -
  misc_feature (20)..(308): Homolog of NCBI NO: 22326938 NR Description: similar to putative hydrolase; protein id: [Arabidopsis thaliana] >gi|29294062|gb|AAO73899.1| hydrolase,
  misc_feature (30)..(310): Homolog of NCBI NO: 18394481 NR Description: expressed protein; protein id: At1g17430.1, by cDNA: 32887. [Arabidopsis thaliana] >gi|25402829|pir||H86310
  misc_feature (30)..(310): Homolog of NCBI NO: 21592821 NR Description: unknown [Arabidopsis thaliana]
MFDHMKLLRCFSFTASRDWLFRQSFANAGLRSVTTDLSHGNSIASTAMHCWIPKSPNRSKPNLLLLHGFGANAMWQYGEHLRAFTGRFNVYVPDLLFFGLSSTSEPNRTESFQARCLMRLMEAHGVQRMNIVGISYGGFVGYSLAAQFPENVEKLVLCCAGVCLEEKDMEDGLFKVPNLEEATGILIPQTPEKLKELIRFSFVKPIKGVPSFFLWDFIDVMCTEFVEEKRDLIKSILKDRRLSDLPRIKQKSLIIWGEEDQIFPLELGYRLKRHIGESAEIVVIKKAGHAVNLEKSKEFVKHLKSFLIDSL

SEQ ID NO: 71493 - protein, 307 aa, Arabidopsis thaliana
  peptide (1)..(307): Ceres Seq. ID no. 3659148
  misc_feature (84)..(301): Pfam Name: alpha/beta hydrolase fold Pfam Description: alpha/beta hydrolase fold
  misc_feature (1)..(307): Homolog of NCBI NO: 15242419 NR Description: putative hydrolase; protein id: At5g09430.1 thaliana] >gi|9955530|emb|CAC05469.1| putative hydrolase
  misc_feature (6)..(303): Homolog of NCBI NO: 18420566 NR Description: Expressed protein; protein id: At4g39955.1,
  misc_feature (6)..(303): Homolog of NCBI NO: 21536873 NR Description: putative hydrolase [Arabidopsis thaliana]
  misc_feature (6)..(306): Homolog of NCBI NO: 18411865 NR Description: hypothetical protein; protein id: At1g78210.1, by cDNA: gi_19699018 [Arabidopsis thaliana] unknown protein [Arabidopsis thaliana]
  misc_feature (8)..(302): Homolog of NCBI NO: 33146617 NR Description: hydrolase-like protein [Oryza sativa (japonica
  misc_feature (10)..(305): Homolog of NCBI NO: 37533664 NR Description: putative hydrolase [Oryza sativa (japonica >gi|19920100|gb|AAM08532.1| Putative hydrolase [Oryza sativa]
  misc_feature (6)..(215): Homolog of NCBI NO: 25406548 NR Description: hypothetical protein T11I11.15 [imported] -
  misc_feature (16)..(304): Homolog of NCBI NO: 22326938 NR Description: similar to putative hydrolase; protein id: [Arabidopsis thaliana] >gi|29294062|gb|AAO73899.1| hydrolase,
  misc_feature (26)..(306): Homolog of NCBI NO: 18394481 NR Description: expressed protein; protein id: At1g17430.1, by cDNA: 32887. [Arabidopsis thaliana] >gi|25402829|pir||H86310
  misc_feature (26)..(306): Homolog of NCBI NO: 21592821 NR Description: unknown [Arabidopsis thaliana]
MKLLRCFSFTASRDWLFRQSFANAGLRSVTTDLSHGNSIASTAMHCWIPKSPNRSKPNLLLLHGFGANAMWQYGEHLRAFTGRFNVYVPDLLFFGLSSTSEPNRTESFQARCLMRLMEAHGVQRMNIVGISYGGFVGYSLAAQFPENVEKLVLCCAGVCLEEKDMEDGLFKVPNLEEATGILIPQTPEKLKELIRFSFVKPIKGVPSFFLWDFIDVMCTEFVEEKRDLIKSILKDRRLSDLPRIKQKSLIIWGEEDQIFPLELGYRLKRHIGESAEIVVIKKAGHAVNLEKSKEFVKHLKSFLIDSL

SEQ ID NO: 71494 - protein, 264 aa, Arabidopsis thaliana
  peptide (1)..(264): Ceres Seq. ID no. 3659149
  misc_feature (41)..(258): Pfam Name: alpha/beta hydrolase fold Pfam Description: alpha/beta hydrolase fold
  misc_feature (1)..(264): Homolog of NCBI NO: 15242419 NR Description: putative hydrolase; protein id: At5g09430.1 thaliana] >gi|9955530|emb|CAC05469.1| putative hydrolase
  misc_feature (1)..(260): Homolog of NCBI NO: 18420566 NR Description: Expressed protein; protein id: At4g39955.1,
  misc_feature (1)..(260): Homolog of NCBI NO: 21536873 NR Description: putative hydrolase [Arabidopsis thaliana]
  misc_feature (1)..(263): Homolog of NCBI NO: 18411865 NR Description: hypothetical protein; protein id: At1g78210.1, by cDNA: gi_19699018 [Arabidopsis thaliana] unknown protein [Arabidopsis thaliana]
  misc_feature (1)..(259): Homolog of NCBI NO: 33146617 NR Description: hydrolase-like protein [Oryza sativa (japonica
  misc_feature (1)..(262): Homolog of NCBI NO: 37533664 NR Description: putative hydrolase [Oryza sativa (japonica >gi|19920100|gb|AAM08532.1| Putative hydrolase [Oryza sativa]
  misc_feature (1)..(172): Homolog of NCBI NO: 25406548 NR Description: hypothetical protein T11I11.15 [imported] -
  misc_feature (1)..(261): Homolog of NCBI NO: 22326938 NR Description: similar to putative hydrolase; protein id: [Arabidopsis thaliana] >gi|29294062|gb|AAO73899.1| hydrolase,
  misc_feature (1)..(263): Homolog of NCBI NO: 18394481 NR Description: expressed protein; protein id: At1g17430.1, by cDNA: 32887. [Arabidopsis thaliana] >gi|25402829|pir||H86310
  misc_feature (1)..(263): Homolog of NCBI NO: 21592821 NR Description: unknown [Arabidopsis thaliana]
MHCWIPKSPNRSKPNLLLLHGFGANAMWQYGEHLRAFTGRFNVYVPDLLFFGLSSTSEPNRTESFQARCLMRLMEAHGVQRMNIVGISYGGFVGYSLAAQFPENVEKLVLCCAGVCLEEKDMEDGLFKVPNLEEATGILIPQTPEKLKELIRFSFVKPIKGVPSFFLWDFIDVMCTEFVEEKRDLIKSILKDRRLSDLPRIKQKSLIIWGEEDQIFPLELGYRLKRHIGESAEIVVIKKAGHAVNLEKSKEFVKHLKSFLIDSL

SEQ ID NO: 71495 - DNA, 3984 bp, Arabidopsis thaliana
  misc_feature (1)..(3984): Ceres Seq. ID no. 3659406
  misc_feature: MA Experiment ID: 20001905 Result: Up-regulated in Transcription
  misc_feature: MA Experiment 20001905 PARAMETER Experiment Name: At_Drought_Reproduction_P Parameter: Age (day) Value: 40
  misc_feature: MA Experiment 20001905 PARAMETER Experiment Name: At_Drought_Reproduction_P Parameter: Organism Value: A. thaliana
  misc_feature: MA Experiment 20001905 PARAMETER Experiment Name: At_Drought_Reproduction_P Parameter: Plant Line Value: WS
  misc_feature: MA Experiment 20001905 PARAMETER Experiment Name: At_Drought_Reproduction_P Parameter: Timepoint (day) Value: 10
  misc_feature: MA Experiment 20001905 PARAMETER Experiment Name: At_Drought_Reproduction_P Parameter: Tissue Value: Rosettes
  misc_feature: MA Experiment 20001905 PARAMETER Experiment Name: At_Drought_Reproduction_P Parameter: Treatment Value: Drought vs. No Drought
atgggtaatgttgaaattccgaattggcttaaagctttgccattggcacctgtgtttagacctacagacactgaatttgcagatcccattgcttacatatcgaaaatcgaaaaggaagctagtgcctttgggatttgcaagatcattcctcctttacccaagccatcgaaaaagtatgttttctacaacttgaacaagtctcttttgaagtgtcccgaattggtttcagatgttgacatttcgaaggtgtgtaaagaggatagagctgtattcaccactaggcagcaagagttaggccaaactgtgaaaaaaaacaaaggagagaagggtaagagtaattctcaaaggagtggtgttaagcaggtttggcaaagtggaggcgtttatacattggatcagtttgaagctaagtcgaaagctttctacaaaacccaattaggaacggttaaggaactggcaccagttgtcattgaggcattgttctggaaagcggctttagagaagcctatatatatagagtatgctaatgacgtgcctggctctgctttcggtgagccagaggatcatttcaggcatttccggcagaggaagaggaggggcaggggattttatcagaggaagacagaaaataatgatccatcaggtaagaacggtgaaaagtcatcgcctgaggtagaaaaggcaccccttgcttctacaagtttatcatctcaggattcgtccaagcagaagaacatggatattgttgatgaaatggaaggtactgcaggctggaagctctccaacagttcgtggaaccttcagatgattgcacgttcacctggttctgttacacgtttcatgccagatgacattcctggtgttacatctcccatggtttatatcggtatgttgttcagttggtttgcctggcacgttgaggatcatgagcttcacagtatgaattatcttcacactggctcaccaaagacttggtacgctgtcccttgtgattatgcgcttgactttgaagaggttatccgcaaaaattcttatggcaggaacattgaccaactggctgctctcacccaactaggcgaaaagacaactcttgtatcacctgagatgatagttgcatctggcattccctgctgtaggttggtacaaaatcctggtgaatttgttgtgacttttccgaggtcttatcatgtaggattcagccacgtggctcaacgtagcaaaggaagctgctgtgcgtcgggcagccatgaattatctacccatgctgtcccatcagcagctgctatatctcttgactatgtcctttgtttcaaggcagtgccacgatcattgctaccaggtggtcgtagctcccgactaagagatcggcagagagaagaaagagagttccttgtgaaaagagcttttgtagaagatatattgaacgaaaacaagaatttatctgttcttcttcgagaaccaggctctcgtttggtgatgtgggaccctgatttacttccgcgtcatagcgcactggctcttgcagctgctggagttgctggtgcttctgctgtttcacctccagcagtggcaaaaaaagaacttgaggagggtcattctgaattgcagaataaagaaaagacttctcttttagaggaattgagcttgttcatggagaagctgaatgatgtatactacgacgatgatgatggtctgcttaacgatttccaagttgatactggaaccttgccatgtgtggcttgtggcgttcttggcttcccctttatgtctgtggtacagccttctgaaaaagcattaaaagatctctcagagagacaaggagagacagatgctcaggaaattatgacactgtcatcagaaaagtctgactgcgaatggaaaacgtcttctagatatataagacctcgcattttctgcctcgaacacactattgaacttcagagactgctgcaatcaagaggtggattgaaattccttgttatttgccataaagactttcaaaaattcaaggcacatgcggctatagtggcagaggaggtcaaagtccctttcagctatgatgatgtcctgttagagagtgcatctcaggaagagttgagtctaattgatcttgcaattgaagatgaagaaaaatacgaacacagtgtagactggacctcagaacttggcatcaatttacggtactgtgtgaaagtgaggaaaaattcccctactaagaaaattcagcatgcactgtcactaggtggcttgttctccgatacaagccagatgctagattttacaactatcagatggctgcagagaaaatcacgctcaaaagctaaacccagttctacctcaagtttcacaccttgtgaacatcttgaagtaaaagcagatggaaaattaagggataatttggattctcagaccggaaaaaaggaagaaaagatcatccagtactcgagaaagaaaaagttgaatccaaagccttcagcagaacaagttcaggagctagctaccctagctaaatcaaaagattttgataagacatgtaaaaattttagcagtaggtcacatctggatagtgcaattcgttctgagatgaacagtgagattggagactctggaagggtcattggggtatcattttccataaatccttgtagctcatctttcactgtgggacatgggcaagaacatcccgagatcactgtcaagtttggttcagatttagatgggaatgtcacaaatagtttgagtatggtgaatggagactctgctgacctaaccttaacctccatatccagagagcagcaccaaggacactctatgaccagcaataataatggctccaactcaggtagtcatgttgtggcaagccagaccatacttgtttctacaggtgataatcatgacggaccaagaaaattgtctggtgattatgtctgcagtgatgtgtctgtacgtggtattcaggaagcggttgaaatgagtgaccaagagtttggagaacctaggtctactgtcactaatattgaggatgaacagcaatcacagattgtgaaaccaacccaaagagaagctgtatttggtgatcacgaacaggtggagggagcagaagctgtgtctaccagagaaaacttgtgctctgaaataattctgcacactgagcattcttcagctcatgtgggtatggaaattcctgacataaacacggccagtgagaacttagttgttgacatgacccatgatggtgaacctttggaaagtagcgatatattaagttcgagcaatggtgatgaagcttcttcaaatggattgcaagttctaaatgatgagcttagcatggagagtgaagtttcaagctcagaaaacaccgaagttattgaggctcccaattctatgggagaagcaaagaagaagcggaaaatagaatcagagtctgagacaaatgataatccagagagtagcattggtttcataaggagtccttgtgaagggttgaggtcaaggggcaagaggaaagcaacatgtgaaacttcattaaagcacactgaaacgagtgatgaagagaagaaacccattgcgaaaaggctgaagaaaacaccaaaggcttgctcagggagtcgtcagcaagaagtccccacgacaactcaccccaaccgttgttacctagagggatgcaagatgacttttgagagtaaagcgaaattacaaactcacaagagaaaccgttgcactcacgaagggtgtggaaagaaattcagggctcacaaatatctggtgcttcatcaacgtgtgcataaggatgaaagacctttcgagtgctcttggaaaggatgttcaatgactttcaaatggcaatgggcgaggacagaacatttgcgtctgcacacgggagagcgaccatacatatgcaaggtcgatggatgtggattgtcgtttaggtttgtatctgactatagtcgccacagacgtaaaaccatgcactatgtcacatag

SEQ ID NO: 71496 - protein, 1327 aa, Arabidopsis thaliana
  peptide (1)..(1327): Ceres Seq. ID no. 3659407
  misc_feature (292)..(417): Pfam Name: jmjC domain Pfam Description: jmjC domain
  misc_feature (254)..(483): Homolog of NCBI NO: 22331694 NR Description: similar to zinc finger protein - like; protein
  misc_feature (9)..(183): Homolog of NCBI NO: 22331694 NR Description: similar to zinc finger protein - like; protein
  misc_feature (1216)..(1326): Homolog of NCBI NO: 22331694 NR Description: similar to zinc finger protein - like; protein
  misc_feature (634)..(737): Homolog of NCBI NO: 22331694 NR Description: similar to zinc finger protein - like; protein
  misc_feature (254)..(483): Homolog of NCBI NO: 7488434 NR Description: zinc finger protein T29H11.50 - Arabidopsis >gi|4678345|emb|CAB41155.1| putative zinc finger protein
  misc_feature (9)..(183): Homolog of NCBI NO: 7488434 NR Description: zinc finger protein T29H11.50 - Arabidopsis >gi|4678345|emb|CAB41155.1| putative zinc finger protein
  misc_feature (1216)..(1326): Homolog of NCBI NO: 7488434 NR Description: zinc finger protein T29H11.50 - Arabidopsis >gi|4678345|emb|CAB41155.1| putative zinc finger protein
  misc_feature (634)..(737): Homolog of NCBI NO: 7488434 NR Description: zinc finger protein T29H11.50 - Arabidopsis >gi|4678345|emb|CAB41155.1| putative zinc finger protein
  misc_feature (260)..(602): Homolog of NCBI NO: 20804883 NR Description: putative zinc finger protein [Oryza sativa
  misc_feature (1029)..(1326): Homolog of NCBI NO: 20804883 NR Description: putative zinc finger protein [Oryza sativa
MGNVEIPNWLKALPLAPVFRPTDTEFADPIAYISKIEKEASAFGICKIIPPLPKPSKKYVFYNLNKSLLKCPELVSDVDISKVCKEDRAVFTTRQQELGQTVKKNKGEKGKSNSQRSGVKQVWQSGGVYTLDQFEAKSKAFYKTQLGTVKELAPVVIEALFWKAALEKPIYIEYANDVPGSAFGEPEDHFRHFRQRKRRGRGFYQRKTENNDPSGKNGEKSSPEVEKAPLASTSLSSQDSSKQKNMDIVDEMEGTAGWKLSNSSWNLQMIARSPGSVTRFMPDDIPGVTSPMVYIGMLFSWFAWHVEDHELHSMNYLHTGSPKTWYAVPCDYALDFEEVIRKNSYGRNIDQLAALTQLGEKTTLVSPEMIVASGIPCCRLVQNPGEFVVTFPRSYHVGFSHVAQRSKGSCCASGSHELSTHAVPSAAAISLDYVLCFKAVPRSLLPGGRSSRLRDRQREEREFLVKRAFVEDILNENKNLSVLLREPGSRLVMWDPDLLPRHSALALAAAGVAGASAVSPPAVAKKELEEGHSELQNKEKTSLLEELSLFMEKLNDVYYDDDDGLLNDFQVDTGTLPCVACGVLGFPFMSVVQPSEKALKDLSERQGETDAQEIMTLSSEKSDCEWKTSSRYIRPRIFCLEHTIELQRLLQSRGGLKFLVICHKDFQKFKAHAAIVAEEVKVPFSYDDVLLESASQEELSLIDLAIEDEEKYEHSVDWTSELGINLRYCVKVRKNSPTKKIQHALSLGGLFSDTSQMLDFTTIRWLQRKSRSKAKPSSTSSFTPCEHLEVKADGKLRDNLDSQTGKKEEKIIQYSRKKKLNPKPSAEQVQELATLAKSKDFDKTCKNFSSRSHLDSAIRSEMNSEIGDSGRVIGVSFSINPCSSSFTVGHGQEHPEITVKFGSDLDGNVTNSLSMVNGDSADLTLTSISREQHQGHSMTSNNNGSNSGSHVVASQTILVSTGDNHDGPRKLSGDYVCSDVSVRGIQEAVEMSDQEFGEPRSTVTNIEDEQQSQIVKPTQREAVFGDHEQVEGAEAVSTRENLCSEIILHTEHSSAHVGMEIPDINTASENLVVDMTHDGEPLESSDILSSSNGDEASSNGLQVLNDELSMESEVSSSENTEVIEAPNSMGEAKKKRKIESESETNDNPESSIGFIRSPCEGLRSRGKRKATCETSLKHTETSDEEKKPIAKRLKKTPKACSGSRQQEVPTTTHPNRCYLEGCKMTFESKAKLQTHKRNRCTHEGCGKKFRAHKYLVLHQRVHKDERPFECSWKGCSMTFKWQWARTEHLRLHTGERPYICKVDGCGLSFRFVSDYSRHRRKTMHYVT

SEQ ID NO: 71497 - protein, 1082 aa, Arabidopsis thaliana
  peptide (1)..(1082): Ceres Seq. ID no. 3659408
  misc_feature (47)..(172): Pfam Name: jmjC domain Pfam Description: jmjC domain
  misc_feature (9)..(238): Homolog of NCBI NO: 22331694 NR Description: similar to zinc finger protein - like; protein
  misc_feature (971)..(1081): Homolog of NCBI NO: 22331694 NR Description: similar to zinc finger protein - like; protein
  misc_feature (389)..(492): Homolog of NCBI NO: 22331694 NR Description: similar to zinc finger protein - like; protein
  misc_feature (9)..(238): Homolog of NCBI NO: 7488434 NR Description: zinc finger protein T29H11.50 - Arabidopsis >gi|4678345|emb|CAB41155.1| putative zinc finger protein
  misc_feature (971)..(1081): Homolog of NCBI NO: 7488434 NR Description: zinc finger protein T29H11.50 - Arabidopsis >gi|4678345|emb|CAB41155.1| putative zinc finger protein
  misc_feature (389)..(492): Homolog of NCBI NO: 7488434 NR Description: zinc finger protein T29H11.50 - Arabidopsis >gi|4678345|emb|CAB41155.1| putative zinc finger protein
  misc_feature (15)..(357): Homolog of NCBI NO: 20804883 NR Description: putative zinc finger protein [Oryza sativa
  misc_feature (784)..(1081): Homolog of NCBI NO: 20804883 NR Description: putative zinc finger protein [Oryza sativa
  misc_feature (357)..(609): Homolog of NCBI NO: 20804883 NR Description: putative zinc finger protein [Oryza sativa
  misc_feature (1)..(156): Homolog of NCBI NO: 15237976 NR Description: putative protein; protein id: At5g46910.1 thaliana] >gi|9759433|dbj|BAB10230.1|
MDIVDEMEGTAGWKLSNSSWNLQMIARSPGSVTRFMPDDIPGVTSPMVYIGMLFSWFAWHVEDHELHSMNYLHTGSPKTWYAVPCDYALDFEEVIRKNSYGRNIDQLAALTQLGEKTTLVSPEMIVASGIPCCRLVQNPGEFVVTFPRSYHVGFSHVAQRSKGSCCASGSHELSTHAVPSAAAISLDYVLCFKAVPRSLLPGGRSSRLRDRQREEREFLVKRAFVEDILNENKNLSVLLREPGSRLVMWDPDLLPRHSALALAAAGVAGASAVSPPAVAKKELEEGHSELQNKEKTSLLEELSLFMEKLNDVYYDDDDGLLNDFQVDTGTLPCVACGVLGFPFMSVVQPSEKALKDLSERQGETDAQEIMTLSSEKSDCEWKTSSRYIRPRIFCLEHTIELQRLLQSRGGLKFLVICHKDFQKFKAHAAIVAEEVKVPFSYDDVLLESASQEELSLIDLAIEDEEKYEHSVDWTSELGINLRYCVKVRKNSPTKKIQHALSLGGLFSDTSQMLDFTTIRWLQRKSRSKAKPSSTSSFTPCEHLEVKADGKLRDNLDSQTGKKEEKIIQYSRKKKLNPKPSAEQVQELATLAKSKDFDKTCKNFSSRSHLDSAIRSEMNSEIGDSGRVIGVSFSINPCSSSFTVGHGQEHPEITVKFGSDLDGNVTNSLSMVNGDSADLTLTSISREQHQGHSMTSNNNGSNSGSHVVASQTILVSTGDNHDGPRKLSGDYVCSDVSVRGIQEAVEMSDQEFGEPRSTVTNIEDEQQSQIVKPTQREAVFGDHEQVEGAEAVSTRENLCSEIILHTEHSSAHVGMEIPDINTASENLVVDMTHDGEPLESSDILSSSNGDEASSNGLQVLNDELSMESEVSSSENTEVIEAPNSMGEAKKKRKIESESETNDNPESSIGFIRSPCEGLRSRGKRKATCETSLKHTETSDEEKKPIAKRLKKTPKACSGSRQQEVPTTTHPNRCYLEGCKMTFESKAKLQTHKRNRCTHEGCGKKFRAHKYLVLHQRVHKDERPFECSWKGCSMTFKWQWARTEHLRLHTGERPYICKVDGCGLSFRFVSDYSRHRRKTMHYVT

SEQ ID NO: 71498 - protein, 1076 aa, Arabidopsis thaliana
  peptide (1)..(1076): Ceres Seq. ID no. 3659409
  misc_feature (41)..(166): Pfam Name: jmjC domain Pfam Description: jmjC domain
  misc_feature (3)..(232): Homolog of NCBI NO: 22331694 NR Description: similar to zinc finger protein - like; protein
  misc_feature (965)..(1075): Homolog of NCBI NO: 22331694 NR Description: similar to zinc finger protein - like; protein
  misc_feature (383)..(486): Homolog of NCBI NO: 22331694 NR Description: similar to zinc finger protein - like; protein
  misc_feature (3)..(232): Homolog of NCBI NO: 7488434 NR Description: zinc finger protein T29H11.50 - Arabidopsis >gi|4678345|emb|CAB41155.1| putative zinc finger protein
  misc_feature (965)..(1075): Homolog of NCBI NO: 7488434 NR Description: zinc finger protein T29H11.50 - Arabidopsis >gi|4678345|emb|CAB41155.1| putative zinc finger protein
  misc_feature (383)..(486): Homolog of NCBI NO: 7488434 NR Description: zinc finger protein T29H11.50 - Arabidopsis >gi|4678345|emb|CAB41155.1| putative zinc finger protein
  misc_feature (9)..(351): Homolog of NCBI NO: 20804883 NR Description: putative zinc finger protein [Oryza sativa
  misc_feature (778)..(1075): Homolog of NCBI NO: 20804883 NR Description: putative zinc finger protein [Oryza sativa
  misc_feature (351)..(603): Homolog of NCBI NO: 20804883 NR Description: putative zinc finger protein [Oryza sativa
  misc_feature (1)..(150): Homolog of NCBI NO: 15237976 NR Description: putative protein; protein id: At5g46910.1 thaliana] >gi|9759433|dbj|BAB10230.1|
MEGTAGWKLSNSSWNLQMIARSPGSVTRFMPDDIPGVTSPMVYIGMLFSWFAWHVEDHELHSMNYLHTGSPKTWYAVPCDYALDFEEVIRKNSYGRNIDQLAALTQLGEKTTLVSPEMIVASGIPCCRLVQNPGEFVVTFPRSYHVGFSHVAQRSKGSCCASGSHELSTHAVPSAAAISLDYVLCFKAVPRSLLPGGRSSRLRDRQREEREFLVKRAFVEDILNENKNLSVLLREPGSRLVMWDPDLLPRHSALALAAAGVAGASAVSPPAVAKKELEEGHSELQNKEKTSLLEELSLFMEKLNDVYYDDDDGLLNDFQVDTGTLPCVACGVLGFPFMSVVQPSEKALKDLSERQGETDAQEIMTLSSEKSDCEWKTSSRYIRPRIFCLEHTIELQRLLQSRGGLKFLVICHKDFQKFKAHAAIVAEEVKVPFSYDDVLLESASQEELSLIDLAIEDEEKYEHSVDWTSELGINLRYCVKVRKNSPTKKIQHALSLGGLFSDTSQMLDFTTIRWLQRKSRSKAKPSSTSSFTPCEHLEVKADGKLRDNLDSQTGKKEEKIIQYSRKKKLNPKPSAEQVQELATLAKSKDFDKTCKNFSSRSHLDSAIRSEMNSEIGDSGRVIGVSFSINPCSSSFTVGHGQEHPEITVKFGSDLDGNVTNSLSMVNGDSADLTLTSISREQHQGHSMTSNNNGSNSGSHVVASQTILVSTGDNHDGPRKLSGDYVCSDVSVRGIQEAVEMSDQEFGEPRSTVTNIEDEQQSQIVKPTQREAVFGDHEQVEGAEAVSTRENLCSEIILHTEHSSAHVGMEIPDINTASENLVVDMTHDGEPLESSDILSSSNGDEASSNGLQVLNDELSMESEVSSSENTEVIEAPNSMGEAKKKRKIESESETNDNPESSIGFIRSPCEGLRSRGKRKATCETSLKHTETSDEEKKPIAKRLKKTPKACSGSRQQEVPTTTHPNRCYLEGCKMTFESKAKLQTHKRNRCTHEGCGKKFRAHKYLVLHQRVHKDERPFECSWKGCSMTFKWQWARTEHLRLHTGERPYICKVDGCGLSFRFVSDYSRHRRKTMHYVT

SEQ ID NO: 71499 - DNA, 1248 bp, Arabidopsis thaliana
  misc_feature (1)..(1248): Ceres Seq. ID no. 3659606
  misc_feature: MA Experiment ID: 20001451 Result: Down-regulated in Transcription
  misc_feature: MA Experiment 20001451 PARAMETER Experiment Name: At_Far-red-induction_P Parameter: Age (day) Value: 7
  misc_feature: MA Experiment 20001451 PARAMETER Experiment Name: At_Far-red-induction_P Parameter: Light Value: Far-red vs. White
  misc_feature: MA Experiment 20001451 PARAMETER Experiment Name: At_Far-red-induction_P Parameter: Organism Value: A. thaliana
  misc_feature: MA Experiment 20001451 PARAMETER Experiment Name: At_Far-red-induction_P Parameter: Plant Line Value: Columbia
  misc_feature: MA Experiment 20001451 PARAMETER Experiment Name: At_Far-red-induction_P Parameter: Timepoint (hr) Value: 24
  misc_feature: MA Experiment 20001451 PARAMETER Experiment Name: At_Far-red-induction_P Parameter: Tissue Value: Whole Plant
  misc_feature: MA Experiment ID: 20001911 Result: Down-regulated in Transcription
  misc_feature: MA Experiment 20001911 PARAMETER Experiment Name: At_Drought_Reproduction_P Parameter: Age (day) Value: 40
  misc_feature: MA Experiment 20001911 PARAMETER Experiment Name: At_Drought_Reproduction_P Parameter: Organism Value: A. thaliana
  misc_feature: MA Experiment 20001911 PARAMETER Experiment Name: At_Drought_Reproduction_P Parameter: Plant Line Value: WS
  misc_feature: MA Experiment 20001911 PARAMETER Experiment Name: At_Drought_Reproduction_P Parameter: Timepoint (day) Value: 10
  misc_feature: MA Experiment 20001911 PARAMETER Experiment Name: At_Drought_Reproduction_P Parameter: Tissue Value: Flowers
  misc_feature: MA Experiment 20001911 PARAMETER Experiment Name: At_Drought_Reproduction_P Parameter: Treatment Value: Drought vs. No Drought
atgcttcaatgtatctttctcatctccgattctggagaggtaatgctagagaagcagcttactggtcatcgcgttgatagatccatatgtgcttggttctgggatcaatatatttctcaaggcgattcctttaaggcacttccagtgattgcttcaccaacacattatctatttcaaattgttcgtgacggaattacgttcttagcttgtagtcaagttgaaatgccaccgttgatggcaatcgagttcctttgcagagttgctgatgttttgtctgagtaccttggtgggctaaatgaagatctcattaaggataatttcatcattgtctatgagcttttggatgagatgatcgataatggtttccctctcacaacagaacctagtatcctgaaggaaatgatagctccaccgaatctagtcagcaaaatgttgagtgttgtaacgggaaatgcttcgaatgttagtgacacgcttccgagtggggcgggctcttgtgttccttggcgaccgacagatccaaagtactctagcaacgaagtttatgtcgaccttgttgaagagatggatgcaattgtaaacagggatggagaattggtaaaatgcgagatttatggcgaagtccaaatgaattctcagctcactggttttccagatttgacattgtcgtttgcgaatccatcaatcctagaagacatgaggtttcacccgtgtgtccgctacagaccatgggaatctcatcaagttctctcctttgtccctccagatggagagttcaagcttatgagttacagggtgaagaagctaaagaacacacctgtatatgtaaaacctcaaataacatcagattcgggtacatgtcgaattagcgtgctagtgggaatccgaagcgatccagggaaaacaattgagtcgataaccttgagtttccagcttcctcactgtgtatcatctgcagatctctcatcaaatcatggaactgtaacaatcctctctaacaagacatgtacatggacaatcgggcgaatcccaaaggacaaaactccgtgtttgtcgggaacactagcgctggaaccagggttagaacggcttcacgtgtttccgacattcaaactcgggtttaagataatgggcattgctctttctggcctaagaatcgagaaacttgatcttcaaactatccctcctcgtttgtacaaagggtttcgtgctcagacacgcgctggtgagttcgatgtcaggttgtag

SEQ ID NO: 71500 - protein, 415 aa, Arabidopsis thaliana
  peptide (1)..(415): Ceres Seq. ID no. 3659607
  misc_feature (5)..(415): Pfam Name: Adaptor complexes medium subunit family Pfam Description: Adaptor complexes medium subunit family
  misc_feature (1)..(414): Homolog of NCBI NO: 17505212 NR Description: adaptor-related protein complex 3, mu 2 subunit
  misc_feature (1)..(414): Homolog of NCBI NO: 20073160 NR Description: adaptor-related protein complex 3, mu 2 subunit
  misc_feature (1)..(414): Homolog of NCBI NO: 34596214 NR Description: adaptor protein complex 3 Mu3A [Cricetulus
  misc_feature (117)..(415): Homolog of NCBI NO: 22330286 NR Description: clathrin-associated protein, putative; protein At1g56590.1, supported by cDNA: gi_20466507 [Arabidopsis
  misc_feature (1)..(414): Homolog of NCBI NO: 5803000 NR Description: adaptor-related protein complex 3, mu 2 subunit; associated protein AP47 homolog 2; clathrin coat assembly protein
  misc_feature (1)..(414): Homolog of NCBI NO: 6912240 NR Description: adaptor-related protein complex 3, mu 1 subunit;
  misc_feature (1)..(414): Homolog of NCBI NO: 18959246 NR Description: adaptor-related protein complex 3, mu 2 subunit
  misc_feature (1)..(415): Homolog of NCBI NO: 25404135 NR Description: probable clathrin-associated adaptor protein
  misc_feature (1)..(414): Homolog of NCBI NO: 20531985 NR Description: Adapter-related protein complex 3 mu 1 subunit
  misc_feature (1)..(414): Homolog of NCBI NO: 20270043 NR Description: adaptor-related protein complex AP-3, mu 1 clathrin adaptor protein mu3A; EST C78982 [Mus musculus]
MLQCIFLISDSGEVMLEKQLTGHRVDRSICAWFWDQYISQGDSFKALPVIASPTHYLFQIVRDGITFLACSQVEMPPLMAIEFLCRVADVLSEYLGGLNEDLIKDNFIIVYELLDEMIDNGFPLTTEPSILKEMIAPPNLVSKMLSVVTGNASNVSDTLPSGAGSCVPWRPTDPKYSSNEVYVDLVEEMDAIVNRDGELVKCEIYGEVQMNSQLTGFPDLTLSFANPSILEDMRFHPCVRYRPWESHQVLSFVPPDGEFKLMSYRVKKLKNTPVYVKPQITSDSGTCRISVLVGIRSDPGKTIESITLSFQLPHCVSSADLSSNHGTVTILSNKTCTWTIGRIPKDKTPCLSGTLALEPGLERLHVFPTFKLGFKIMGIALSGLRIEKLDLQTIPPRLYKGFRAQTRAGEFDVRL

SEQ ID NO: 71501 - protein, 401 aa, Arabidopsis thaliana
  peptide (1)..(401): Ceres Seq. ID no. 3659608
  misc_feature (1)..(401): Pfam Name: Adaptor complexes medium subunit family Pfam Description: Adaptor complexes medium subunit family
  misc_feature (1)..(401): Homolog of NCBI NO: 25404135 NR Description: probable clathrin-associated adaptor protein
  misc_feature (103)..(401): Homolog of NCBI NO: 22330286 NR Description: clathrin-associated protein, putative; protein At1g56590.1, supported by cDNA: gi_20466507 [Arabidopsis
  misc_feature (1)..(400): Homolog of NCBI NO: 18959246 NR Description: adaptor-related protein complex 3, mu 2 subunit
  misc_feature (1)..(400): Homolog of NCBI NO: 5803000 NR Description: adaptor-related protein complex 3, mu 2 subunit; associated protein AP47 homolog 2; clathrin coat assembly protein
  misc_feature (1)..(400): Homolog of NCBI NO: 6912240 NR Description: adaptor-related protein complex 3, mu 1 subunit;
  misc_feature (1)..(400): Homolog of NCBI NO: 17505212 NR Description: adaptor-related protein complex 3, mu 2 subunit
  misc_feature (1)..(400): Homolog of NCBI NO: 20073160 NR Description: adaptor-related protein complex 3, mu 2 subunit
  misc_feature (1)..(400): Homolog of NCBI NO: 34596214 NR Description: adaptor protein complex 3 Mu3A [Cricetulus
  misc_feature (1)..(400): Homolog of NCBI NO: 20531985 NR Description: Adapter-related protein complex 3 mu 1 subunit
  misc_feature (1)..(400): Homolog of NCBI NO: 20270043 NR Description: adaptor-related protein complex AP-3, mu 1 clathrin adaptor protein mu3A; EST C78982 [Mus musculus]
MLEKQLTGHRVDRSICAWFWDQYISQGDSFKALPVIASPTHYLFQIVRDGITFLACSQVEMPPLMAIEFLCRVADVLSEYLGGLNEDLIKDNFIIVYELLDEMIDNGFPLTTEPSILKEMIAPPNLVSKMLSVVTGNASNVSDTLPSGAGSCVPWRPTDPKYSSNEVYVDLVEEMDAIVNRDGELVKCEIYGEVQMNSQLTGFPDLTLSFANPSILEDMRFHPCVRYRPWESHQVLSFVPPDGEFKLMSYRVKKLKNTPVYVKPQITSDSGTCRISVLVGIRSDPGKTIESITLSFQLPHCVSSADLSSNHGTVTILSNKTCTWTIGRIPKDKTPCLSGTLALEPGLERLHVFPTFKLGFKIMGIALSGLRIEKLDLQTIPPRLYKGFRAQTRAGEFDVRL

SEQ ID NO: 71502 - protein, 341 aa, Arabidopsis thaliana
  peptide (1)..(341): Ceres Seq. ID no. 3659609
  misc_feature (1)..(341): Pfam Name: Adaptor complexes medium subunit family Pfam Description: Adaptor complexes medium subunit family
  misc_feature (1)..(341): Homolog of NCBI NO: 25404135 NR Description: probable clathrin-associated adaptor protein
  misc_feature (43)..(341): Homolog of NCBI NO: 22330286 NR Description: clathrin-associated protein, putative; protein At1g56590.1, supported by cDNA: gi_20466507 [Arabidopsis
  misc_feature (1)..(340): Homolog of NCBI NO: 18959246 NR Description: adaptor-related protein complex 3, mu 2 subunit
  misc_feature (1)..(340): Homolog of NCBI NO: 5803000 NR Description: adaptor-related protein complex 3, mu 2 subunit; associated protein AP47 homolog 2; clathrin coat assembly protein
  misc_feature (1)..(340): Homolog of NCBI NO: 6912240 NR Description: adaptor-related protein complex 3, mu 1 subunit;
  misc_feature (1)..(340): Homolog of NCBI NO: 17505212 NR Description: adaptor-related protein complex 3, mu 2 subunit
  misc_feature (1)..(340): Homolog of NCBI NO: 20073160 NR Description: adaptor-related protein complex 3, mu 2 subunit
  misc_feature (1)..(340): Homolog of NCBI NO: 34596214 NR Description: adaptor protein complex 3 Mu3A [Cricetulus
  misc_feature (1)..(340): Homolog of NCBI NO: 20531985 NR Description: Adapter-related protein complex 3 mu 1 subunit
  misc_feature (1)..(340): Homolog of NCBI NO: 20270043 NR Description: adaptor-related protein complex AP-3, mu 1 clathrin adaptor protein mu3A; EST C78982 [Mus musculus]
MPPLMAIEFLCRVADVLSEYLGGLNEDLIKDNFIIVYELLDEMIDNGFPLTTEPSILKEMIAPPNLVSKMLSVVTGNASNVSDTLPSGAGSCVPWRPTDPKYSSNEVYVDLVEEMDAIVNRDGELVKCEIYGEVQMNSQLTGFPDLTLSFANPSILEDMRFHPCVRYRPWESHQVLSFVPPDGEFKLMSYRVKKLKNTPVYVKPQITSDSGTCRISVLVGIRSDPGKTIESITLSFQLPHCVSSADLSSNHGTVTILSNKTCTWTIGRIPKDKTPCLSGTLALEPGLERLHVFPTFKLGFKIMGIALSGLRIEKLDLQTIPPRLYKGFRAQTRAGEFDVRL

SEQ ID NO: 71503 - DNA, 1314 bp, Arabidopsis thaliana
  misc_feature (1)..(1314): Ceres Seq. ID no. 4263684
  misc_feature: MA Experiment ID: 20000307 Result: Up-regulated in Transcription
  misc_feature: MA Experiment 20000307 PARAMETER Experiment Name: At_Germinating_Seeds_Sub_P Parameter: Age (hr) Value: 24 vs. 0
  misc_feature: MA Experiment 20000307 PARAMETER Experiment Name: At_Germinating_Seeds_Sub_P Parameter: Organism Value: A. thaliana
  misc_feature: MA Experiment 20000307 PARAMETER Experiment Name: At_Germinating_Seeds_Sub_P Parameter: Plant Line Value: WS
  misc_feature: MA Experiment 20000307 PARAMETER Experiment Name: At_Germinating_Seeds_Sub_P Parameter: Tissue Value: Germinating Seeds
atggggaaagagtgctactacttgtcatggatactcaagtttcatcttctacttgttttgattcagcttgttgattcaggatctaccatcagatttcttcctggtttccaaggccctcttcctttcgagctcgagaccgggtacattggtgtgggtgaggcagagaaagatcaaatgttctactacttcatcaaatctgagagtaatccagagaaagaccctcttcttctctggttaagtggaggtcctttctgttcttcgttcactgctcttatttatgagaatgggccaattgctttcaaggctgaggaatacaatggaagtatcccctctttggtctctaccacatatgcatggactaaggtggcgagcattctctatttggatcagcctgttgggactggcttctcctactccagaaatccacttgctgatataccaagtgacacaggggtagctaagccggtcaacgagtttcttcataagtggctagacaaacatcctgagttcttatccaatccgctctatgtcgccggaaattcttattccggtattgtcattccgaccatcgttcaagaaatctcaaatggaaaccatttagacagcaaacctcaaataaatcttcagggctttgtactcggaaacccggcaacagacactgatattgatcttaactctcgcattccatttgctcatggaaaggcactgatctctgatgaacactatgagtctctaaagagaagttgtcaagggaattatattagcgtgaatcctcgtaacacaaaatgcttgaaactccttgaagactttaaaaagtgtgtttctggaataagtgaagaatatattctaaaacctgactgcatgtggctttattcttgtatggcaaatctgcattcgctatctgaatattgggcaaatgagaaaagcgtgcgcaaagctcttctagtgaacgagggtaccgtaagaaaatggatacgatgtaatacggaaatcgcatacaataaggacattaggagtagtgtgccatatcataagtatattagcattgaagggtatcgatctctcgtcttcagtggtgatcacgacatgttagtacctttccttggaactcaagcatggataagatctctcaactattccattgttgacgattggagaccatggatggttcagaatcaagttgctggatacacaaggacttatgcgaataagatgacatttgccactgtcaaaggaggcgggcacacgagtgagtataaaccagtggagacctatatcatgatcaagaggtggttaagtggtcaacctctataa

SEQ ID NO: 71504 - protein, 437 aa, Arabidopsis thaliana
  peptide (1)..(437): Ceres Seq. ID no. 4263685
  misc_feature (34)..(434): Pfam Name: Serine carboxypeptidase Pfam Description: Serine carboxypeptidase
  misc_feature (1)..(437): Homolog of NCBI NO: 15230430 NR Description: serine carboxypeptidase, putative; protein id: [Arabidopsis thaliana] >gi|12322038|gb|AAG51061.1|AC069472_1
  misc_feature (96)..(437): Homolog of NCBI NO: 15795141 NR Description: serine carboxypeptidase [Arabidopsis thaliana]
  misc_feature (1)..(47): Homolog of NCBI NO: 15795141 NR Description: serine carboxypeptidase [Arabidopsis thaliana]
  misc_feature (9)..(437): Homolog of NCBI NO: 30682106 NR Description: serine carboxypeptidase -related [Arabidopsis
  misc_feature (9)..(437): Homolog of NCBI NO: 15230438 NR Description: serine carboxypeptidase, putative; protein id: [Arabidopsis thaliana] >gi|12322055|gb|AAG51078.1|AC069472_18
  misc_feature (9)..(437): Homolog of NCBI NO: 15795145 NR Description: serine carboxypeptidase [Arabidopsis thaliana]
  misc_feature (7)..(437): Homolog of NCBI NO: 15228300 NR Description: putative glucose acyltransferase; protein id: [Arabidopsis thaliana] >gi|8567775|gb|AAF76347.1| glucose putative [Arabidopsis thaliana]
  misc_feature (16)..(437): Homolog of NCBI NO: 15227765 NR Description: putative serine carboxypeptidase I; protein id: [Arabidopsis thaliana] >gi|25289780|pir||E84618 probable serine
  misc_feature (9)..(437): Homolog of NCBI NO: 15219433 NR Description: putative serine carboxypeptidase; protein id: [Arabidopsis thaliana] >gi|25289779|pir||C96759 protein serine
  misc_feature (8)..(437): Homolog of NCBI NO: 25289782 NR Description: probable serine carboxypeptidase I [imported] - thaliana >gi|3169172|gb|AAC17815.1| putative serine I [Arabidopsis thaliana] >gi|20197276|gb|AAM15008.1| putative
MGKECYYLSWILKFHLLLVLIQLVDSGSTIRFLPGFQGPLPFELETGYIGVGEAEKDQMFYYFIKSESNPEKDPLLLWLSGGPFCSSFTALIYENGPIAFKAEEYNGSIPSLVSTTYAWTKVASILYLDQPVGTGFSYSRNPLADIPSDTGVAKPVNEFLHKWLDKHPEFLSNPLYVAGNSYSGIVIPTIVQEISNGNHLDSKPQINLQGFVLGNPATDTDIDLNSRIPFAHGKALISDEHYESLKRSCQGNYISVNPRNTKCLKLLEDFKKCVSGISEEYILKPDCMWLYSCMANLHSLSEYWANEKSVRKALLVNEGTVRKWIRCNTEIAYNKDIRSSVPYHKYISIEGYRSLVFSGDHDMLVPFLGTQAWIRSLNYSIVDDWRPWMVQNQVAGYTRTYANKMTFATVKGGGHTSEYKPVETYIMIKRWLSGQPL

SEQ ID NO: 71505 - protein, 379 aa, Arabidopsis thaliana
  peptide (1)..(379): Ceres Seq. ID no. 4263686
  misc_feature (1)..(376): Pfam Name: Serine carboxypeptidase Pfam Description: Serine carboxypeptidase
  misc_feature (1)..(379): Homolog of NCBI NO: 15230430 NR Description: serine carboxypeptidase, putative; protein id: [Arabidopsis thaliana] >gi|12322038|gb|AAG51061.1|AC069472_1
  misc_feature (38)..(379): Homolog of NCBI NO: 15795141 NR Description: serine carboxypeptidase [Arabidopsis thaliana]
  misc_feature (1)..(379): Homolog of NCBI NO: 30682106 NR Description: serine carboxypeptidase -related [Arabidopsis
  misc_feature (1)..(379): Homolog of NCBI NO: 15230438 NR Description: serine carboxypeptidase, putative; protein id: [Arabidopsis thaliana] >gi|12322055|gb|AAG51078.1|AC069472_18
  misc_feature (1)..(379): Homolog of NCBI NO: 15795145 NR Description: serine carboxypeptidase [Arabidopsis thaliana]
  misc_feature (1)..(379): Homolog of NCBI NO: 15228300 NR Description: putative glucose acyltransferase; protein id: [Arabidopsis thaliana] >gi|8567775|gb|AAF76347.1| glucose putative [Arabidopsis thaliana]
  misc_feature (1)..(379): Homolog of NCBI NO: 15227765 NR Description: putative serine carboxypeptidase I; protein id: [Arabidopsis thaliana] >gi|25289780|pir||E84618 probable serine
  misc_feature (1)..(379): Homolog of NCBI NO: 15219433 NR Description: putative serine carboxypeptidase; protein id: [Arabidopsis thaliana] >gi|25289779|pir||C96759 protein serine
  misc_feature (1)..(379): Homolog of NCBI NO: 25289782 NR Description: probable serine carboxypeptidase I [imported] - thaliana >gi|3169172|gb|AAC17815.1| putative serine I [Arabidopsis thaliana] >gi|20197276|gb|AAM15008.1| putative
  misc_feature (1)..(379): Homolog of NCBI NO: 30681900 NR Description: serine carboxypeptidase -related [Arabidopsis
MFYYFIKSESNPEKDPLLLWLSGGPFCSSFTALIYENGPIAFKAEEYNGSIPSLVSTTYAWTKVASILYLDQPVGTGFSYSRNPLADIPSDTGVAKPVNEFLHKWLDKHPEFLSNPLYVAGNSYSGIVIPTIVQEISNGNHLDSKPQINLQGFVLGNPATDTDIDLNSRIPFAHGKALISDEHYESLKRSCQGNYISVNPRNTKCLKLLEDFKKCVSGISEEYILKPDCMWLYSCMANLHSLSEYWANEKSVRKALLVNEGTVRKWIRCNTEIAYNKDIRSSVPYHKYISIEGYRSLVFSGDHDMLVPFLGTQAWIRSLNYSIVDDWRPWMVQNQVAGYTRTYANKMTFATVKGGGHTSEYKPVETYIMIKRWLSGQPL

SEQ ID NO: 71506 - DNA, 678 bp, Arabidopsis thaliana
  misc_feature (1)..(678): Ceres Seq. ID no. 4265244
  misc_feature: MA Experiment ID: 20000306 Result: Down-regulated in Transcription
  misc_feature: MA Experiment 20000306 PARAMETER Experiment Name: At_Germinating_Seeds_Sub_P Parameter: Age (hr) Value: 6 vs. 0
  misc_feature: MA Experiment 20000306 PARAMETER Experiment Name: At_Germinating_Seeds_Sub_P Parameter: Organism Value: A. thaliana
  misc_feature: MA Experiment 20000306 PARAMETER Experiment Name: At_Germinating_Seeds_Sub_P Parameter: Plant Line Value: WS
  misc_feature: MA Experiment 20000306 PARAMETER Experiment Name: At_Germinating_Seeds_Sub_P Parameter: Tissue Value: Germinating Seeds
  misc_feature: MA Experiment ID: 20000307 Result: Down-regulated in Transcription
  misc_feature: MA Experiment 20000307 PARAMETER Experiment Name: At_Germinating_Seeds_Sub_P Parameter: Age (hr) Value: 24 vs. 0
  misc_feature: MA Experiment 20000307 PARAMETER Experiment Name: At_Germinating_Seeds_Sub_P Parameter: Organism Value: A. thaliana
  misc_feature: MA Experiment 20000307 PARAMETER Experiment Name: At_Germinating_Seeds_Sub_P Parameter: Plant Line Value: WS
  misc_feature: MA Experiment 20000307 PARAMETER Experiment Name: At_Germinating_Seeds_Sub_P Parameter: Tissue Value: Germinating Seeds
  misc_feature: MA Experiment ID: 20000315 Result: Down-regulated in Transcription
  misc_feature: MA Experiment 20000315 PARAMETER Experiment Name: At_14day_Shoots-Roots_Sub_P Parameter: Age (day) Value: 14
  misc_feature: MA Experiment 20000315 PARAMETER Experiment Name: At_14day_Shoots-Roots_Sub_P Parameter: Organism Value: A. thaliana
  misc_feature: MA Experiment 20000315 PARAMETER Experiment Name: At_14day_Shoots-Roots_Sub_P Parameter: Plant Line Value: WS
  misc_feature: MA Experiment 20000315 PARAMETER Experiment Name: At_14day_Shoots-Roots_Sub_P Parameter: Tissue Value: Shoots vs. Whole Plant
  misc_feature: MA Experiment ID: 20000328 Result: Down-regulated in Transcription
  misc_feature: MA Experiment 20000328 PARAMETER Experiment Name: At_42deg_Heat_Sub_P Parameter: Age (day) Value: 14
  misc_feature: MA Experiment 20000328 PARAMETER Experiment Name: At_42deg_Heat_Sub_P Parameter: Organism Value: A. thaliana
  misc_feature: MA Experiment 20000328 PARAMETER Experiment Name: At_42deg_Heat_Sub_P Parameter: Plant Line Value: WS
  misc_feature: MA Experiment 20000328 PARAMETER Experiment Name: At_42deg_Heat_Sub_P Parameter: Temperature (deg C) Value: 42 vs. 22
  misc_feature: MA Experiment 20000328 PARAMETER Experiment Name: At_42deg_Heat_Sub_P Parameter: Timepoint (hr) Value: 6
  misc_feature: MA Experiment 20000328 PARAMETER Experiment Name: At_42deg_Heat_Sub_P Parameter: Tissue Value: Aerial
  misc_feature: MA Experiment ID: 20000355 Result: Down-regulated in Transcription
  misc_feature: MA Experiment 20000355 PARAMETER Experiment Name: At_Siliques_Sub_P Parameter: Age (day) Value: 21
  misc_feature: MA Experiment 20000355 PARAMETER Experiment Name: At_Siliques_Sub_P Parameter: Organism Value: A. thaliana
  misc_feature: MA Experiment 20000355 PARAMETER Experiment Name: At_Siliques_Sub_P Parameter: Plant Line Value: WS
  misc_feature: MA Experiment 20000355 PARAMETER Experiment Name: At_Siliques_Sub_P Parameter: Tissue Value: Less Than 5mm Siliques vs. Whole Plant
  misc_feature: MA Experiment ID: 20000440 Result: Down-regulated in Transcription
  misc_feature: MA Experiment 20000440 PARAMETER Experiment Name: At_Closed-Flower__Sub_P Parameter: Tissue Value: Closed Flower vs. Whole Plant
atgggaaacagcattactgtgaagagaaaaagagctaaagtaatgaagatcgacggcgaaactttccgaattaaaactccggtgacggcgagagaagtcaccgcggattatcccggttacgttttgttagattctcaagccgttaaacactttggagttcgctctaagccgcttgaaccgaaccaaaccttgaagccgaaaaagacttattttctcgtcgagcttcctaagcttccaccggagacgacggcggtggatacagaaaataagctaccgtaccggagagtgatgtctggtatccacgttggcgcaaaggagcggttagatatgttgatgttgtctcggagaacggtttctgacgtcacaatcggaagatctgacggtggagatgggtttgggcctgagcttgggcctggacatacgagtgtgaggttgaggttgcctcgttctcagatcacgaagcttatggaagagaataataatgatgcttcggccatagctgagaagattttaggtatctatatggagaggtctggcgagcttggcggcggtagaggtggtgttgacggccgccgggaacttggaagtggggagattaaagcgcgtgagaagcaggtgagtttcgccggagaaggtggacgggagcttcctgttctatggagtagaagtggaaaataa

SEQ ID NO: 71507 - protein, 225 aa, Arabidopsis thaliana
  peptide (1)..(225): Ceres Seq. ID no. 4265245
  misc_feature (1)..(225): Homolog of NCBI NO: 30697354 NR Description: expressed protein [Arabidopsis thaliana]
  misc_feature (1)..(225): Homolog of NCBI NO: 25404626 NR Description: hypothetical protein F28G11.8 [imported] - thaliana >gi|12322258|gb|AAG51153.1|AC074025_3 hypothetical
  misc_feature (1)..(219): Homolog of NCBI NO: 15240363 NR Description: putative protein; protein id: At5g37840.1
MGNSITVKRKRAKVMKIDGETFRIKTPVTAREVTADYPGYVLLDSQAVKHFGVRSKPLEPNQTLKPKKTYFLVELPKLPPETTAVDTENKLPYRRVMSGIHVGAKERLDMLMLSRRTVSDVTIGRSDGGDGFGPELGPGHTSVRLRLPRSQITKLMEENNNDASAIAEKILGIYMERSGELGGGRGGVDGRRELGSGEIKAREKQVSFAGEGGRELPVLWSRSGK

SEQ ID NO: 71508 - protein, 211 aa, Arabidopsis thaliana
  peptide (1)..(211): Ceres Seq. ID no. 4265246
  misc_feature (1)..(211): Homolog of NCBI NO: 30697354 NR Description: expressed protein [Arabidopsis thaliana]
  misc_feature (1)..(211): Homolog of NCBI NO: 25404626 NR Description: hypothetical protein F28G11.8 [imported] - thaliana >gi|12322258|gb|AAG51153.1|AC074025_3 hypothetical
  misc_feature (1)..(205): Homolog of NCBI NO: 15240363 NR Description: putative protein; protein id: At5g37840.1
MKIDGETFRIKTPVTAREVTADYPGYVLLDSQAVKHFGVRSKPLEPNQTLKPKKTYFLVELPKLPPETTAVDTENKLPYRRVMSGIHVGAKERLDMLMLSRRTVSDVTIGRSDGGDGFGPELGPGHTSVRLRLPRSQITKLMEENNNDASAIAEKILGIYMERSGELGGGRGGVDGRRELGSGEIKAREKQVSFAGEGGRELPVLWSRSGK

SEQ ID NO: 71509 - protein, 129 aa, Arabidopsis thaliana
  peptide (1)..(129): Ceres Seq. ID no. 4265247
  misc_feature (1)..(129): Homolog of NCBI NO: 30697354 NR Description: expressed protein [Arabidopsis thaliana]
  misc_feature (1)..(129): Homolog of NCBI NO: 25404626 NR Description: hypothetical protein F28G11.8 [imported] - thaliana >gi|12322258|gb|AAG51153.1|AC074025_3 hypothetical
  misc_feature (1)..(123): Homolog of NCBI NO: 15240363 NR Description: putative protein; protein id: At5g37840.1
MSGIHVGAKERLDMLMLSRRTVSDVTIGRSDGGDGFGPELGPGHTSVRLRLPRSQITKLMEENNNDASAIAEKILGIYMERSGELGGGRGGVDGRRELGSGEIKAREKQVSFAGEGGRELPVLWSRSGK

SEQ ID NO: 71510 - DNA, 1431 bp, Arabidopsis thaliana
  misc_feature (1)..(1431): Ceres Seq. ID no. 4265882
  misc_feature: MA Experiment ID: 20000171 Result: Up-regulated in Transcription
  misc_feature: MA Experiment 20000171 PARAMETER Experiment Name: At_42deg_Heat_P Parameter: Age (day) Value: 14
  misc_feature: MA Experiment 20000171 PARAMETER Experiment Name: At_42deg_Heat_P Parameter: Organism Value: A. thaliana
  misc_feature: MA Experiment 20000171 PARAMETER Experiment Name: At_42deg_Heat_P Parameter: Plant Line Value: WS
  misc_feature: MA Experiment 20000171 PARAMETER Experiment Name: At_42deg_Heat_P Parameter: Temperature (deg C) Value: 42 vs. 22
  misc_feature: MA Experiment 20000171 PARAMETER Experiment Name: At_42deg_Heat_P Parameter: Timepoint (hr) Value: 1
  misc_feature: MA Experiment 20000171 PARAMETER Experiment Name: At_42deg_Heat_P Parameter: Tissue Value: Aerial
  misc_feature: MA Experiment ID: 20000173 Result: Up-regulated in Transcription
  misc_feature: MA Experiment 20000173 PARAMETER Experiment Name: At_42deg_Heat_P Parameter: Age (day) Value: 14
  misc_feature: MA Experiment 20000173 PARAMETER Experiment Name: At_42deg_Heat_P Parameter: Organism Value: A. thaliana
  misc_feature: MA Experiment 20000173 PARAMETER Experiment Name: At_42deg_Heat_P Parameter: Plant Line Value: WS
  misc_feature: MA Experiment 20000173 PARAMETER Experiment Name: At_42deg_Heat_P Parameter: Temperature (deg C) Value: 42 vs. 22
  misc_feature: MA Experiment 20000173 PARAMETER Experiment Name: At_42deg_Heat_P Parameter: Timepoint (hr) Value: 6
  misc_feature: MA Experiment 20000173 PARAMETER Experiment Name: At_42deg_Heat_P Parameter: Tissue Value: Aerial
  misc_feature: MA Experiment ID: 20000184 Result: Down-regulated in Transcription
  misc_feature: MA Experiment 20000184 PARAMETER Experiment Name: At_Shoots__P Parameter: Age (day) Value: 7
  misc_feature: MA Experiment 20000184 PARAMETER Experiment Name: At_Shoots__P Parameter: Tissue Value: Shoots vs. Whole Plant
  misc_feature: MA Experiment ID: 20000227 Result: Down-regulated in Transcription
  misc_feature: MA Experiment 20000227 PARAMETER Experiment Name: At_Root-Tips-vs-Tops_P Parameter: Tissue Value: Root Tips vs. Root Tops
  misc_feature: MA Experiment ID: 20000443 Result: Up-regulated in Transcription
  misc_feature: MA Experiment 20000443 PARAMETER Experiment Name: At_1uM_BR-BRZ__P Parameter: Tissue Value: Shoot Apices
  misc_feature: MA Experiment 20000443 PARAMETER Experiment Name: At_1uM_BR-BRZ__P Parameter: Treatment Value: 1uM BRZ vs. No Treatment
  misc_feature: MA Experiment ID: 20001248 Result: Down-regulated in Transcription
  misc_feature: MA Experiment 20001248 PARAMETER Experiment Name: At_Far-red-induction_P Parameter: Age (day) Value: 7
  misc_feature: MA Experiment 20001248 PARAMETER Experiment Name: At_Far-red-induction_P Parameter: Light Value: Far-red vs. White
  misc_feature: MA Experiment 20001248 PARAMETER Experiment Name: At_Far-red-induction_P Parameter: Organism Value: A. thaliana
  misc_feature: MA Experiment 20001248 PARAMETER Experiment Name: At_Far-red-induction_P Parameter: Plant Line Value: Columbia
  misc_feature: MA Experiment 20001248 PARAMETER Experiment Name: At_Far-red-induction_P Parameter: Timepoint (hr) Value: 4
  misc_feature: MA Experiment 20001248 PARAMETER Experiment Name: At_Far-red-induction_P Parameter: Tissue Value: Whole Plant
  misc_feature: MA Experiment ID: 20001451 Result: Down-regulated in Transcription
  misc_feature: MA Experiment 20001451 PARAMETER Experiment Name: At_Far-red-induction_P Parameter: Age (day) Value: 7
  misc_feature: MA Experiment 20001451 PARAMETER Experiment Name: At_Far-red-induction_P Parameter: Light Value: Far-red vs. White
  misc_feature: MA Experiment 20001451 PARAMETER Experiment Name: At_Far-red-induction_P Parameter: Organism Value: A. thaliana
  misc_feature: MA Experiment 20001451 PARAMETER Experiment Name: At_Far-red-induction_P Parameter: Plant Line Value: Columbia
  misc_feature: MA Experiment 20001451 PARAMETER Experiment Name: At_Far-red-induction_P Parameter: Timepoint (hr) Value: 24
  misc_feature: MA Experiment 20001451 PARAMETER Experiment Name: At_Far-red-induction_P Parameter: Tissue Value: Whole Plant
atggctaggtcaccgagcaaacacggccgcgatcaaactcaggatttccagggatttttcaatgacttgcaggattgggaactctcattgaaggataaagacaagaagattaagcaacaacctgctaattcgtcgaatccgagtagtgagacgttcagaccaagtgggtcagggaaatatgactttgctaaaaagtatcgttccattagggatttgtcgagtagtttgattggagaaagtctattggattctagttcagagaaggagcagggtaatgaattcttcaagcagaagaagttcaatgaggcgattgattgttactctcggagcattgctttatcgccaaatgctgtgacttatgcaaatcgagcaatggcttaccttaaaatcaaaagatatcgagaggctgaggttgactgcacagaagctttaaatctggatgatcgatatataaaagcttactcacgccgagcaacagcaagaaaagaactcggcatgattaaagaagccaaagaagatgctgagtttgccttaagattggagcctgagagccaggaacttaagaagcaatatgccgatatcaaatctttgctcgagaaagaaatcattgagaaagccactggagcaatgcaaagcactgcacaagaattactcaaaacatcaggtttagataagaaaatacaaaagccaaagacagaaatgacttcaaagccagtgaccctagtggccaaaacgaacagggatattgttcagcctgttctaggtagcaatgaaagttcgggaaagaagctcattgaaaatatacaacctgaggagaaaagcaaagaaggttccatgaaaattccagctatcacggaaattctagacagcaagaaagtgacgcctggaagccaaagttatgaaaaggaggcgaagccttctgacagaaatggtactcagccttctggaccggaaaaccaggtttctaaacagctggaactaaagccatcagtacaagagcttgctgctcatgcagcgtcacttgcgatgactgaagcttctaaaaacattaaaaccccaaaatctgcttacgaatttgagaactcttggcggagtttttccggcgacagtgccctacgaagccaattgttgaaggtcacgactccgagctctttacctcagattttcaagaacgccctgacctctccggtgctggttgacataatcaaatgtgtagcctcattcttcactgaagacatggatttggcagttaaatacattgagaacctaacaaaggttcctagattcaacatgctcgtcatgtgccttacctcaaccgagaaaaacgagctactgaagatatgggaagatgttttctgcaataaagcaaccccaatggagtatgcagaggtcttagacaaactaaggtcaagatactgccttaaacagtaa

SEQ ID NO: 71511 - protein, 476 aa, Arabidopsis thaliana
  peptide (1)..(476): Ceres Seq. ID no. 4265883
  misc_feature (84)..(117): Pfam Name: TPR Domain Pfam Description: TPR Domain
  misc_feature (1)..(223): Homolog of NCBI NO: 15223536 NR Description: hypothetical protein; protein id: At1g56440.1
  misc_feature (23)..(441): Homolog of NCBI NO: 13375809 NR Description: hypothetical protein FLJ21908 [Homo sapiens]
  misc_feature (23)..(472): Homolog of NCBI NO: 13386276 NR Description: RIKEN cDNA 2310042P20 [Mus musculus] unnamed protein product [Mus musculus]
  misc_feature (23)..(212): Homolog of NCBI NO: 33989661 NR Description: Unknown (protein for MGC:64954) [Homo sapiens]
  misc_feature (10)..(395): Homolog of NCBI NO: 27819855 NR Description: RE03224p [Drosophila melanogaster]
  misc_feature (10)..(395): Homolog of NCBI NO: 17864228 NR Description: spaghetti CG13570-PA [Drosophila melanogaster]
  misc_feature (33)..(216): Homolog of NCBI NO: 28277896 NR Description: Similar to hypothetical protein FLJ21908 [Danio
  misc_feature (88)..(206): Homolog of NCBI NO: 567040 NR Description: phosphoprotein phosphatase [Mus musculus]
  misc_feature (88)..(206): Homolog of NCBI NO: 3212250 NR Description: Tetratricopeptide Repeats Of Protein Phosphatase 5
  misc_feature (131)..(472): Homolog of NCBI NO: 34868119 NR Description: similar to RIKEN cDNA 2310042P20 [Rattus
MARSPSKHGRDQTQDFQGFFNDLQDWELSLKDKDKKIKQQPANSSNPSSETFRPSGSGKYDFAKKYRSIRDLSSSLIGESLLDSSSEKEQGNEFFKQKKFNEAIDCYSRSIALSPNAVTYANRAMAYLKIKRYREAEVDCTEALNLDDRYIKAYSRRATARKELGMIKEAKEDAEFALRLEPESQELKKQYADIKSLLEKEIIEKATGAMQSTAQELLKTSGLDKKIQKPKTEMTSKPVTLVAKTNRDIVQPVLGSNESSGKKLIENIQPEEKSKEGSMKIPAITEILDSKKVTPGSQSYEKEAKPSDRNGTQPSGPENQVSKQLELKPSVQELAAHAASLAMTEASKNIKTPKSAYEFENSWRSFSGDSALRSQLLKVTTPSSLPQIFKNALTSPVLVDIIKCVASFFTEDMDLAVKYIENLTKVPRFNMLVMCLTSTEKNELLKIWEDVFCNKATPMEYAEVLDKLRSRYCLKQ

SEQ ID NO: 71512 - protein, 352 aa, Arabidopsis thaliana
  peptide (1)..(352): Ceres Seq. ID no. 4265884
  misc_feature (1)..(99): Homolog of NCBI NO: 15223536 NR Description: hypothetical protein; protein id: At1g56440.1
  misc_feature (1)..(317): Homolog of NCBI NO: 13375809 NR Description: hypothetical protein FLJ21908 [Homo sapiens]
  misc_feature (1)..(348): Homolog of NCBI NO: 13386276 NR Description: RIKEN cDNA 2310042P20 [Mus musculus] unnamed protein product [Mus musculus]
  misc_feature (1)..(88): Homolog of NCBI NO: 33989661 NR Description: Unknown (protein for MGC:64954) [Homo sapiens]
  misc_feature (1)..(271): Homolog of NCBI NO: 27819855 NR Description: RE03224p [Drosophila melanogaster]
  misc_feature (1)..(271): Homolog of NCBI NO: 17864228 NR Description: spaghetti CG13570-PA [Drosophila melanogaster]
  misc_feature (1)..(92): Homolog of NCBI NO: 28277896 NR Description: Similar to hypothetical protein FLJ21908 [Danio
  misc_feature (1)..(82): Homolog of NCBI NO: 567040 NR Description: phosphoprotein phosphatase [Mus musculus]
  misc_feature (1)..(82): Homolog of NCBI NO: 3212250 NR Description: Tetratricopeptide Repeats Of Protein Phosphatase 5
  misc_feature (7)..(348): Homolog of NCBI NO: 34868119 NR Description: similar to RIKEN cDNA 2310042P20 [Rattus
MAYLKIKRYREAEVDCTEALNLDDRYIKAYSRRATARKELGMIKEAKEDAEFALRLEPESQELKKQYADIKSLLEKEIIEKATGAMQSTAQELLKTSGLDKKIQKPKTEMTSKPVTLVAKTNRDIVQPVLGSNESSGKKLIENIQPEEKSKEGSMKIPAITEILDSKKVTPGSQSYEKEAKPSDRNGTQPSGPENQVSKQLELKPSVQELAAHAASLAMTEASKNIKTPKSAYEFENSWRSFSGDSALRSQLLKVTTPSSLPQIFKNALTSPVLVDIIKCVASFFTEDMDLAVKYIENLTKVPRFNMLVMCLTSTEKNELLKIWEDVFCNKATPMEYAEVLDKLRSRYCLKQ

SEQ ID NO: 71513 - protein, 311 aa, Arabidopsis thaliana
  peptide (1)..(311): Ceres Seq. ID no. 4265885
  misc_feature (1)..(58): Homolog of NCBI NO: 15223536 NR Description: hypothetical protein; protein id: At1g56440.1
  misc_feature (1)..(276): Homolog of NCBI NO: 13375809 NR Description: hypothetical protein FLJ21908 [Homo sapiens]
  misc_feature (1)..(307): Homolog of NCBI NO: 13386276 NR Description: RIKEN cDNA 2310042P20 [Mus musculus] unnamed protein product [Mus musculus]
  misc_feature (1)..(47): Homolog of NCBI NO: 33989661 NR Description: Unknown (protein for MGC:64954) [Homo sapiens]
  misc_feature (1)..(230): Homolog of NCBI NO: 27819855 NR Description: RE03224p [Drosophila melanogaster]
  misc_feature (1)..(230): Homolog of NCBI NO: 17864228 NR Description: spaghetti CG13570-PA [Drosophila melanogaster]
  misc_feature (1)..(51): Homolog of NCBI NO: 28277896 NR Description: Similar to hypothetical protein FLJ21908 [Danio
  misc_feature (1)..(41): Homolog of NCBI NO: 567040 NR Description: phosphoprotein phosphatase [Mus musculus]
  misc_feature (1)..(41): Homolog of NCBI NO: 3212250 NR Description: Tetratricopeptide Repeats Of Protein Phosphatase 5
  misc_feature (1)..(307): Homolog of NCBI NO: 34868119 NR Description: similar to RIKEN cDNA 2310042P20 [Rattus
MIKEAKEDAEFALRLEPESQELKKQYADIKSLLEKEIIEKATGAMQSTAQELLKTSGLDKKIQKPKTEMTSKPVTLVAKTNRDIVQPVLGSNESSGKKLIENIQPEEKSKEGSMKIPAITEILDSKKVTPGSQSYEKEAKPSDRNGTQPSGPENQVSKQLELKPSVQELAAHAASLAMTEASKNIKTPKSAYEFENSWRSFSGDSALRSQLLKVTTPSSLPQIFKNALTSPVLVDIIKCVASFFTEDMDLAVKYIENLTKVPRFNMLVMCLTSTEKNELLKIWEDVFCNKATPMEYAEVLDKLRSRYCLKQ

SEQ ID NO: 71514 - DNA, 2250 bp, Arabidopsis thaliana
  misc_feature (1)..(2250): Ceres Seq. ID no. 4266693
  misc_feature: MA Experiment ID: 20000184 Result: Down-regulated in Transcription
  misc_feature: MA Experiment 20000184 PARAMETER Experiment Name: At_Shoots__P Parameter: Age (day) Value: 7
  misc_feature: MA Experiment 20000184 PARAMETER Experiment Name: At_Shoots__P Parameter: Tissue Value: Shoots vs. Whole Plant
  misc_feature: MA Experiment ID: 20000227 Result: Up-regulated in Transcription
  misc_feature: MA Experiment 20000227 PARAMETER Experiment Name: At_Root-Tips-vs-Tops_P Parameter: Tissue Value: Root Tips vs. Root Tops
  misc_feature: MA Experiment ID: 20000495 Result: Down-regulated in Transcription
  misc_feature: MA Experiment 20000495 PARAMETER Experiment Name: At_Guard_Cells_P Parameter: Harvest Date Value: 8/2/2002
  misc_feature: MA Experiment 20000495 PARAMETER Experiment Name: At_Guard_Cells_P Parameter: Organism Value: A. thaliana
  misc_feature: MA Experiment 20000495 PARAMETER Experiment Name: At_Guard_Cells_P Parameter: Tissue Value: Guard Cells vs. Leaves
  misc_feature: MA Experiment ID: 20001247 Result: Up-regulated in Transcription
  misc_feature: MA Experiment 20001247 PARAMETER Experiment Name: At_Far-red-induction_P Parameter: Age (day) Value: 7
  misc_feature: MA Experiment 20001247 PARAMETER Experiment Name: At_Far-red-induction_P Parameter: Light Value: Far-red vs. White
  misc_feature: MA Experiment 20001247 PARAMETER Experiment Name: At_Far-red-induction_P Parameter: Organism Value: A. thaliana
  misc_feature: MA Experiment 20001247 PARAMETER Experiment Name: At_Far-red-induction_P Parameter: Plant Line Value: Columbia
  misc_feature: MA Experiment 20001247 PARAMETER Experiment Name: At_Far-red-induction_P Parameter: Timepoint (hr) Value: 1
  misc_feature: MA Experiment 20001247 PARAMETER Experiment Name: At_Far-red-induction_P Parameter: Tissue Value: Whole Plant
  misc_feature: MA Experiment ID: 20001451 Result: Down-regulated in Transcription
  misc_feature: MA Experiment 20001451 PARAMETER Experiment Name: At_Far-red-induction_P Parameter: Age (day) Value: 7
  misc_feature: MA Experiment 20001451 PARAMETER Experiment Name: At_Far-red-induction_P Parameter: Light Value: Far-red vs. White
  misc_feature: MA Experiment 20001451 PARAMETER Experiment Name: At_Far-red-induction_P Parameter: Organism Value: A. thaliana
  misc_feature: MA Experiment 20001451 PARAMETER Experiment Name: At_Far-red-induction_P Parameter: Plant Line Value: Columbia
  misc_feature: MA Experiment 20001451 PARAMETER Experiment Name: At_Far-red-induction_P Parameter: Timepoint (hr) Value: 24
  misc_feature: MA Experiment 20001451 PARAMETER Experiment Name: At_Far-red-induction_P Parameter: Tissue Value: Whole Plant
atggcggctaacaaattcgcgactctgattcatcggaaaacaaaccgaatcactttaatcctcgtatacgcttttctcgaatggtcactcattttcttcattttgctcaactctctcttttcttatttcatactcagattcgctgattatttcggtcttaaacgtccttgtctcttctgctctagactcgatcgtttcttcgatgcttctggtaaatctccttctcatcgagatcttctctgcgatgatcatgctctccaattacattcaaaacctgttgaagaatctaattgtggtttcggagaatttcacaatgatttggttcatcgtggttgttgcgtagagaagataagttcgtcactatgtgctccgattgagtctgactttgggaatttagattatccaattggagatgaaggtcagatttacaatggtcttaagtttcctcgatcgatcttcgtctttgaagaagagaaagtaggatctgtaaatttgaatgattctcaggaagaaacagaggagaagaaagttccccaatctcatgagaaacttgaagatgatgatgttgatgaggagttttcatgctatgtatcaagcttcgattgtaagaacaaagaaattgcaacagagaaggaagaagaaaacagagtggatctacctatagaggtggaaactgcagaatcagctccgaaaaacctcgagttctatattgatgaagaagactgtcatttgattccagttgaattctataaaccgagtgaagaagttcgagagatttccgacattaacggagattttatcctcgatttcggcgttgagcatgatttcacggcggcggcggagacggaggaaatctccgactttgcttcgccgggtgaatcgaaaccggaggatgcagagacgaatctagttgcttcggaaatggaaaacgacgacgaagaaacagacgcagaggtttctataggtacagagattcctgatcatgagcaaatcggagatattccttctcaccagctcattcctcaccacgatgacgatgatcatgaggaggaaacgttggagttcaaaacagtaacgattgaaaccaagatgccagtcttaaacatcaacgaagagcggattttagaagctcaaggctcgatggaaagctcgcatagtagtctacataacgctatgtttcacttagagcaaagagtatctgttgatggtattgaatgtcctgaaggagtactcactgttgataagttgaagtttgagttacaagaagagagaaaagcacttcacgcgttatacgaggagctggaggtagagaggaatgcgtctgctgttgctgccagtgaaacaatggcgatgatcaataggttgcatgaggagaaagctgcgatgcagatggaagcgttgcagtatcagagaatgatggaggagcaagctgagtttgatcaagaagctttgcagttgttgaatgagcttatggtgaatagagagaaggagaatgctgagcttgagaaggagctagaggtgtatagaaagagaatggaggagtatgaagctaaagagaaaatggggatgttgaggaggagattgagagattcctctgttgattcgtatagaaataatggcgattctgatgagaatagcaatggagagttacagtttaagaacgttgaaggggttacggattggaaatatagagagaatgagatggagaatacgccggtggatgttgtacttcgtcttgatgagtgtttagatgattatgatggagagaggctttcgattcttgggagattgaagtttcttgaagagaaactcacagatcttaataacgaagaggacgacgaggaggaggctaaaacgtttgagagtaatggtagcatcaatggaaatgagcatattcatggcaaagaaacaaacgggaagcacagagttatcaagtcaaagagattacttcccctgtttgatgcggtcgatggagagatggaaaacgggttaagtaacggaaaccatcacgaaaacgggtttgatgattcggagaagggtgagaatgtgacgatagaagaagaagtggatgagctttacgagaggttagaagctctagaggcagatagagagttcttaagacattgtgttggttcattgaaaaaaggagacaaaggtgtacatctcctccatgagattctgcaacatcttcgtgatctaaggaatatcgatcttactcgcgtcagagaaaacggagacatgagtttatga

SEQ ID NO: 71515 - protein, 749 aa, Arabidopsis thaliana
  peptide (1)..(749): Ceres Seq. ID no. 4266694
  misc_feature (413)..(506): Pfam Name: Protein of unknown function, DUF593 Pfam Description: Protein of unknown function, DUF593
  misc_feature (308)..(749): Homolog of NCBI NO: 18409667 NR Description: expressed protein; protein id: At1g70750.1,
  misc_feature (308)..(558): Homolog of NCBI NO: 4101564 NR Description: IFA-binding protein [Arabidopsis thaliana]
  misc_feature (235)..(697): Homolog of NCBI NO: 30685989 NR Description: expressed protein [Arabidopsis thaliana]
  misc_feature (1)..(135): Homolog of NCBI NO: 30685989 NR Description: expressed protein [Arabidopsis thaliana]
  misc_feature (235)..(697): Homolog of NCBI NO: 11357812 NR Description: hypothetical protein F5E19_60 - Arabidopsis >gi|9755724|emb|CAC01836.1| putative protein [Arabidopsis
  misc_feature (1)..(58): Homolog of NCBI NO: 11357812 NR Description: hypothetical protein F5E19_60 - Arabidopsis >gi|9755724|emb|CAC01836.1| putative protein [Arabidopsis
  misc_feature (166)..(692): Homolog of NCBI NO: 13702818 NR Description: unknown protein [Oryza sativa]
  misc_feature (12)..(127): Homolog of NCBI NO: 13702818 NR Description: unknown protein [Oryza sativa]
  misc_feature (219)..(748): Homolog of NCBI NO: 13702818 NR Description: unknown protein [Oryza sativa]
  misc_feature (156)..(524): Homolog of NCBI NO: 15224552 NR Description: unknown protein; protein id: At2g30690.1
MAANKFATLIHRKTNRITLILVYAFLEWSLIFFILLNSLFSYFILRFADYFGLKRPCLFCSRLDRFFDASGKSPSHRDLLCDDHALQLHSKPVEESNCGFGEFHNDLVHRGCCVEKISSSLCAPIESDFGNLDYPIGDEGQIYNGLKFPRSIFVFEEEKVGSVNLNDSQEETEEKKVPQSHEKLEDDDVDEEFSCYVSSFDCKNKEIATEKEEENRVDLPIEVETAESAPKNLEFYIDEEDCHLIPVEFYKPSEEVREISDINGDFILDFGVEHDFTAAAETEEISDFASPGESKPEDAETNLVASEMENDDEETDAEVSIGTEIPDHEQIGDIPSHQLIPHHDDDDHEEETLEFKTVTIETKMPVLNINEERILEAQGSMESSHSSLHNAMFHLEQRVSVDGIECPEGVLTVDKLKFELQEERKALHALYEELEVERNASAVAASETMAMINRLHEEKAAMQMEALQYQRMMEEQAEFDQEALQLLNELMVNREKENAELEKELEVYRKRMEEYEAKEKMGMLRRRLRDSSVDSYRNNGDSDENSNGELQFKNVEGVTDWKYRENEMENTPVDVVLRLDECLDDYDGERLSILGRLKFLEEKLTDLNNEEDDEEEAKTFESNGSINGNEHIHGKETNGKHRVIKSKRLLPLFDAVDGEMENGLSNGNHHENGFDDSEKGENVTIEEEVDELYERLEALEADREFLRHCVGSLKKGDKGVHLLHEILQHLRDLRNIDLTRVRENGDMSL

SEQ ID NO: 71516 - protein, 442 aa, Arabidopsis thaliana
  peptide (1)..(442): Ceres Seq. ID no. 4266695
  misc_feature (106)..(199): Pfam Name: Protein of unknown function, DUF593 Pfam Description: Protein of unknown function, DUF593
  misc_feature (1)..(442): Homolog of NCBI NO: 18409667 NR Description: expressed protein; protein id: At1g70750.1,
  misc_feature (1)..(251): Homolog of NCBI NO: 4101564 NR Description: IFA-binding protein [Arabidopsis thaliana]
  misc_feature (1)..(390): Homolog of NCBI NO: 30685989 NR Description: expressed protein [Arabidopsis thaliana]
  misc_feature (1)..(390): Homolog of NCBI NO: 11357812 NR Description: hypothetical protein F5E19_60 - Arabidopsis >gi|9755724|emb|CAC01836.1| putative protein [Arabidopsis
  misc_feature (1)..(385): Homolog of NCBI NO: 13702818 NR Description: unknown protein [Oryza sativa]
  misc_feature (1)..(441): Homolog of NCBI NO: 13702818 NR Description: unknown protein [Oryza sativa]
  misc_feature (1)..(217): Homolog of NCBI NO: 15224552 NR Description: unknown protein; protein id: At2g30690.1
  misc_feature (70)..(305): Homolog of NCBI NO: 25406384 NR Description: hypothetical protein F9E10.32 [imported] - thaliana >gi|5882740|gb|AAD55293.1|AC008263_24 F25A4.20
  misc_feature (70)..(305): Homolog of NCBI NO: 26451391 NR Description: unknown protein [Arabidopsis thaliana]
  misc_feature (70)..(305): Homolog of NCBI NO: 30699047 NR Description: expressed protein [Arabidopsis thaliana]
MENDDEETDAEVSIGTEIPDHEQIGDIPSHQLIPHHDDDDHEEETLEFKTVTIETKMPVLNINEERILEAQGSMESSHSSLHNAMFHLEQRVSVDGIECPEGVLTVDKLKFELQEERKALHALYEELEVERNASAVAASETMAMINRLHEEKAAMQMEALQYQRMMEEQAEFDQEALQLLNELMVNREKENAELEKELEVYRKRMEEYEAKEKMGMLRRRLRDSSVDSYRNNGDSDENSNGELQFKNVEGVTDWKYRENEMENTPVDVVLRLDECLDDYDGERLSILGRLKFLEEKLTDLNNEEDDEEEAKTFESNGSINGNEHIHGKETNGKHRVIKSKRLLPLFDAVDGEMENGLSNGNHHENGFDDSEKGENVTIEEEVDELYERLEALEADREFLRHCVGSLKKGDKGVHLLHEILQHLRDLRNIDLTRVRENGDMSL

SEQ ID NO: 71517 - protein, 386 aa, Arabidopsis thaliana
  peptide (1)..(386): Ceres Seq. ID no. 4266696
  misc_feature (50)..(143): Pfam Name: Protein of unknown function, DUF593 Pfam Description: Protein of unknown function, DUF593
  misc_feature (1)..(386): Homolog of NCBI NO: 18409667 NR Description: expressed protein; protein id: At1g70750.1,
  misc_feature (1)..(195): Homolog of NCBI NO: 4101564 NR Description: IFA-binding protein [Arabidopsis thaliana]
  misc_feature (1)..(334): Homolog of NCBI NO: 30685989 NR Description: expressed protein [Arabidopsis thaliana]
  misc_feature (1)..(334): Homolog of NCBI NO: 11357812 NR Description: hypothetical protein F5E19_60 - Arabidopsis >gi|9755724|emb|CAC01836.1| putative protein [Arabidopsis
  misc_feature (1)..(329): Homolog of NCBI NO: 13702818 NR Description: unknown protein [Oryza sativa]
  misc_feature (1)..(385): Homolog of NCBI NO: 13702818 NR Description: unknown protein [Oryza sativa]
  misc_feature (1)..(161): Homolog of NCBI NO: 15224552 NR Description: unknown protein; protein id: At2g30690.1
  misc_feature (14)..(249): Homolog of NCBI NO: 25406384 NR Description: hypothetical protein F9E10.32 [imported] - thaliana >gi|5882740|gb|AAD55293.1|AC008263_24 F25A4.20
  misc_feature (14)..(249): Homolog of NCBI NO: 26451391 NR Description: unknown protein [Arabidopsis thaliana]
  misc_feature (14)..(249): Homolog of NCBI NO: 30699047 NR Description: expressed protein [Arabidopsis thaliana]
MPVLNINEERILEAQGSMESSHSSLHNAMFHLEQRVSVDGIECPEGVLTVDKLKFELQEERKALHALYEELEVERNASAVAASETMAMINRLHEEKAAMQMEALQYQRMMEEQAEFDQEALQLLNELMVNREKENAELEKELEVYRKRMEEYEAKEKMGMLRRRLRDSSVDSYRNNGDSDENSNGELQFKNVEGVTDWKYRENEMENTPVDVVLRLDECLDDYDGERLSILGRLKFLEEKLTDLNNEEDDEEEAKTFESNGSINGNEHIHGKETNGKHRVIKSKRLLPLFDAVDGEMENGLSNGNHHENGFDDSEKGENVTIEEEVDELYERLEALEADREFLRHCVGSLKKGDKGVHLLHEILQHLRDLRNIDLTRVRENGDMSL

SEQ ID NO: 71518 - DNA, 1050 bp, Arabidopsis thaliana
  misc_feature (1)..(1050): Ceres Seq. ID no. 4267268
  misc_feature: MA Experiment ID: 20000315 Result: Up-regulated in Transcription
  misc_feature: MA Experiment 20000315 PARAMETER Experiment Name: At_14day_Shoots-Roots_Sub_P Parameter: Age (day) Value: 14
  misc_feature: MA Experiment 20000315 PARAMETER Experiment Name: At_14day_Shoots-Roots_Sub_P Parameter: Organism Value: A. thaliana
  misc_feature: MA Experiment 20000315 PARAMETER Experiment Name: At_14day_Shoots-Roots_Sub_P Parameter: Plant Line Value: WS
  misc_feature: MA Experiment 20000315 PARAMETER Experiment Name: At_14day_Shoots-Roots_Sub_P Parameter: Tissue Value: Shoots vs. Whole Plant
  misc_feature: MA Experiment ID: 20000328 Result: Down-regulated in Transcription
  misc_feature: MA Experiment 20000328 PARAMETER Experiment Name: At_42deg_Heat_Sub_P Parameter: Age (day) Value: 14
  misc_feature: MA Experiment 20000328 PARAMETER Experiment Name: At_42deg_Heat_Sub_P Parameter: Organism Value: A. thaliana
  misc_feature: MA Experiment 20000328 PARAMETER Experiment Name: At_42deg_Heat_Sub_P Parameter: Plant Line Value: WS
  misc_feature: MA Experiment 20000328 PARAMETER Experiment Name: At_42deg_Heat_Sub_P Parameter: Temperature (deg C) Value: 42 vs. 22
  misc_feature: MA Experiment 20000328 PARAMETER Experiment Name: At_42deg_Heat_Sub_P Parameter: Timepoint (hr) Value: 6
  misc_feature: MA Experiment 20000328 PARAMETER Experiment Name: At_42deg_Heat_Sub_P Parameter: Tissue Value: Aerial
atgaagattcaaattatatggctcactttggttttaatcgtcgttgaagctaatgcagtcaaacaagggaaaaacgcaacgatcccggccctaatagtttttggagattcaataatggatacaggaaataacaataatcttcccactcttcttaaatgtaacttccctccatacggtaaagattatcctggaggctttgccactggaagattttctgatggaagagttccttctgatcttattgcggaaaaaataggattggctaagacattaccagcatatatgaatccatatttgaagccagaggatcttcttaaaggtgtaacatttgcatcaggaggaactggttatgatccattgacagcaaaaattatgtcagtgatatcagtgtgggatcaactcatatatttcaaagaatatatatcaaagatcaagaggcatttcggagaagaaaaagcaaaagatatcttggaacatagtttctttcttgtggtgtctagtagcaatgaccttgctcacacttatttagctcaagctcatagatatgatcgtacctcttatgccaatttcttggctgactctgctgttcatttcgtgagagaattacacaagcttggagctcaaaaaattggagtgtttagtgcagtccctgttggttgtgttccactccaaagaacagtttttggaggtttttttacaagaggatgtaatcaacctctaaacaacatggcaaaacaattcaacgcaagactttctccagcactagattctttagataaagagttggatggtgttatcctttacattaatgtttatgatactcttttcgacatgatccaacaccctaaaaaatacggttttgaagtggctgatagaggatgttgcggtaaaggactgctcacgatctcctatttatgtaactcattgaaccaatttacgtgttctaactcttcagcttatatattttgggatagctatcatccaagtaaaagagcttatcaagttattgtcgacaatttacttgacaaatatttgagcaaagtatattga

SEQ ID NO: 71519 - protein, 349 aa, Arabidopsis thaliana
  peptide (1)..(349): Ceres Seq. ID no. 4267269
  misc_feature (31)..(340): Pfam Name: GDSL-like Lipase/Acylhydrolase Pfam Description: GDSL-like Lipase/Acylhydrolase
  misc_feature (1)..(229): Homolog of NCBI NO: 15229719 NR Description: putative protein; protein id: At3g43570.1 thaliana] >gi|9967506|emb|CAC05631.1| putative protein
  misc_feature (259)..(349): Homolog of NCBI NO: 15229719 NR Description: putative protein; protein id: At3g43570.1 thaliana] >gi|9967506|emb|CAC05631.1| putative protein
  misc_feature (39)..(229): Homolog of NCBI NO: 22330312 NR Description: similar to proline-rich protein, putative;
  misc_feature (259)..(349): Homolog of NCBI NO: 22330312 NR Description: similar to proline-rich protein, putative;
  misc_feature (1)..(349): Homolog of NCBI NO: 18406327 NR Description: proline-rich protein, putative; protein id:
  misc_feature (1)..(349): Homolog of NCBI NO: 15217977 NR Description: proline-rich protein, putative; protein id:
  misc_feature (1)..(202): Homolog of NCBI NO: 15229307 NR Description: putative protein; protein id: At3g43550.1
  misc_feature (39)..(344): Homolog of NCBI NO: 15231934 NR Description: hypothetical protein; protein id: At3g14820.1
  misc_feature (6)..(347): Homolog of NCBI NO: 15222901 NR Description: family II extracellular lipase 3 (EXL3); protein At1g75900.1, supported by cDNA: gi_15054385 [Arabidopsis >gi|15054386|gb|AAK30018.1| family II lipase EXL3 [Arabidopsis
  misc_feature (6)..(347): Homolog of NCBI NO: 26449364 NR Description: putative family II lipase EXL3 [Arabidopsis
MKIQIIWLTLVLIVVEANAVKQGKNATIPALIVFGDSIMDTGNNNNLPTLLKCNFPPYGKDYPGGFATGRFSDGRVPSDLIAEKIGLAKTLPAYMNPYLKPEDLLKGVTFASGGTGYDPLTAKIMSVISVWDQLIYFKEYISKIKRHFGEEKAKDILEHSFFLVVSSSNDLAHTYLAQAHRYDRTSYANFLADSAVHFVRELHKLGAQKIGVFSAVPVGCVPLQRTVFGGFFTRGCNQPLNNMAKQFNARLSPALDSLDKELDGVILYINVYDTLFDMIQHPKKYGFEVADRGCCGKGLLTISYLCNSLNQFTCSNSSAYIFWDSYHPSKRAYQVIVDNLLDKYLSKVY

SEQ ID NO: 71520 - protein, 311 aa, Arabidopsis thaliana
  peptide (1)..(311): Ceres Seq. ID no. 4267270
  misc_feature (1)..(302): Pfam Name: GDSL-like Lipase/Acylhydrolase Pfam Description: GDSL-like Lipase/Acylhydrolase
  misc_feature (1)..(311): Homolog of NCBI NO: 18406327 NR Description: proline-rich protein, putative; protein id:
  misc_feature (1)..(311): Homolog of NCBI NO: 15217977 NR Description: proline-rich protein, putative; protein id:
  misc_feature (1)..(191): Homolog of NCBI NO: 15229719 NR Description: putative protein; protein id: At3g43570.1 thaliana] >gi|9967506|emb|CAC05631.1| putative protein
  misc_feature (221)..(311): Homolog of NCBI NO: 15229719 NR Description: putative protein; protein id: At3g43570.1 thaliana] >gi|9967506|emb|CAC05631.1| putative protein
  misc_feature (1)..(191): Homolog of NCBI NO: 22330312 NR Description: similar to proline-rich protein, putative;
  misc_feature (221)..(311): Homolog of NCBI NO: 22330312 NR Description: similar to proline-rich protein, putative;
  misc_feature (1)..(164): Homolog of NCBI NO: 15229307 NR Description: putative protein; protein id: At3g43550.1
  misc_feature (1)..(306): Homolog of NCBI NO: 15231934 NR Description: hypothetical protein; protein id: At3g14820.1
  misc_feature (1)..(309): Homolog of NCBI NO: 15222901 NR Description: family II extracellular lipase 3 (EXL3); protein At1g75900.1, supported by cDNA: gi_15054385 [Arabidopsis >gi|15054386|gb|AAK30018.1| family II lipase EXL3 [Arabidopsis
  misc_feature (1)..(309): Homolog of NCBI NO: 26449364 NR Description: putative family II lipase EXL3 [Arabidopsis
MDTGNNNNLPTLLKCNFPPYGKDYPGGFATGRFSDGRVPSDLIAEKIGLAKTLPAYMNPYLKPEDLLKGVTFASGGTGYDPLTAKIMSVISVWDQLIYFKEYISKIKRHFGEEKAKDILEHSFFLVVSSSNDLAHTYLAQAHRYDRTSYANFLADSAVHFVRELHKLGAQKIGVFSAVPVGCVPLQRTVFGGFFTRGCNQPLNNMAKQFNARLSPALDSLDKELDGVILYINVYDTLFDMIQHPKKYGFEVADRGCCGKGLLTISYLCNSLNQFTCSNSSAYIFWDSYHPSKRAYQVIVDNLLDKYLSKVY

SEQ ID NO: 71521 - protein, 255 aa, Arabidopsis thaliana
  peptide (1)..(255): Ceres Seq. ID no. 4267271
  misc_feature (1)..(246): Pfam Name: GDSL-like Lipase/Acylhydrolase Pfam Description: GDSL-like Lipase/Acylhydrolase
  misc_feature (1)..(255): Homolog of NCBI NO: 18406327 NR Description: proline-rich protein, putative; protein id:
  misc_feature (1)..(255): Homolog of NCBI NO: 15217977 NR Description: proline-rich protein, putative; protein id:
  misc_feature (1)..(135): Homolog of NCBI NO: 15229719 NR Description: putative protein; protein id: At3g43570.1 thaliana] >gi|9967506|emb|CAC05631.1| putative protein
  misc_feature (165)..(255): Homolog of NCBI NO: 15229719 NR Description: putative protein; protein id: At3g43570.1 thaliana] >gi|9967506|emb|CAC05631.1| putative protein
  misc_feature (1)..(135): Homolog of NCBI NO: 22330312 NR Description: similar to proline-rich protein, putative;
  misc_feature (165)..(255): Homolog of NCBI NO: 22330312 NR Description: similar to proline-rich protein, putative;
  misc_feature (1)..(108): Homolog of NCBI NO: 15229307 NR Description: putative protein; protein id: At3g43550.1
  misc_feature (1)..(250): Homolog of NCBI NO: 15231934 NR Description: hypothetical protein; protein id: At3g14820.1
  misc_feature (1)..(253): Homolog of NCBI NO: 15222901 NR Description: family II extracellular lipase 3 (EXL3); protein At1g75900.1, supported by cDNA: gi_15054385 [Arabidopsis >gi|15054386|gb|AAK30018.1| family II lipase EXL3 [Arabidopsis
  misc_feature (1)..(253): Homolog of NCBI NO: 26449364 NR Description: putative family II lipase EXL3 [Arabidopsis
MNPYLKPEDLLKGVTFASGGTGYDPLTAKIMSVISVWDQLIYFKEYISKIKRHFGEEKAKDILEHSFFLVVSSSNDLAHTYLAQAHRYDRTSYANFLADSAVHFVRELHKLGAQKIGVFSAVPVGCVPLQRTVFGGFFTRGCNQPLNNMAKQFNARLSPALDSLDKELDGVILYINVYDTLFDMIQHPKKYGFEVADRGCCGKGLLTISYLCNSLNQFTCSNSSAYIFWDSYHPSKRAYQVIVDNLLDKYLSKVY

SEQ ID NO: 71522 - DNA, 918 bp, Arabidopsis thaliana
  misc_feature (1)..(918): Ceres Seq. ID no. 4267728
  misc_feature: MA Experiment ID: 20000307 Result: Up-regulated in Transcription
  misc_feature: MA Experiment 20000307 PARAMETER Experiment Name: At_Germinating_Seeds_Sub_P Parameter: Age (hr) Value: 24 vs. 0
  misc_feature: MA Experiment 20000307 PARAMETER Experiment Name: At_Germinating_Seeds_Sub_P Parameter: Organism Value: A. thaliana
  misc_feature: MA Experiment 20000307 PARAMETER Experiment Name: At_Germinating_Seeds_Sub_P Parameter: Plant Line Value: WS
  misc_feature: MA Experiment 20000307 PARAMETER Experiment Name: At_Germinating_Seeds_Sub_P Parameter: Tissue Value: Germinating Seeds
atgagttcgtctaacggaggtgtaccgcctggttttcggtttcatccaacggacgaagaacttcttcattactacttgaagaagaagatttcttatgaaaagtttgagatggaagtcatcaaagaggttgatttgaacaagattgagccgtgggatttacaagatagatgcaaaataggatcaacgccacaaaatgagtggtatttcttcagccacaaggataggaaatatccgacagggtcaaggacaaaccgtgcaacccactccggtttttggaaggcgacaggacgtgacaaatgcataagaaattcttacaagaagatcggcatgaggaagactcttgtattctacaaaggaagagctcctcatggccaaaagacagattggatcatgcacgagtaccgtatcgaagacactgaagatgacccttgtgaagatggatgggttgtttgtagagtgttcaagaagaaaaatctgttcaaagtagggaatgatgttggctcaaacatcagcaataataggcttgaagctcgtagtttcatccgaagagaaagcccttaccaaggaatctcaatgtttgagcttaacaagcctgaagagattagtgttcatcaatatcctcaaccaccaatgtttcaacctcatcacaagcctctttcaataggctatgactattcattggctcttctaccaagagaaagcgagtaccaacaagcgtgtcagccatcaggggttgaggttggcacgtgcaaggcagtaagtgaatggggaatagtgaattgtaacatggtgagtcatgaggactcgtctagagcgatgaggtttgaagatgacggtaacaacacttcttccacggtccagccaccttctaatctgctttcattgcgcggtgaaaatggatttcttgggttgttttaa

SEQ ID NO: 71523 - protein, 305 aa, Arabidopsis thaliana
  peptide (1)..(305): Ceres Seq. ID no. 4267729
  misc_feature (8)..(137): Pfam Name: No apical meristem (NAM) protein Pfam Description: No apical meristem (NAM) protein
  misc_feature (1)..(305): Homolog of NCBI NO: 15217491 NR Description: unknown protein; protein id: At1g33280.1
  misc_feature (2)..(235): Homolog of NCBI NO: 15235031 NR Description: NAM/NAP like protein; protein id: At4g10350.1
  misc_feature (8)..(161): Homolog of NCBI NO: 15219419 NR Description: NAM (no apical meristem)-like protein OsNAC4, protein id: At1g79580.1 [Arabidopsis thaliana]
  misc_feature (3)..(138): Homolog of NCBI NO: 6006373 NR Description: Similar to NAM like protein (AC005310) [Oryza
  misc_feature (145)..(163): Homolog of NCBI NO: 6006373 NR Description: Similar to NAM like protein (AC005310) [Oryza
  misc_feature (3)..(162): Homolog of NCBI NO: 15223299 NR Description: OsNAC7 protein, putative; protein id: At1g32770.1
  misc_feature (1)..(158): Homolog of NCBI NO: 6730944 NR Description: OsNAC7 protein [Oryza sativa]
  misc_feature (3)..(223): Homolog of NCBI NO: 21536577 NR Description: NAM-like protein [Arabidopsis thaliana]
  misc_feature (3)..(164): Homolog of NCBI NO: 27754598 NR Description: putative NAM (no apical meristem) protein
  misc_feature (3)..(164): Homolog of NCBI NO: 7485760 NR Description: NAM (no apical meristem)-like protein [imported] -
MSSSNGGVPPGFRFHPTDEELLHYYLKKKISYEKFEMEVIKEVDLNKIEPWDLQDRCKIGSTPQNEWYFFSHKDRKYPTGSRTNRATHSGFWKATGRDKCIRNSYKKIGMRKTLVFYKGRAPHGQKTDWIMHEYRIEDTEDDPCEDGWVVCRVFKKKNLFKVGNDVGSNISNNRLEARSFIRRESPYQGISMFELNKPEEISVHQYPQPPMFQPHHKPLSIGYDYSLALLPRESEYQQACQPSGVEVGTCKAVSEWGIVNCNMVSHEDSSRAMRFEDDGNNTSSTVQPPSNLLSLRGENGFLGLF

SEQ ID NO: 71524 - protein, 269 aa, Arabidopsis thaliana
  peptide (1)..(269): Ceres Seq. ID no. 4267730
  misc_feature (1)..(101): Pfam Name: No apical meristem (NAM) protein Pfam Description: No apical meristem (NAM) protein
  misc_feature (1)..(269): Homolog of NCBI NO: 15217491 NR Description: unknown protein; protein id: At1g33280.1
  misc_feature (1)..(199): Homolog of NCBI NO: 15235031 NR Description: NAM/NAP like protein; protein id: At4g10350.1
  misc_feature (1)..(125): Homolog of NCBI NO: 15219419 NR Description: NAM (no apical meristem)-like protein OsNAC4, protein id: At1g79580.1 [Arabidopsis thaliana]
  misc_feature (1)..(102): Homolog of NCBI NO: 6006373 NR Description: Similar to NAM like protein (AC005310) [Oryza
  misc_feature (109)..(127): Homolog of NCBI NO: 6006373 NR Description: Similar to NAM like protein (AC005310) [Oryza
  misc_feature (1)..(126): Homolog of NCBI NO: 15223299 NR Description: OsNAC7 protein, putative; protein id: At1g32770.1
  misc_feature (1)..(122): Homolog of NCBI NO: 6730944 NR Description: OsNAC7 protein [Oryza sativa]
  misc_feature (1)..(187): Homolog of NCBI NO: 21536577 NR Description: NAM-like protein [Arabidopsis thaliana]
  misc_feature (1)..(128): Homolog of NCBI NO: 27754598 NR Description: putative NAM (no apical meristem) protein
  misc_feature (1)..(128): Homolog of NCBI NO: 7485760 NR Description: NAM (no apical meristem)-like protein [imported] -
MEVIKEVDLNKIEPWDLQDRCKIGSTPQNEWYFFSHKDRKYPTGSRTNRATHSGFWKATGRDKCIRNSYKKIGMRKTLVFYKGRAPHGQKTDWIMHEYRIEDTEDDPCEDGWVVCRVFKKKNLFKVGNDVGSNISNNRLEARSFIRRESPYQGISMFELNKPEEISVHQYPQPPMFQPHHKPLSIGYDYSLALLPRESEYQQACQPSGVEVGTCKAVSEWGIVNCNMVSHEDSSRAMRFEDDGNNTSSTVQPPSNLLSLRGENGFLGLF

SEQ ID NO: 71525 - protein, 196 aa, Arabidopsis thaliana
  peptide (1)..(196): Ceres Seq. ID no. 4267731
  misc_feature (1)..(196): Homolog of NCBI NO: 15217491 NR Description: unknown protein; protein id: At1g33280.1
  misc_feature (1)..(126): Homolog of NCBI NO: 15235031 NR Description: NAM/NAP like protein; protein id: At4g10350.1
  misc_feature (1)..(52): Homolog of NCBI NO: 15219419 NR Description: NAM (no apical meristem)-like protein OsNAC4, protein id: At1g79580.1 [Arabidopsis thaliana]
  misc_feature (1)..(29): Homolog of NCBI NO: 6006373 NR Description: Similar to NAM like protein (AC005310) [Oryza
  misc_feature (36)..(54): Homolog of NCBI NO: 6006373 NR Description: Similar to NAM like protein (AC005310) [Oryza
  misc_feature (1)..(53): Homolog of NCBI NO: 15223299 NR Description: OsNAC7 protein, putative; protein id: At1g32770.1
  misc_feature (1)..(49): Homolog of NCBI NO: 6730944 NR Description: OsNAC7 protein [Oryza sativa]
  misc_feature (1)..(114): Homolog of NCBI NO: 21536577 NR Description: NAM-like protein [Arabidopsis thaliana]
  misc_feature (1)..(55): Homolog of NCBI NO: 27754598 NR Description: putative NAM (no apical meristem) protein
  misc_feature (1)..(55): Homolog of NCBI NO: 7485760 NR Description: NAM (no apical meristem)-like protein [imported] -
MRKTLVFYKGRAPHGQKTDWIMHEYRIEDTEDDPCEDGWVVCRVFKKKNLFKVGNDVGSNISNNRLEARSFIRRESPYQGISMFELNKPEEISVHQYPQPPMFQPHHKPLSIGYDYSLALLPRESEYQQACQPSGVEVGTCKAVSEWGIVNCNMVSHEDSSRAMRFEDDGNNTSSTVQPPSNLLSLRGENGFLGLF

SEQ ID NO: 71526 - DNA, 672 bp, Arabidopsis thaliana
  misc_feature (1)..(672): Ceres Seq. ID no. 4267806
  misc_feature: MA Experiment ID: 20000306 Result: Down-regulated in Transcription
  misc_feature: MA Experiment 20000306 PARAMETER Experiment Name: At_Germinating_Seeds_Sub_P Parameter: Age (hr) Value: 6 vs. 0
  misc_feature: MA Experiment 20000306 PARAMETER Experiment Name: At_Germinating_Seeds_Sub_P Parameter: Organism Value: A. thaliana
  misc_feature: MA Experiment 20000306 PARAMETER Experiment Name: At_Germinating_Seeds_Sub_P Parameter: Plant Line Value: WS
  misc_feature: MA Experiment 20000306 PARAMETER Experiment Name: At_Germinating_Seeds_Sub_P Parameter: Tissue Value: Germinating Seeds
  misc_feature: MA Experiment ID: 20000307 Result: Down-regulated in Transcription
  misc_feature: MA Experiment 20000307 PARAMETER Experiment Name: At_Germinating_Seeds_Sub_P Parameter: Age (hr) Value: 24 vs. 0
  misc_feature: MA Experiment 20000307 PARAMETER Experiment Name: At_Germinating_Seeds_Sub_P Parameter: Organism Value: A. thaliana
  misc_feature: MA Experiment 20000307 PARAMETER Experiment Name: At_Germinating_Seeds_Sub_P Parameter: Plant Line Value: WS
  misc_feature: MA Experiment 20000307 PARAMETER Experiment Name: At_Germinating_Seeds_Sub_P Parameter: Tissue Value: Germinating Seeds
  misc_feature: MA Experiment ID: 20000315 Result: Down-regulated in Transcription
  misc_feature: MA Experiment 20000315 PARAMETER Experiment Name: At_14day_Shoots-Roots_Sub_P Parameter: Age (day) Value: 14
  misc_feature: MA Experiment 20000315 PARAMETER Experiment Name: At_14day_Shoots-Roots_Sub_P Parameter: Organism Value: A. thaliana
  misc_feature: MA Experiment 20000315 PARAMETER Experiment Name: At_14day_Shoots-Roots_Sub_P Parameter: Plant Line Value: WS
  misc_feature: MA Experiment 20000315 PARAMETER Experiment Name: At_14day_Shoots-Roots_Sub_P Parameter: Tissue Value: Shoots vs. Whole Plant
  misc_feature: MA Experiment ID: 20000328 Result: Down-regulated in Transcription
  misc_feature: MA Experiment 20000328 PARAMETER Experiment Name: At_42deg_Heat_Sub_P Parameter: Age (day) Value: 14
  misc_feature: MA Experiment 20000328 PARAMETER Experiment Name: At_42deg_Heat_Sub_P Parameter: Organism Value: A. thaliana
  misc_feature: MA Experiment 20000328 PARAMETER Experiment Name: At_42deg_Heat_Sub_P Parameter: Plant Line Value: WS
  misc_feature: MA Experiment 20000328 PARAMETER Experiment Name: At_42deg_Heat_Sub_P Parameter: Temperature (deg C) Value: 42 vs. 22
  misc_feature: MA Experiment 20000328 PARAMETER Experiment Name: At_42deg_Heat_Sub_P Parameter: Timepoint (hr) Value: 6
  misc_feature: MA Experiment 20000328 PARAMETER Experiment Name: At_42deg_Heat_Sub_P Parameter: Tissue Value: Aerial
  misc_feature: MA Experiment ID: 20000355 Result: Down-regulated in Transcription
  misc_feature: MA Experiment 20000355 PARAMETER Experiment Name: At_Siliques_Sub_P Parameter: Age (day) Value: 21
  misc_feature: MA Experiment 20000355 PARAMETER Experiment Name: At_Siliques_Sub_P Parameter: Organism Value: A. thaliana
  misc_feature: MA Experiment 20000355 PARAMETER Experiment Name: At_Siliques_Sub_P Parameter: Plant Line Value: WS
  misc_feature: MA Experiment 20000355 PARAMETER Experiment Name: At_Siliques_Sub_P Parameter: Tissue Value: Less Than 5mm Siliques vs. Whole Plant
  misc_feature: MA Experiment ID: 20000440 Result: Down-regulated in Transcription
  misc_feature: MA Experiment 20000440 PARAMETER Experiment Name: At_Closed-Flower__Sub_P Parameter: Tissue Value: Closed Flower vs. Whole Plant
atgggaaacagcattactgtgaagagaaaaagagctaaagtaatgaagatcgacggcgaaactttccgaattaaaactccggtgacggcgagagaagtcaccgcggattatcccggttacgttttgttagattctcaagccgttaaacactttggagttcgctctaagccgcttgaaccgaaccaaaccttgaagccgaaaaagacttattttctcgtcgagcttcctaagcttccaccggagacgacggcggtggatacagaaaataagctaccgtaccggagagtgatgtctggtatccacgttggcgcaaaggagcggttagatatgttgatgttgtctcggagaacggtttctgacgtcacaatcggaagatctgacggtggagatgggtttgggcctgagcttgggcctggacatacgagtgtgaggttgaggttgcctcgttctcagatcacgaagcttatggaagagaataataatgatgcttcggccatagctgagaagattttaggtatctatatggagaggtctggcgagcttggcggcggtagaggtggtgttgacggccgccgggaacttggaagtggggagattaaagcgcgtgaggtgagtttcgccggagaaggtggacgggagcttcctgttctatggagtagaagtggaaaataa

SEQ ID NO: 71527 - protein, 223 aa, Arabidopsis thaliana
  peptide (1)..(223): Ceres Seq. ID no. 4267807
  misc_feature (1)..(223): Homolog of NCBI NO: 25404626 NR Description: hypothetical protein F28G11.8 [imported] - thaliana >gi|12322258|gb|AAG51153.1|AC074025_3 hypothetical
  misc_feature (1)..(223): Homolog of NCBI NO: 30697354 NR Description: expressed protein [Arabidopsis thaliana]
  misc_feature (1)..(217): Homolog of NCBI NO: 15240363 NR Description: putative protein; protein id: At5g37840.1
  misc_feature (1)..(177): Homolog of NCBI NO: 30677912 NR Description: expressed protein [Arabidopsis thaliana]
MGNSITVKRKRAKVMKIDGETFRIKTPVTAREVTADYPGYVLLDSQAVKHFGVRSKPLEPNQTLKPKKTYFLVELPKLPPETTAVDTENKLPYRRVMSGIHVGAKERLDMLMLSRRTVSDVTIGRSDGGDGFGPELGPGHTSVRLRLPRSQITKLMEENNNDASAIAEKILGIYMERSGELGGGRGGVDGRRELGSGEIKAREVSFAGEGGRELPVLWSRSGK

SEQ ID NO: 71528 - protein, 209 aa, Arabidopsis thaliana
  peptide (1)..(209): Ceres Seq. ID no. 4267808
  misc_feature (1)..(209): Homolog of NCBI NO: 25404626 NR Description: hypothetical protein F28G11.8 [imported] - thaliana >gi|12322258|gb|AAG51153.1|AC074025_3 hypothetical
  misc_feature (1)..(209): Homolog of NCBI NO: 30697354 NR Description: expressed protein [Arabidopsis thaliana]
  misc_feature (1)..(203): Homolog of NCBI NO: 15240363 NR Description: putative protein; protein id: At5g37840.1
  misc_feature (1)..(163): Homolog of NCBI NO: 30677912 NR Description: expressed protein [Arabidopsis thaliana]
MKIDGETFRIKTPVTAREVTADYPGYVLLDSQAVKHFGVRSKPLEPNQTLKPKKTYFLVELPKLPPETTAVDTENKLPYRRVMSGIHVGAKERLDMLMLSRRTVSDVTIGRSDGGDGFGPELGPGHTSVRLRLPRSQITKLMEENNNDASAIAEKILGIYMERSGELGGGRGGVDGRRELGSGEIKAREVSFAGEGGRELPVLWSRSGK

SEQ ID NO: 71529 - protein, 127 aa, Arabidopsis thaliana
  peptide (1)..(127): Ceres Seq. ID no. 4267809
  misc_feature (1)..(127): Homolog of NCBI NO: 25404626 NR Description: hypothetical protein F28G11.8 [imported] - thaliana >gi|12322258|gb|AAG51153.1|AC074025_3 hypothetical
  misc_feature (1)..(127): Homolog of NCBI NO: 30697354 NR Description: expressed protein [Arabidopsis thaliana]
  misc_feature (1)..(121): Homolog of NCBI NO: 15240363 NR Description: putative protein; protein id: At5g37840.1
  misc_feature (1)..(81): Homolog of NCBI NO: 30677912 NR Description: expressed protein [Arabidopsis thaliana]
MSGIHVGAKERLDMLMLSRRTVSDVTIGRSDGGDGFGPELGPGHTSVRLRLPRSQITKLMEENNNDASAIAEKILGIYMERSGELGGGRGGVDGRRELGSGEIKAREVSFAGEGGRELPVLWSRSGK

SEQ ID NO: 71530 - DNA, 3861 bp, Arabidopsis thaliana
  misc_feature (1)..(3861): Ceres Seq. ID no. 4267818
  misc_feature: MA Experiment ID: 20000307 Result: Down-regulated in Transcription
  misc_feature: MA Experiment 20000307 PARAMETER Experiment Name: At_Germinating_Seeds_Sub_P Parameter: Age (hr) Value: 24 vs. 0
  misc_feature: MA Experiment 20000307 PARAMETER Experiment Name: At_Germinating_Seeds_Sub_P Parameter: Organism Value: A. thaliana
  misc_feature: MA Experiment 20000307 PARAMETER Experiment Name: At_Germinating_Seeds_Sub_P Parameter: Plant Line Value: WS
  misc_feature: MA Experiment 20000307 PARAMETER Experiment Name: At_Germinating_Seeds_Sub_P Parameter: Tissue Value: Germinating Seeds
  misc_feature: MA Experiment ID: 20000314 Result: Down-regulated in Transcription
  misc_feature: MA Experiment 20000314 PARAMETER Experiment Name: At_14day_Shoots-Roots_Sub_P Parameter: Age (day) Value: 14
  misc_feature: MA Experiment 20000314 PARAMETER Experiment Name: At_14day_Shoots-Roots_Sub_P Parameter: Organism Value: A. thaliana
  misc_feature: MA Experiment 20000314 PARAMETER Experiment Name: At_14day_Shoots-Roots_Sub_P Parameter: Plant Line Value: WS
  misc_feature: MA Experiment 20000314 PARAMETER Experiment Name: At_14day_Shoots-Roots_Sub_P Parameter: Tissue Value: Roots vs. Whole Plant
  misc_feature: MA Experiment ID: 20000328 Result: Down-regulated in Transcription
  misc_feature: MA Experiment 20000328 PARAMETER Experiment Name: At_42deg_Heat_Sub_P Parameter: Age (day) Value: 14
  misc_feature: MA Experiment 20000328 PARAMETER Experiment Name: At_42deg_Heat_Sub_P Parameter: Organism Value: A. thaliana
  misc_feature: MA Experiment 20000328 PARAMETER Experiment Name: At_42deg_Heat_Sub_P Parameter: Plant Line Value: WS
  misc_feature: MA Experiment 20000328 PARAMETER Experiment Name: At_42deg_Heat_Sub_P Parameter: Temperature (deg C) Value: 42 vs. 22
  misc_feature: MA Experiment 20000328 PARAMETER Experiment Name: At_42deg_Heat_Sub_P Parameter: Timepoint (hr) Value: 6
  misc_feature: MA Experiment 20000328 PARAMETER Experiment Name: At_42deg_Heat_Sub_P Parameter: Tissue Value: Aerial
  misc_feature: MA Experiment ID: 20000355 Result: Down-regulated in Transcription
  misc_feature: MA Experiment 20000355 PARAMETER Experiment Name: At_Siliques_Sub_P Parameter: Age (day) Value: 21
  misc_feature: MA Experiment 20000355 PARAMETER Experiment Name: At_Siliques_Sub_P Parameter: Organism Value: A. thaliana
  misc_feature: MA Experiment 20000355 PARAMETER Experiment Name: At_Siliques_Sub_P Parameter: Plant Line Value: WS
  misc_feature: MA Experiment 20000355 PARAMETER Experiment Name: At_Siliques_Sub_P Parameter: Tissue Value: Less Than 5mm Siliques vs. Whole Plant
atgaagaacatgaactttgagcgactctctgagctcatggctttctaccacttgatggggaagatctctagtgagtgtgggaatatcaccgctggtttccccttctggggagggaatcgtctaaaacattgcggtcttccatcgctggagcttcactgcagcaaaaacatcacctctttattcatctcaagtcaagagttctatgttttacatctaaatcaaacgtctaaaacacttaaacttgctagaacagaccttttaggttcaatttgcaactctactttcactaccataaccttgcctccaaatattttcgagctttctccaacttacaagaggctcaccgttttctactactgcttcttattgactcattacgtttcgagttataaatgtcctatgagaggttttatctttgtgtctgaaaaccatgaatatcataaaatctgcggtgacactttcaccgtgattgttcctacacgttttggtgcaggagagaaagagttgaatatgaccaatttggaaagtgttttaagtaaaggatttgaagtaaaagtgaagatcgatgatacatcatgtcaagaatgtttatcctctcatggaagttgtggctttaatgaaaccttgccagtgggaggtaaatgcagtccactcaatccaacaacacaaccaccgccacaacctggggatcgtcacaaacattgcggtcatccattgctagagcttcgctgcgaccaaaacaagagtacctctttattcatctcagaccaagagttctttgttctccatgtcgatcaaacatcttacagtcttacactcgccagaccagaccttttacattccttttgctcccttacattcaccaacacaaccttaccaccagaaattttcgaactttctccggcctacaagagcgtcacattctaccactgttacccggttcttcctgacctttcgaattatacatgtcctgttataggtccaatctcagtgtctggaaaccctgaagatcacgaaacctgctttcccaattttgccgcaaacgttcccacgagtttcgtcacgaaagagaaaaaattgaatatagccaatttggaaagtgttttggaaaagggctttgaggtgaacatgaatgtcatcatgaaagcttgtcaagcatgttcatactctaatgaatcctgtggcttcgatgaaaactttccattcgaagtcaaatgcaaaccacaccattcaccaactgctaagtttcagtgtgggaacatcaccgctggtttccctttctccggtgggaatcgtcctcaaatttgcggtcatccatcgttggagcttcactgctataacaacatggcctctataatcatctcagaccacttttacaatgttctccatatagatcaaacatctaacactcttagacttgctagagcagagctggaaggttctttttgcaacgctacttacacagccacaaccttgccttccaaaatctttgagatttcatcaacctacaagagcctcactgttttctacctctgcgaccctaaggtttcttaccgttcgagttatacatgtcctggtagaggccttgtctcagtgtctcaaaattctgattaccataactcctgccaagacagtttcacgattaacgttccaaagagctttgttccagaagagaaagagttggatgtgaccaatttggaaagtgctttaagagaaggatttgaggtgaaggtaaaggttgatgagaaaacttgtcaaaaatgtacatcctctggtggaacctgcggcttccaaaattcaacacagatttgctgcaaggaagcctcatcattaggatgcaataaagtccatccactacctgatgctactgagcttgagcttcacagacgctgcaatggcacgtttagctgcggcgatcagagagaactcttttaccctttctggacatctggtagagaagactgtggccaccctgacttcaagctcgacgactgtagcggaagattcgcagagcttagcatttcctctgtgaaatttagaattctagcgtcggtttatggctctaatatcataagactcggcagatccgaatatataggcgatctctgtccccaagatcctataaatgcaccattcagcgaaagtgtccttccatttgctcctaacaccgagctgctgactattttttacaactgcagccgagactttccacagcaagttactaattttggagactttgcttgtggggatgatagtgatgatgatagaagttactatgtgacgagaaacctctcgtttcctccactcagtgagattaatgaccttttatacgacttcagtcaatcttgcgatagaaacgtcagtattcccgcatctggatcgacgcttaacatactgcagagcactccgagtaacgataatctaaagaaggctctcgaatacggtttcgagcttgaacttaaccaagattgtcggacgtgcatagactctaagggtgcttgtggatatagtcaaacctcaagtagattcgtctgctattctatagaagagccacaaacccctactccaccaaaccctactagaaacaagggcattgcggttgcttctgtatcgggtttggccattcttctactcgcaggtttgttcttatgcatcagacggagaaggaagactcaggacgctcaatacacaagcaaaagcttgcctatcacatcatactcgagtagagatacatcaagaaatccaacttccacaacaatctcctccagtagcaatcactctcttcttccctcaatctctaaccttgcaaaccgaagcgactactgtggagtccaagtctttagctatgaagaacttgaagaagcaactgagaatttctctagagaactcggggatggtggcttcggtactgtctactacggcgtgttgaaagacggacgagctgtagcagtgaaacgactctacgaaagatcactaaaacgcgtagaacaattcaagaacgaaatcgaaatcttgaaatcactaaaacatccgaacctcgtgatcctctacggatgcacatcaagacacagcagagagcttctactagtctacgaatacatctcaaacggaactctagccgaacatctacacggcaaccgcgcagaagctcgtcctctctgctggtcaacccgattaaacatcgcaatcgaaaccgcaagcgcattatcattcctccacataaaaggaatcatacacagagacatcaagactactaacatactcttagacgataactaccaagtcaaagtcgccgatttcggactttcacggttgtttccaatggatcaaacacacatatcaaccgcaccacaaggcacaccaggctacgtggatccagagtattaccaatgttaccaattaaacgagaagagcgatgtctacagcttcggagtcgtactaacggaactaatctcatcaaaagaagcagtagacattactcgacaccgtcacgatatcaatctagcgaacatggctgtatctaagattcagaacaatgcattacacgagcttgtggattcgagtttaggatacgataatgatcctgaagttaggaggaagatgatggcggtggcggaattagcgtttcgatgtttgcaacaagagagagatgttagaccggcgatggatgagattgtggagattttgagagggattaaggatgatgagaagaagcgtgtgttggtgaagtcgccggatgttgtggatattgaatgcggtggtggtgatgatgttggattgttgaggaatagtgttccgccgccgatttcgccggagactgataagtggactagtagttctgatacggcggcgagtttgtaa

SEQ ID NO: 71531 - protein, 1286 aa, Arabidopsis thaliana
  peptide (1)..(1286): Ceres Seq. ID no. 4267819
  misc_feature (15)..(229): Homolog of NCBI NO: 24417464 NR Description: unknown [Arabidopsis thaliana]
  misc_feature (416)..(606): Homolog of NCBI NO: 24417464 NR Description: unknown [Arabidopsis thaliana]
  misc_feature (626)..(1285): Homolog of NCBI NO: 10177797 NR Description: contains similarity to protein
  misc_feature (416)..(655): Homolog of NCBI NO: 10177797 NR Description: contains similarity to protein
  misc_feature (26)..(228): Homolog of NCBI NO: 10177797 NR Description: contains similarity to protein
  misc_feature (231)..(443): Homolog of NCBI NO: 10177797 NR Description: contains similarity to protein
  misc_feature (630)..(743): Homolog of NCBI NO: 24417464 NR Description: unknown [Arabidopsis thaliana]
  misc_feature (616)..(1285): Homolog of NCBI NO: 22327431 NR Description: protein kinase - like protein; protein id: supported by cDNA: gi_18175790 [Arabidopsis thaliana] putative protein kinase [Arabidopsis thaliana]
  misc_feature (414)..(913): Homolog of NCBI NO: 25404653 NR Description: probable receptor serine/threonine kinase PR5K
  misc_feature (947)..(1234): Homolog of NCBI NO: 25404653 NR Description: probable receptor serine/threonine kinase PR5K
MKNMNFERLSELMAFYHLMGKISSECGNITAGFPFWGGNRLKHCGLPSLELHCSKNITSLFISSQEFYVLHLNQTSKTLKLARTDLLGSICNSTFTTITLPPNIFELSPTYKRLTVFYYCFLLTHYVSSYKCPMRGFIFVSENHEYHKICGDTFTVIVPTRFGAGEKELNMTNLESVLSKGFEVKVKIDDTSCQECLSSHGSCGFNETLPVGGKCSPLNPTTQPPPQPGDRHKHCGHPLLELRCDQNKSTSLFISDQEFFVLHVDQTSYSLTLARPDLLHSFCSLTFTNTTLPPEIFELSPAYKSVTFYHCYPVLPDLSNYTCPVIGPISVSGNPEDHETCFPNFAANVPTSFVTKEKKLNIANLESVLEKGFEVNMNVIMKACQACSYSNESCGFDENFPFEVKCKPHHSPTAKFQCGNITAGFPFSGGNRPQICGHPSLELHCYNNMASIIISDHFYNVLHIDQTSNTLRLARAELEGSFCNATYTATTLPSKIFEISSTYKSLTVFYLCDPKVSYRSSYTCPGRGLVSVSQNSDYHNSCQDSFTINVPKSFVPEEKELDVTNLESALREGFEVKVKVDEKTCQKCTSSGGTCGFQNSTQICCKEASSLGCNKVHPLPDATELELHRRCNGTFSCGDQRELFYPFWTSGREDCGHPDFKLDDCSGRFAELSISSVKFRILASVYGSNIIRLGRSEYIGDLCPQDPINAPFSESVLPFAPNTELLTIFYNCSRDFPQQVTNFGDFACGDDSDDDRSYYVTRNLSFPPLSEINDLLYDFSQSCDRNVSIPASGSTLNILQSTPSNDNLKKALEYGFELELNQDCRTCIDSKGACGYSQTSSRFVCYSIEEPQTPTPPNPTRNKGIAVASVSGLAILLLAGLFLCIRRRRKTQDAQYTSKSLPITSYSSRDTSRNPTSTTISSSSNHSLLPSISNLANRSDYCGVQVFSYEELEEATENFSRELGDGGFGTVYYGVLKDGRAVAVKRLYERSLKRVEQFKNEIEILKSLKHPNLVILYGCTSRHSRELLLVYEYISNGTLAEHLHGNRAEARPLCWSTRLNIAIETASALSFLHIKGIIHRDIKTTNILLDDNYQVKVADFGLSRLFPMDQTHISTAPQGTPGYVDPEYYQCYQLNEKSDVYSFGVVLTELISSKEAVDITRHRHDINLANMAVSKIQNNALHELVDSSLGYDNDPEVRRKMMAVAELAFRCLQQERDVRPAMDEIVEILRGIKDDEKKRVLVKSPDVVDIECGGGDDVGLLRNSVPPPISPETDKWTSSSDTAASL

SEQ ID NO: 71532 - protein, 1283 aa, Arabidopsis thaliana
  peptide (1)..(1283): Ceres Seq. ID no. 4267820
  misc_feature (12)..(226): Homolog of NCBI NO: 24417464 NR Description: unknown [Arabidopsis thaliana]
  misc_feature (413)..(603): Homolog of NCBI NO: 24417464 NR Description: unknown [Arabidopsis thaliana]
  misc_feature (623)..(1282): Homolog of NCBI NO: 10177797 NR Description: contains similarity to protein
  misc_feature (413)..(652): Homolog of NCBI NO: 10177797 NR Description: contains similarity to protein
  misc_feature (23)..(225): Homolog of NCBI NO: 10177797 NR Description: contains similarity to protein
  misc_feature (228)..(440): Homolog of NCBI NO: 10177797 NR Description: contains similarity to protein
  misc_feature (627)..(740): Homolog of NCBI NO: 24417464 NR Description: unknown [Arabidopsis thaliana]
  misc_feature (613)..(1282): Homolog of NCBI NO: 22327431 NR Description: protein kinase - like protein; protein id: supported by cDNA: gi_18175790 [Arabidopsis thaliana] putative protein kinase [Arabidopsis thaliana]
  misc_feature (411)..(910): Homolog of NCBI NO: 25404653 NR Description: probable receptor serine/threonine kinase PR5K
  misc_feature (944)..(1231): Homolog of NCBI NO: 25404653 NR Description: probable receptor serine/threonine kinase PR5K
MNFERLSELMAFYHLMGKISSECGNITAGFPFWGGNRLKHCGLPSLELHCSKNITSLFISSQEFYVLHLNQTSKTLKLARTDLLGSICNSTFTTITLPPNIFELSPTYKRLTVFYYCFLLTHYVSSYKCPMRGFIFVSENHEYHKICGDTFTVIVPTRFGAGEKELNMTNLESVLSKGFEVKVKIDDTSCQECLSSHGSCGFNETLPVGGKCSPLNPTTQPPPQPGDRHKHCGHPLLELRCDQNKSTSLFISDQEFFVLHVDQTSYSLTLARPDLLHSFCSLTFTNTTLPPEIFELSPAYKSVTFYHCYPVLPDLSNYTCPVIGPISVSGNPEDHETCFPNFAANVPTSFVTKEKKLNIANLESVLEKGFEVNMNVIMKACQACSYSNESCGFDENFPFEVKCKPHHSPTAKFQCGNITAGFPFSGGNRPQICGHPSLELHCYNNMASIIISDHFYNVLHIDQTSNTLRLARAELEGSFCNATYTATTLPSKIFEISSTYKSLTVFYLCDPKVSYRSSYTCPGRGLVSVSQNSDYHNSCQDSFTINVPKSFVPEEKELDVTNLESALREGFEVKVKVDEKTCQKCTSSGGTCGFQNSTQICCKEASSLGCNKVHPLPDATELELHRRCNGTFSCGDQRELFYPFWTSGREDCGHPDFKLDDCSGRFAELSISSVKFRILASVYGSNIIRLGRSEYIGDLCPQDPINAPFSESVLPFAPNTELLTIFYNCSRDFPQQVTNFGDFACGDDSDDDRSYYVTRNLSFPPLSEINDLLYDFSQSCDRNVSIPASGSTLNILQSTPSNDNLKKALEYGFELELNQDCRTCIDSKGACGYSQTSSRFVCYSIEEPQTPTPPNPTRNKGIAVASVSGLAILLLAGLFLCIRRRRKTQDAQYTSKSLPITSYSSRDTSRNPTSTTISSSSNHSLLPSISNLANRSDYCGVQVFSYEELEEATENFSRELGDGGFGTVYYGVLKDGRAVAVKRLYERSLKRVEQFKNEIEILKSLKHPNLVILYGCTSRHSRELLLVYEYISNGTLAEHLHGNRAEARPLCWSTRLNIAIETASALSFLHIKGIIHRDIKTTNILLDDNYQVKVADFGLSRLFPMDQTHISTAPQGTPGYVDPEYYQCYQLNEKSDVYSFGVVLTELISSKEAVDITRHRHDINLANMAVSKIQNNALHELVDSSLGYDNDPEVRRKMMAVAELAFRCLQQERDVRPAMDEIVEILRGIKDDEKKRVLVKSPDVVDIECGGGDDVGLLRNSVPPPISPETDKWTSSSDTAASL

SEQ ID NO: 71533 - protein, 1274 aa, Arabidopsis thaliana
  peptide (1)..(1274): Ceres Seq. ID no. 4267821
  misc_feature (3)..(217): Homolog of NCBI NO: 24417464 NR Description: unknown [Arabidopsis thaliana]
  misc_feature (404)..(594): Homolog of NCBI NO: 24417464 NR Description: unknown [Arabidopsis thaliana]
  misc_feature (614)..(1273): Homolog of NCBI NO: 10177797 NR Description: contains similarity to protein
  misc_feature (404)..(643): Homolog of NCBI NO: 10177797 NR Description: contains similarity to protein
  misc_feature (14)..(216): Homolog of NCBI NO: 10177797 NR Description: contains similarity to protein
  misc_feature (219)..(431): Homolog of NCBI NO: 10177797 NR Description: contains similarity to protein
  misc_feature (618)..(731): Homolog of NCBI NO: 24417464 NR Description: unknown [Arabidopsis thaliana]
  misc_feature (604)..(1273): Homolog of NCBI NO: 22327431 NR Description: protein kinase - like protein; protein id: supported by cDNA: gi_18175790 [Arabidopsis thaliana] putative protein kinase [Arabidopsis thaliana]
  misc_feature (402)..(901): Homolog of NCBI NO: 25404653 NR Description: probable receptor serine/threonine kinase PR5K
  misc_feature (935)..(1222): Homolog of NCBI NO: 25404653 NR Description: probable receptor serine/threonine kinase PR5K
MAFYHLMGKISSECGNITAGFPFWGGNRLKHCGLPSLELHCSKNITSLFISSQEFYVLHLNQTSKTLKLARTDLLGSICNSTFTTITLPPNIFELSPTYKRLTVFYYCFLLTHYVSSYKCPMRGFIFVSENHEYHKICGDTFTVIVPTRFGAGEKELNMTNLESVLSKGFEVKVKIDDTSCQECLSSHGSCGFNETLPVGGKCSPLNPTTQPPPQPGDRHKHCGHPLLELRCDQNKSTSLFISDQEFFVLHVDQTSYSLTLARPDLLHSFCSLTFTNTTLPPEIFELSPAYKSVTFYHCYPVLPDLSNYTCPVIGPISVSGNPEDHETCFPNFAANVPTSFVTKEKKLNIANLESVLEKGFEVNMNVIMKACQACSYSNESCGFDENFPFEVKCKPHHSPTAKFQCGNITAGFPFSGGNRPQICGHPSLELHCYNNMASIIISDHFYNVLHIDQTSNTLRLARAELEGSFCNATYTATTLPSKIFEISSTYKSLTVFYLCDPKVSYRSSYTCPGRGLVSVSQNSDYHNSCQDSFTINVPKSFVPEEKELDVTNLESALREGFEVKVKVDEKTCQKCTSSGGTCGFQNSTQICCKEASSLGCNKVHPLPDATELELHRRCNGTFSCGDQRELFYPFWTSGREDCGHPDFKLDDCSGRFAELSISSVKFRILASVYGSNIIRLGRSEYIGDLCPQDPINAPFSESVLPFAPNTELLTIFYNCSRDFPQQVTNFGDFACGDDSDDDRSYYVTRNLSFPPLSEINDLLYDFSQSCDRNVSIPASGSTLNILQSTPSNDNLKKALEYGFELELNQDCRTCIDSKGACGYSQTSSRFVCYSIEEPQTPTPPNPTRNKGIAVASVSGLAILLLAGLFLCIRRRRKTQDAQYTSKSLPITSYSSRDTSRNPTSTTISSSSNHSLLPSISNLANRSDYCGVQVFSYEELEEATENFSRELGDGGFGTVYYGVLKDGRAVAVKRLYERSLKRVEQFKNEIEILKSLKHPNLVILYGCTSRHSRELLLVYEYISNGTLAEHLHGNRAEARPLCWSTRLNIAIETASALSFLHIKGIIHRDIKTTNILLDDNYQVKVADFGLSRLFPMDQTHISTAPQGTPGYVDPEYYQCYQLNEKSDVYSFGVVLTELISSKEAVDITRHRHDINLANMAVSKIQNNALHELVDSSLGYDNDPEVRRKMMAVAELAFRCLQQERDVRPAMDEIVEILRGIKDDEKKRVLVKSPDVVDIECGGGDDVGLLRNSVPPPISPETDKWTSSSDTAASL

SEQ ID NO: 71534 - DNA, 1722 bp, Arabidopsis thaliana
  misc_feature (1)..(1722): Ceres Seq. ID no. 4268147
  misc_feature: MA Experiment ID: 20000306 Result: Up-regulated in Transcription
  misc_feature: MA Experiment 20000306 PARAMETER Experiment Name: At_Germinating_Seeds_Sub_P Parameter: Age (hr) Value: 6 vs. 0
  misc_feature: MA Experiment 20000306 PARAMETER Experiment Name: At_Germinating_Seeds_Sub_P Parameter: Organism Value: A. thaliana
  misc_feature: MA Experiment 20000306 PARAMETER Experiment Name: At_Germinating_Seeds_Sub_P Parameter: Plant Line Value: WS
  misc_feature: MA Experiment 20000306 PARAMETER Experiment Name: At_Germinating_Seeds_Sub_P Parameter: Tissue Value: Germinating Seeds
  misc_feature: MA Experiment ID: 20000307 Result: Up-regulated in Transcription
  misc_feature: MA Experiment 20000307 PARAMETER Experiment Name: At_Germinating_Seeds_Sub_P Parameter: Age (hr) Value: 24 vs. 0
  misc_feature: MA Experiment 20000307 PARAMETER Experiment Name: At_Germinating_Seeds_Sub_P Parameter: Organism Value: A. thaliana
  misc_feature: MA Experiment 20000307 PARAMETER Experiment Name: At_Germinating_Seeds_Sub_P Parameter: Plant Line Value: WS
  misc_feature: MA Experiment 20000307 PARAMETER Experiment Name: At_Germinating_Seeds_Sub_P Parameter: Tissue Value: Germinating Seeds
atgagtttaagcgttgagctcaaggatttggaggtcttaacaacgaacgcaaagcaaatacaagatgatgtattgaaggagatactcacacttaacgccaacacagagtatctcaaacgttttctcgatggaagctctgataaagagttgttcaagaagaacgtaccggtggtgagctacaatgatgtcaagccttatatcgaacgtgttgcgaatggagagccctcggatgtgatttcaggtggaaccattacaagattcgtccaaagcacgggaacttcaggagggatacataaaatatttccagtgaacgataagtacatagagaatcttggataccttttggctgtatcctctctcattacttccaatgacaaggtagatgagaaaggaaagaaaatggcgtttctttacaacagattagaatccaaaactccctccggattagccctttcttcatcatttacaagctatttcatgagcgattacttcaaaaaccggtcatcaaaatgtaattctgagtacacaagccccgaccaagtcatattgtgccccgacaacaaccaaagtgtgtattgtcatcttctatgtgggctttcccagagagaaaaggttgtgggagttagtgcaacatttgctcatgccttaatcaaagcaataaatgctcttcaaatttactggaaggaattgtctagtaatatccggtcaggtcatgttagtgagtggatcactgaccttgactgcaaaaatgctgtctcagccattcttggaggacctgaccctgaattggctgatgtgattgaacaagaatgcagccacaagtcatgggaaggtatcatcacacgactttggcccaaagcaaagtttattgaatgcattgttacaggacaaatggcccaatacattccaacattggacttctattccaacaagcttcctatagtttccatggtatatgggtcttctgaaagtatatttggggtgaatgtggatcctttatccaaaccacaagatgtgtcctacacatttctgcccaatatctcctactttgagtttctacctattgatcatgaggaagatatgaacaccattgttgatcttgtcggtgtcaagctagggtgctattatgaaaccgtggttactagttattttggtctacacaggtatcttattggagatattctacaggtgactggattctacaataacacacctcaatttagattcgtacgcagaaagaatattgtgttaagcgtcaatagtgaagcaacaactgaacaggacattttaaaggggttggctagtgcgacccttgttcttgagtcttcaaattcaatgttgacgggtttcacatgttatgcggatatctccagttttccaggtcactacgtcttttactgggaactcaaagcaaaagatgttgacgatgttgttgagcttgatgaaaatgtattggaagaatgttgctatgcgttagaggaatcgtttgatgctctttataaaagactaaggagtaaagaagggtcaattggagctctagagataaaagtggtgcaacaaggaacatttgattctctcatggaatatttcatctccaaaggtggttcggttgctcaatacaagacacctatgtgtatcaactcttcggaaaccttagcagttcttgaagataaggttattgctcgattctacagccaaaaatctcctcctcttaacttatag

SEQ ID NO: 71535 - protein, 573 aa, Arabidopsis thaliana
  peptide (1)..(573): Ceres Seq. ID no. 4268148
  misc_feature (5)..(554): Pfam Name: GH3 auxin-responsive promoter Pfam Description: GH3 auxin-responsive promoter
  misc_feature (1)..(573): Homolog of NCBI NO: 15221933 NR Description: Nt-gh3 deduced protein, putative; protein id:
  misc_feature (202)..(572): Homolog of NCBI NO: 15221934 NR Description: Nt-gh3 deduced protein, putative; protein id:
  misc_feature (1)..(149): Homolog of NCBI NO: 15221934 NR Description: Nt-gh3 deduced protein, putative; protein id:
  misc_feature (10)..(572): Homolog of NCBI NO: 15242095 NR Description: auxin-responsive GH3-like protein; protein id:
  misc_feature (4)..(565): Homolog of NCBI NO: 15220661 NR Description: GH3-like auxin-regulated protein; protein id:
  misc_feature (8)..(565): Homolog of NCBI NO: 15240601 NR Description: auxin-responsive - like protein; protein id:
  misc_feature (7)..(359): Homolog of NCBI NO: 15217844 NR Description: auxin-regulated GH3 protein, putative; protein At1g28130.1, supported by cDNA: gi_15450364 [Arabidopsis
  misc_feature (358)..(573): Homolog of NCBI NO: 15217844 NR Description: auxin-regulated GH3 protein, putative; protein At1g28130.1, supported by cDNA: gi_15450364 [Arabidopsis
  misc_feature (10)..(573): Homolog of NCBI NO: 15240613 NR Description: auxin reponsive - like protein; protein id:
  misc_feature (10)..(573): Homolog of NCBI NO: 30684377 NR Description: auxin reponsive - like protein [Arabidopsis >gi|26449584|dbj|BAC41918.1| putative auxin responsive protein thaliana] >gi|29028956|gb|AAO64857.1| At5g13370 [Arabidopsis
MSLSVELKDLEVLTTNAKQIQDDVLKEILTLNANTEYLKRFLDGSSDKELFKKNVPVVSYNDVKPYIERVANGEPSDVISGGTITRFVQSTGTSGGIHKIFPVNDKYIENLGYLLAVSSLITSNDKVDEKGKKMAFLYNRLESKTPSGLALSSSFTSYFMSDYFKNRSSKCNSEYTSPDQVILCPDNNQSVYCHLLCGLSQREKVVGVSATFAHALIKAINALQIYWKELSSNIRSGHVSEWITDLDCKNAVSAILGGPDPELADVIEQECSHKSWEGIITRLWPKAKFIECIVTGQMAQYIPTLDFYSNKLPIVSMVYGSSESIFGVNVDPLSKPQDVSYTFLPNISYFEFLPIDHEEDMNTIVDLVGVKLGCYYETVVTSYFGLHRYLIGDILQVTGFYNNTPQFRFVRRKNIVLSVNSEATTEQDILKGLASATLVLESSNSMLTGFTCYADISSFPGHYVFYWELKAKDVDDVVELDENVLEECCYALEESFDALYKRLRSKEGSIGALEIKVVQQGTFDSLMEYFISKGGSVAQYKTPMCINSSETLAVLEDKVIARFYSQKSPPLNL

SEQ ID NO: 71536 - protein, 440 aa, Arabidopsis thaliana
  peptide (1)..(440): Ceres Seq. ID no. 4268149
  misc_feature (1)..(421): Pfam Name: GH3 auxin-responsive promoter Pfam Description: GH3 auxin-responsive promoter
  misc_feature (1)..(440): Homolog of NCBI NO: 15221933 NR Description: Nt-gh3 deduced protein, putative; protein id:
  misc_feature (69)..(439): Homolog of NCBI NO: 15221934 NR Description: Nt-gh3 deduced protein, putative; protein id:
  misc_feature (1)..(16): Homolog of NCBI NO: 15221934 NR Description: Nt-gh3 deduced protein, putative; protein id:
  misc_feature (1)..(439): Homolog of NCBI NO: 15242095 NR Description: auxin-responsive GH3-like protein; protein id:
  misc_feature (1)..(432): Homolog of NCBI NO: 15220661 NR Description: GH3-like auxin-regulated protein; protein id:
  misc_feature (1)..(432): Homolog of NCBI NO: 15240601 NR Description: auxin-responsive - like protein; protein id:
  misc_feature (1)..(226): Homolog of NCBI NO: 15217844 NR Description: auxin-regulated GH3 protein, putative; protein At1g28130.1, supported by cDNA: gi_15450364 [Arabidopsis
  misc_feature (225)..(440): Homolog of NCBI NO: 15217844 NR Description: auxin-regulated GH3 protein, putative; protein At1g28130.1, supported by cDNA: gi_15450364 [Arabidopsis
  misc_feature (1)..(440): Homolog of NCBI NO: 15240613 NR Description: auxin reponsive - like protein; protein id:
  misc_feature (1)..(440): Homolog of NCBI NO: 30684377 NR Description: auxin reponsive - like protein [Arabidopsis >gi|26449584|dbj|BAC41918.1| putative auxin responsive protein thaliana] >gi|29028956|gb|AAO64857.1| At5g13370 [Arabidopsis
MAFLYNRLESKTPSGLALSSSFTSYFMSDYFKNRSSKCNSEYTSPDQVILCPDNNQSVYCHLLCGLSQREKVVGVSATFAHALIKAINALQIYWKELSSNIRSGHVSEWITDLDCKNAVSAILGGPDPELADVIEQECSHKSWEGIITRLWPKAKFIECIVTGQMAQYIPTLDFYSNKLPIVSMVYGSSESIFGVNVDPLSKPQDVSYTFLPNISYFEFLPIDHEEDMNTIVDLVGVKLGCYYETVVTSYFGLHRYLIGDILQVTGFYNNTPQFRFVRRKNIVLSVNSEATTEQDILKGLASATLVLESSNSMLTGFTCYADISSFPGHYVFYWELKAKDVDDVVELDENVLEECCYALEESFDALYKRLRSKEGSIGALEIKVVQQGTFDSLMEYFISKGGSVAQYKTPMCINSSETLAVLEDKVIARFYSQKSPPLNL

SEQ ID NO: 71537 - protein, 414 aa, Arabidopsis thaliana
  peptide (1)..(414): Ceres Seq. ID no. 4268150
  misc_feature (1)..(395): Pfam Name: GH3 auxin-responsive promoter Pfam Description: GH3 auxin-responsive promoter
  misc_feature (1)..(413): Homolog of NCBI NO: 15242095 NR Description: auxin-responsive GH3-like protein; protein id:
  misc_feature (1)..(406): Homolog of NCBI NO: 15220661 NR Description: GH3-like auxin-regulated protein; protein id:
  misc_feature (1)..(406): Homolog of NCBI NO: 15240601 NR Description: auxin-responsive - like protein; protein id:
  misc_feature (1)..(200): Homolog of NCBI NO: 15217844 NR Description: auxin-regulated GH3 protein, putative; protein At1g28130.1, supported by cDNA: gi_15450364 [Arabidopsis
  misc_feature (1)..(414): Homolog of NCBI NO: 15221933 NR Description: Nt-gh3 deduced protein, putative; protein id:
  misc_feature (43)..(413): Homolog of NCBI NO: 15221934 NR Description: Nt-gh3 deduced protein, putative; protein id:
  misc_feature (199)..(414): Homolog of NCBI NO: 15217844 NR Description: auxin-regulated GH3 protein, putative; protein At1g28130.1, supported by cDNA: gi_15450364 [Arabidopsis
  misc_feature (1)..(414): Homolog of NCBI NO: 15240613 NR Description: auxin reponsive - like protein; protein id:
  misc_feature (1)..(414): Homolog of NCBI NO: 30684377 NR Description: auxin reponsive - like protein [Arabidopsis >gi|26449584|dbj|BAC41918.1| putative auxin responsive protein thaliana] >gi|29028956|gb|AAO64857.1| At5g13370 [Arabidopsis
  misc_feature (1)..(414): Homolog of NCBI NO: 15240617 NR Description: auxin reponsive - like protein; protein id:
MSDYFKNRSSKCNSEYTSPDQVILCPDNNQSVYCHLLCGLSQREKVVGVSATFAHALIKAINALQIYWKELSSNIRSGHVSEWITDLDCKNAVSAILGGPDPELADVIEQECSHKSWEGIITRLWPKAKFIECIVTGQMAQYIPTLDFYSNKLPIVSMVYGSSESIFGVNVDPLSKPQDVSYTFLPNISYFEFLPIDHEEDMNTIVDLVGVKLGCYYETVVTSYFGLHRYLIGDILQVTGFYNNTPQFRFVRRKNIVLSVNSEATTEQDILKGLASATLVLESSNSMLTGFTCYADISSFPGHYVFYWELKAKDVDDVVELDENVLEECCYALEESFDALYKRLRSKEGSIGALEIKVVQQGTFDSLMEYFISKGGSVAQYKTPMCINSSETLAVLEDKVIARFYSQKSPPLNL

SEQ ID NO: 71538 - DNA, 3111 bp, Arabidopsis thaliana
  misc_feature (1)..(3111): Ceres Seq. ID no. 4268263
  misc_feature: MA Experiment ID: 20001451 Result: Down-regulated in Transcription
  misc_feature: MA Experiment 20001451 PARAMETER Experiment Name: At_Far-red-induction_P Parameter: Age (day) Value: 7
  misc_feature: MA Experiment 20001451 PARAMETER Experiment Name: At_Far-red-induction_P Parameter: Light Value: Far-red vs. White
  misc_feature: MA Experiment 20001451 PARAMETER Experiment Name: At_Far-red-induction_P Parameter: Organism Value: A. thaliana
  misc_feature: MA Experiment 20001451 PARAMETER Experiment Name: At_Far-red-induction_P Parameter: Plant Line Value: Columbia
  misc_feature: MA Experiment 20001451 PARAMETER Experiment Name: At_Far-red-induction_P Parameter: Timepoint (hr) Value: 24
  misc_feature: MA Experiment 20001451 PARAMETER Experiment Name: At_Far-red-induction_P Parameter: Tissue Value: Whole Plant
atggaagctttgcacgaacccatttggagaaaagctgggatttttgaggcaataaaggcatcgatgtacaaaatccgtaaaaatcagtctttgcttctagctcttgttgagaaatggtgtcctgaaaccaaatctttcctcttcccttggggtgaagcaacgataacgcttgaggatgtgcttgtgcttttagggttttctgttcagggttctcctgtttttgcccctttagaaagctcagagatgagagattccgtagagaaactggagaaagctagattggagaatagaggccaggatgggctagtgagacaaaacttatgggtttcgagcttcttgggtagaggtgatcaaatggagcatgaagcttttcttgcattttggctttcgcagttcgtttttccggatatgtgtcgtcgttctatttcgacaaaagttctccctatggctgttcgtttagctagaggcgaaaggattgcttttgctcctgctgttctagctagactatacagagatttgggtcaaattcaagcgtctgctagagaaaagtccactccaaatgtcactctgaaatcactgtttaagttagtccaactctgggcatgggagagattcaagagtaccagtccaaaagctagagtgataccaaaaggtgaacctaggatatctcggtggcactcacaaacatctaagaatgtgagattgaatcttgttgattttgattggcgtccttacactaaacctttacagatttggaaccctcctcggttttaccctgaagaagctatgtggatgactgttgatgacaatcttgatgatggattcgtttcctttgctcgatgtatgagagtttctcagcttgttggggttggtattgtggaggattactatccaaaccgagtggcaatgcagttcgggctggctcaagatcttcctggtttggttactgatcatagcagcttcacagaaaaagaagcatgggatggttacaataagtctcttgatggtttaatgctttacataccttctcgtgtcgctacgacttctgttactgaaagatatcgtgactggtggttgaaatctatttcaaagttttttctggattcttcagaatcaactgaaacgtttgatgcaagtaacacaattgatcattatgataataatgatgaggatgatgagctactgcctttgggtcaagtgcttcagaattttggagagagctttcttaagaaactcgaaagatgtagggcgcgtaggctagctaaaaatcatcgattcaagataaataaagacaagattggtgatggtggtgcatcagcttcaacagaattaccacttagtcagttgtttaaaaaggaggtgatgaagagaacaagtgagcatttgaaaaacaagggacggaagcgagctcgtgaggatgatgtaagttctatggatcacaaagatgatgacgttaccatcgctcagatgatcaaatctagaaggaatgatgaatgtggaagcaaaggaaagaagagtagtatggttcaaagaccatctaacgaaaacaactcttcagatcctcttgttgattctaatggaggtataattgacatttctgtgtcaccatcagagacaaggcaaacgtgtgatgatgagcttcatgtagatagaagcaagaaagaagagttggtccatgaagatgaagaaaagcaaagaagcaatgagaatttgtgcagtgaagctgagaaagaagaagatattgatgaaagattgaaacagagaaagcttgctatagaggagatagcattgaagctggagacacgtgttatggaggttgagaagaggttatgtcaaggtagaagagacagaacaaagatagatatggtaaggaagcagaagtacgggaaggtagtgttggtttcttgcatcgcgcttctagcaaccggactcattgccgactttctctgggctacttctcatcgattctcctccgccgcaatctccgccggattatctctaccttcttcacttaccaccgtaatcgttcctggccaggagaaagatacaaagaagaagaaggatagtgtgaaggaaaggaaactgtctaatacgtttcaagatttgcctgctcctgaattgaaatgggagaagatggcagcttcacctgtacctcgtctagacggagctgcaattcagattagggatcttctttatgtatttgctggatatggaaccattgatcttgtgcattcacatgtcgatatctacaatttcactgataactcgtggggaggaagattcaatatgccaaaagatatggcgcattctcatttagggatggtaacggatgggcgatacatttatattgttactggtcagtttggtccacaatgcagaggtcctacagctaaaacatttgtgcttgatactgatacaaatacatggaaggactttgttcctttaccagttcctaggtatgcaccagctactcagctttggagaggaagacttcatgtgatgggtggaagcaaagagaatcgatttacaccaggacttgaacattggagcatcgcagtgaaagatggcaaatctttggaaaatgagtggagaagtgaaatcccgatccctcgtggaggacctcacagggcatgtgtagtagttgatgaccgactatttgtaattggtggtcaagaaggtgatttcatggctaaacctggatctccaatcttcaaatgctcacgccgtatggaggtggtattcagtgatgtctacatgttggatgaggaaatgaaatggaaagttatgccgccgatgccaaaaccggactcccatatcgaatttgcttggaaagtcgttaataactccattgtaatcgttggaggcacaacagagaaacatcctgaaaccaaaaagatggttctcgttggtgaaatcttccagttcaacttaaatacactgaaatggtatgtgattgggaaattaccataccgtgtgaagacaacgctggctgggtattgggatggacagttatacttcacctcaggacaaagagacaaaggtccagatgatcccgccccgaggaaggtcatggcagagatgtggagaaccaaattgatactcaacccatga

SEQ ID NO: 71539 - protein, 1036 aa, Arabidopsis thaliana
  peptide (1)..(1036): Ceres Seq. ID no. 4268264
  misc_feature (872)..(933): Pfam Name: Kelch motif Pfam Description: Kelch motif
  misc_feature (622)..(1036): Homolog of NCBI NO: 28416695 NR Description: At1g51540 [Arabidopsis thaliana]
  misc_feature (631)..(1034): Homolog of NCBI NO: 29150199 NR Description: hypothetical protein [Oryza sativa (indica
  misc_feature (631)..(1034): Homolog of NCBI NO: 38344229 NR Description: OJ991113_30.6 [Oryza sativa (japonica
  misc_feature (1)..(619): Homolog of NCBI NO: 15238856 NR Description: putative protein; protein id: At5g18510.1
  misc_feature (638)..(1032): Homolog of NCBI NO: 18405273 NR Description: expressed protein; protein id: At3g27220.1, by cDNA: gi_15081754, supported by cDNA: gi_15912244 [Arabidopsis >gi|9294215|dbj|BAB02117.1| gene_id:K17E12.4~unknown protein
  misc_feature (638)..(1032): Homolog of NCBI NO: 15912245 NR Description: AT3g27220/K17E12_4 [Arabidopsis thaliana]
  misc_feature (1)..(562): Homolog of NCBI NO: 15223656 NR Description: hypothetical protein; protein id: At1g50830.1
  misc_feature (1)..(520): Homolog of NCBI NO: 22328697 NR Description: hypothetical protein; protein id: At4g16050.1, by cDNA: gi_19699014 [Arabidopsis thaliana] unknown protein [Arabidopsis thaliana]
  misc_feature (2)..(520): Homolog of NCBI NO: 7485155 NR Description: hypothetical protein d14065w - Arabidopsis >gi|2244963|emb|CAB10384.1| hypothetical protein [Arabidopsis >gi|7268354|emb|CAB78647.1| hypothetical protein [Arabidopsis
  misc_feature (1)..(564): Homolog of NCBI NO: 15223653 NR Description: hypothetical protein; protein id: At1g50790.1
MEALHEPIWRKAGIFEAIKASMYKIRKNQSLLLALVEKWCPETKSFLFPWGEATITLEDVLVLLGFSVQGSPVFAPLESSEMRDSVEKLEKARLENRGQDGLVRQNLWVSSFLGRGDQMEHEAFLAFWLSQFVFPDMCRRSISTKVLPMAVRLARGERIAFAPAVLARLYRDLGQIQASAREKSTPNVTLKSLFKLVQLWAWERFKSTSPKARVIPKGEPRISRWHSQTSKNVRLNLVDFDWRPYTKPLQIWNPPRFYPEEAMWMTVDDNLDDGFVSFARCMRVSQLVGVGIVEDYYPNRVAMQFGLAQDLPGLVTDHSSFTEKEAWDGYNKSLDGLMLYIPSRVATTSVTERYRDWWLKSISKFFLDSSESTETFDASNTIDHYDNNDEDDELLPLGQVLQNFGESFLKKLERCRARRLAKNHRFKINKDKIGDGGASASTELPLSQLFKKEVMKRTSEHLKNKGRKRAREDDVSSMDHKDDDVTIAQMIKSRRNDECGSKGKKSSMVQRPSNENNSSDPLVDSNGGIIDISVSPSETRQTCDDELHVDRSKKEELVHEDEEKQRSNENLCSEAEKEEDIDERLKQRKLAIEEIALKLETRVMEVEKRLCQGRRDRTKIDMVRKQKYGKVVLVSCIALLATGLIADFLWATSHRFSSAAISAGLSLPSSLTTVIVPGQEKDTKKKKDSVKERKLSNTFQDLPAPELKWEKMAASPVPRLDGAAIQIRDLLYVFAGYGTIDLVHSHVDIYNFTDNSWGGRFNMPKDMAHSHLGMVTDGRYIYIVTGQFGPQCRGPTAKTFVLDTDTNTWKDFVPLPVPRYAPATQLWRGRLHVMGGSKENRFTPGLEHWSIAVKDGKSLENEWRSEIPIPRGGPHRACVVVDDRLFVIGGQEGDFMAKPGSPIFKCSRRMEVVFSDVYMLDEEMKWKVMPPMPKPDSHIEFAWKVVNNSIVIVGGTTEKHPETKKMVLVGEIFQFNLNTLKWYVIGKLPYRVKTTLAGYWDGQLYFTSGQRDKGPDDPAPRKVMAEMWRTKLILNP

SEQ ID NO: 71540 - protein, 1015 aa, Arabidopsis thaliana
  peptide (1)..(1015): Ceres Seq. ID no. 4268265
  misc_feature (851)..(912): Pfam Name: Kelch motif Pfam Description: Kelch motif
  misc_feature (601)..(1015): Homolog of NCBI NO: 28416695 NR Description: At1g51540 [Arabidopsis thaliana]
  misc_feature (610)..(1013): Homolog of NCBI NO: 29150199 NR Description: hypothetical protein [Oryza sativa (indica
  misc_feature (610)..(1013): Homolog of NCBI NO: 38344229 NR Description: OJ991113_30.6 [Oryza sativa (japonica
  misc_feature (1)..(598): Homolog of NCBI NO: 15238856 NR Description: putative protein; protein id: At5g18510.1
  misc_feature (617)..(1011): Homolog of NCBI NO: 18405273 NR Description: expressed protein; protein id: At3g27220.1, by cDNA: gi_15081754, supported by cDNA: gi_15912244 [Arabidopsis >gi|9294215|dbj|BAB02117.1| gene_id:K17E12.4~unknown protein
  misc_feature (617)..(1011): Homolog of NCBI NO: 15912245 NR Description: AT3g27220/K17E12_4 [Arabidopsis thaliana]
  misc_feature (1)..(541): Homolog of NCBI NO: 15223656 NR Description: hypothetical protein; protein id: At1g50830.1
  misc_feature (1)..(499): Homolog of NCBI NO: 22328697 NR Description: hypothetical protein; protein id: At4g16050.1, by cDNA: gi_19699014 [Arabidopsis thaliana] unknown protein [Arabidopsis thaliana]
  misc_feature (1)..(499): Homolog of NCBI NO: 7485155 NR Description: hypothetical protein d14065w - Arabidopsis >gi|2244963|emb|CAB10384.1| hypothetical protein [Arabidopsis >gi|7268354|emb|CAB78647.1| hypothetical protein [Arabidopsis
  misc_feature (1)..(543): Homolog of NCBI NO: 15223653 NR Description: hypothetical protein; protein id: At1g50790.1
MYKIRKNQSLLLALVEKWCPETKSFLFPWGEATITLEDVLVLLGFSVQGSPVFAPLESSEMRDSVEKLEKARLENRGQDGLVRQNLWVSSFLGRGDQMEHEAFLAFWLSQFVFPDMCRRSISTKVLPMAVRLARGERIAFAPAVLARLYRDLGQIQASAREKSTPNVTLKSLFKLVQLWAWERFKSTSPKARVIPKGEPRISRWHSQTSKNVRLNLVDFDWRPYTKPLQIWNPPRFYPEEAMWMTVDDNLDDGFVSFARCMRVSQLVGVGIVEDYYPNRVAMQFGLAQDLPGLVTDHSSFTEKEAWDGYNKSLDGLMLYIPSRVATTSVTERYRDWWLKSISKFFLDSSESTETFDASNTIDHYDNNDEDDELLPLGQVLQNFGESFLKKLERCRARRLAKNHRFKINKDKIGDGGASASTELPLSQLFKKEVMKRTSEHLKNKGRKRAREDDVSSMDHKDDDVTIAQMIKSRRNDECGSKGKKSSMVQRPSNENNSSDPLVDSNGGIIDISVSPSETRQTCDDELHVDRSKKEELVHEDEEKQRSNENLCSEAEKEEDIDERLKQRKLAIEEIALKLETRVMEVEKRLCQGRRDRTKIDMVRKQKYGKVVLVSCIALLATGLIADFLWATSHRFSSAAISAGLSLPSSLTTVIVPGQEKDTKKKKDSVKERKLSNTFQDLPAPELKWEKMAASPVPRLDGAAIQIRDLLYVFAGYGTIDLVHSHVDIYNFTDNSWGGRFNMPKDMAHSHLGMVTDGRYIYIVTGQFGPQCRGPTAKTFVLDTDTNTWKDFVPLPVPRYAPATQLWRGRLHVMGGSKENRFTPGLEHWSIAVKDGKSLENEWRSEIPIPRGGPHRACVVVDDRLFVIGGQEGDFMAKPGSPIFKCSRRMEVVFSDVYMLDEEMKWKVMPPMPKPDSHIEFAWKVVNNSIVIVGGTTEKHPETKKMVLVGEIFQFNLNTLKWYVIGKLPYRVKTTLAGYWDGQLYFTSGQRDKGPDDPAPRKVMAEMWRTKLILNP

SEQ ID NO: 71541 - protein, 955 aa, Arabidopsis thaliana
  peptide (1)..(955): Ceres Seq. ID no. 4268266
  misc_feature (791)..(852): Pfam Name: Kelch motif Pfam Description: Kelch motif
  misc_feature (541)..(955): Homolog of NCBI NO: 28416695 NR Description: At1g51540 [Arabidopsis thaliana]
  misc_feature (550)..(953): Homolog of NCBI NO: 29150199 NR Description: hypothetical protein [Oryza sativa (indica
  misc_feature (550)..(953): Homolog of NCBI NO: 38344229 NR Description: OJ991113_30.6 [Oryza sativa (japonica
  misc_feature (1)..(538): Homolog of NCBI NO: 15238856 NR Description: putative protein; protein id: At5g18510.1
  misc_feature (557)..(951): Homolog of NCBI NO: 18405273 NR Description: expressed protein; protein id: At3g27220.1, by cDNA: gi_15081754, supported by cDNA: gi_15912244 [Arabidopsis >gi|9294215|dbj|BAB02117.1| gene_id:K17E12.4~unknown protein
  misc_feature (557)..(951): Homolog of NCBI NO: 15912245 NR Description: AT3g27220/K17E12_4 [Arabidopsis thaliana]
  misc_feature (1)..(481): Homolog of NCBI NO: 15223656 NR Description: hypothetical protein; protein id: At1g50830.1
  misc_feature (1)..(439): Homolog of NCBI NO: 22328697 NR Description: hypothetical protein; protein id: At4g16050.1, by cDNA: gi_19699014 [Arabidopsis thaliana] unknown protein [Arabidopsis thaliana]
  misc_feature (1)..(439): Homolog of NCBI NO: 7485155 NR Description: hypothetical protein d14065w - Arabidopsis >gi|2244963|emb|CAB10384.1| hypothetical protein [Arabidopsis >gi|7268354|emb|CAB78647.1| hypothetical protein [Arabidopsis
  misc_feature (1)..(483): Homolog of NCBI NO: 15223653 NR Description: hypothetical protein; protein id: At1g50790.1
MRDSVEKLEKARLENRGQDGLVRQNLWVSSFLGRGDQMEHEAFLAFWLSQFVFPDMCRRSISTKVLPMAVRLARGERIAFAPAVLARLYRDLGQIQASAREKSTPNVTLKSLFKLVQLWAWERFKSTSPKARVIPKGEPRISRWHSQTSKNVRLNLVDFDWRPYTKPLQIWNPPRFYPEEAMWMTVDDNLDDGFVSFARCMRVSQLVGVGIVEDYYPNRVAMQFGLAQDLPGLVTDHSSFTEKEAWDGYNKSLDGLMLYIPSRVATTSVTERYRDWWLKSISKFFLDSSESTETFDASNTIDHYDNNDEDDELLPLGQVLQNFGESFLKKLERCRARRLAKNHRFKINKDKIGDGGASASTELPLSQLFKKEVMKRTSEHLKNKGRKRAREDDVSSMDHKDDDVTIAQMIKSRRNDECGSKGKKSSMVQRPSNENNSSDPLVDSNGGIIDISVSPSETRQTCDDELHVDRSKKEELVHEDEEKQRSNENLCSEAEKEEDIDERLKQRKLAIEEIALKLETRVMEVEKRLCQGRRDRTKIDMVRKQKYGKVVLVSCIALLATGLIADFLWATSHRFSSAAISAGLSLPSSLTTVIVPGQEKDTKKKKDSVKERKLSNTFQDLPAPELKWEKMAASPVPRLDGAAIQIRDLLYVFAGYGTIDLVHSHVDIYNFTDNSWGGRFNMPKDMAHSHLGMVTDGRYIYIVTGQFGPQCRGPTAKTFVLDTDTNTWKDFVPLPVPRYAPATQLWRGRLHVMGGSKENRFTPGLEHWSIAVKDGKSLENEWRSEIPIPRGGPHRACVVVDDRLFVIGGQEGDFMAKPGSPIFKCSRRMEVVFSDVYMLDEEMKWKVMPPMPKPDSHIEFAWKVVNNSIVIVGGTTEKHPETKKMVLVGEIFQFNLNTLKWYVIGKLPYRVKTTLAGYWDGQLYFTSGQRDKGPDDPAPRKVMAEMWRTKLILNP

SEQ ID NO: 71542 - DNA, 2430 bp, Arabidopsis thaliana
  misc_feature (1)..(2430): Ceres Seq. ID no. 4268292
  misc_feature: MA Experiment ID: 20000171 Result: Up-regulated in Transcription
  misc_feature: MA Experiment 20000171 PARAMETER Experiment Name: At_42deg_Heat_P Parameter: Age (day) Value: 14
  misc_feature: MA Experiment 20000171 PARAMETER Experiment Name: At_42deg_Heat_P Parameter: Organism Value: A. thaliana
  misc_feature: MA Experiment 20000171 PARAMETER Experiment Name: At_42deg_Heat_P Parameter: Plant Line Value: WS
  misc_feature: MA Experiment 20000171 PARAMETER Experiment Name: At_42deg_Heat_P Parameter: Temperature (deg C) Value: 42 vs. 22
  misc_feature: MA Experiment 20000171 PARAMETER Experiment Name: At_42deg_Heat_P Parameter: Timepoint (hr) Value: 1
  misc_feature: MA Experiment 20000171 PARAMETER Experiment Name: At_42deg_Heat_P Parameter: Tissue Value: Aerial
  misc_feature: MA Experiment ID: 20000173 Result: Up-regulated in Transcription
  misc_feature: MA Experiment 20000173 PARAMETER Experiment Name: At_42deg_Heat_P Parameter: Age (day) Value: 14
  misc_feature: MA Experiment 20000173 PARAMETER Experiment Name: At_42deg_Heat_P Parameter: Organism Value: A. thaliana
  misc_feature: MA Experiment 20000173 PARAMETER Experiment Name: At_42deg_Heat_P Parameter: Plant Line Value: WS
  misc_feature: MA Experiment 20000173 PARAMETER Experiment Name: At_42deg_Heat_P Parameter: Temperature (deg C) Value: 42 vs. 22
  misc_feature: MA Experiment 20000173 PARAMETER Experiment Name: At_42deg_Heat_P Parameter: Timepoint (hr) Value: 6
  misc_feature: MA Experiment 20000173 PARAMETER Experiment Name: At_42deg_Heat_P Parameter: Tissue Value: Aerial
atggagagacgtaacgaagcgttgatgattaggaaatcgaagtggcagtacccacaagtgggttctccgacgccgaggattcttcagttgccacggaggcatagtgttcgacgaaatgcttcaaagggcttgaagacaacagtttcttcgtcgtctcagaaggatcggagagtgaaactggaggttttgtttcatcaagagaggacttttgatcggggggcatcgattgtgatggtgaatgataatggtggtgagaagaaggatgaagaagagggaaggagaagagggaaagttgcagatgggagagagattggtgtgtctgggttgtcttcttcttctgcggttgatgaagttgaggaagctaagtggaggtttcaagcggagatgttgagatcagagtgtaatttgttaagaatagaaaaagagattgctttgaagaagatggagaggaggaagaagcgaatggagcggacgctgagatctgctgttcttactcttctatctgggaaagagagaatctctgaagggacgaaagagagcaaggttttggaagatgagataagctatttggttgagaaactgaatgagttaaagtctccaaaggttaaggacatggaagctagaaacttcaaacataattttgataagcaagcttctgttttaagaagagagctagagaggttcgatgaagcagtttccgaagaggtttgtgtcaaagggattcagaaaatggcagaggctagcttctccgtccattctgatcaaaacgctcttaggaacaataatggaaatatagatacattgagtagtaaaatggaggcgttgtcaaaaggggttttgttggaaagaatggagaaagaatatggatcgagtctcgttgcaccgtcttcaagctctgtacaagacatgtattgtaagggaattaaagcgcatgaggaaaagaaagactgttctagacactgcaaagtagttatgaggaagattgcggatgaagtaagagctgaagcagagcaatggtcacaaatgcaagagatgttgaatcaagtgagaaaagaaatggaggaacttcaatcttgtcgtgatttctggcaaaaccgcgccctcgaagcagattccgagatacaaaatctacattcctctgttgaaggatggcgaagaaaggcgttatcatcagaggcaaagttgaaaaacctacaagcagaggtttgcggattacaagaagagatcaagagactgagaaaggaagataagttagaaccagagaagaacaaattgccatcagagtcagagaaaagggtattgatttgtcggttaaaagaaaaccgacatagcaacaatggagattggtccaagtacagtgaaggaagaacaacaaaaccgtcgagctcgagaccgcctttgagggaagttaagaacagttcagtcatagcaaggcagagaaactccaatatcatgaaaatcgaagaagagaagacagtgtgtgtgacaggagcttcaggttacattgcttcatggatcgttaagcttcttcttctccgtggttacaccgttaaagcctctgttcgtgatccaaatgatccaaggaaaacagagcatttgcttgcattggaaggagcagaggaaaggcttaaattgttcaaagcaaacttgttagaagaaggctctttcgattcagcaatcgatggttgcgaaggagttttccacaccgcatcgccattctatcatgacgtcaaggaccctcaggctgagttacttgatccggcagtgaaaggaacaatcaatgttctaagctcttgtttgaagacttcctcggttaagagagtcgtcttaacctcatcgatagcagctgttgctttcaatggaatgcctcgaacacccgaaaccatagttgacgaaacttggttcgccgatcctgactattgcagagcttccaagctatggtatgtactctcgaagacattagctgaaaacgcagcgtggaaattcgcaaaagagaacaatttacagctggtttcgataaatccggctatggtgattggtcctctcttacagccaacgctaaacactagtgctgctgcagtactaagcttgatcaaaggagcacaaacgtttcctaatgcgacgttcgggtgggttaacgttaaagatgtagcgaacgctcatattcaagcgtttgagaatccagatgctgatgggagatactgtttagtggagagagttgctcattactctgaagttgttaacattttgcatgatctttaccctgattttcaactccctgagaagtgtgcagatgaaaagatatatattccaacatataaagtgtctaaagagaaagcagagtctcttggggttgagtttgtgccattggaagttagcattaaagagactgtagagagcttgagagataaagggttcatcagattttga

SEQ ID NO: 71543 - protein, 809 aa, Arabidopsis thaliana
  peptide (1)..(809): Ceres Seq. ID no. 4268293
  misc_feature (1)..(487): Pfam Name: Myosin tail Pfam Description: Myosin tail
  misc_feature (1)..(487): Homolog of NCBI NO: 30694961 NR Description: myosin-related [Arabidopsis thaliana]
  misc_feature (485)..(809): Homolog of NCBI NO: 30694964 NR Description: cinnamyl-alcohol dehydrogenase (CAD), putative
  misc_feature (491)..(809): Homolog of NCBI NO: 7488627 NR Description: probable cinnamyl-alcohol dehydrogenase (EC - apple tree >gi|2981475|gb|AAC06319.1| putative cinnamyl alcohol
  misc_feature (489)..(809): Homolog of NCBI NO: 15239741 NR Description: cinnamyl-alcohol dehydrogenase - like protein;
  misc_feature (489)..(809): Homolog of NCBI NO: 21594240 NR Description: cinnamyl-alcohol dehydrogenase-like protein
  misc_feature (491)..(809): Homolog of NCBI NO: 7431409 NR Description: cinnamyl-alcohol dehydrogenase (EC 1.1.1.195) - tree >gi|1143445|emb|CAA61275.1| cinnamyl alcohol dehydrogenase
  misc_feature (491)..(809): Homolog of NCBI NO: 37029996 NR Description: NADPH-dependent cinnamyl alcohol dehydrogenase
  misc_feature (491)..(809): Homolog of NCBI NO: 7431406 NR Description: probable cinnamyl-alcohol dehydrogenase (EC
  misc_feature (491)..(809): Homolog of NCBI NO: 34913420 NR Description: putative cinnamyl-alcohol dehydrogenase [Oryza
  misc_feature (491)..(808): Homolog of NCBI NO: 5852203 NR Description: aldehyde reductase [Vigna radiata]
MERRNEALMIRKSKWQYPQVGSPTPRILQLPRRHSVRRNASKGLKTTVSSSSQKDRRVKLEVLFHQERTFDRGASIVMVNDNGGEKKDEEEGRRRGKVADGREIGVSGLSSSSAVDEVEEAKWRFQAEMLRSECNLLRIEKEIALKKMERRKKRMERTLRSAVLTLLSGKERISEGTKESKVLEDEISYLVEKLNELKSPKVKDMEARNFKHNFDKQASVLRRELERFDEAVSEEVCVKGIQKMAEASFSVHSDQNALRNNNGNIDTLSSKMEALSKGVLLERMEKEYGSSLVAPSSSSVQDMYCKGIKAHEEKKDCSRHCKVVMRKIADEVRAEAEQWSQMQEMLNQVRKEMEELQSCRDFWQNRALEADSEIQNLHSSVEGWRRKALSSEAKLKNLQAEVCGLQEEIKRLRKEDKLEPEKNKLPSESEKRVLICRLKENRHSNNGDWSKYSEGRTTKPSSSRPPLREVKNSSVIARQRNSNIMKIEEEKTVCVTGASGYIASWIVKLLLLRGYTVKASVRDPNDPRKTEHLLALEGAEERLKLFKANLLEEGSFDSAIDGCEGVFHTASPFYHDVKDPQAELLDPAVKGTINVLSSCLKTSSVKRVVLTSSIAAVAFNGMPRTPETIVDETWFADPDYCRASKLWYVLSKTLAENAAWKFAKENNLQLVSINPAMVIGPLLQPTLNTSAAAVLSLIKGAQTFPNATFGWVNVKDVANAHIQAFENPDADGRYCLVERVAHYSEVVNILHDLYPDFQLPEKCADEKIYIPTYKVSKEKAESLGVEFVPLEVSIKETVESLRDKGFIRF

SEQ ID NO: 71544 - protein, 801 aa, Arabidopsis thaliana
  peptide (1)..(801): Ceres Seq. ID no. 4268294
  misc_feature (1)..(479): Pfam Name: Myosin tail Pfam Description: Myosin tail
  misc_feature (1)..(479): Homolog of NCBI NO: 30694961 NR Description: myosin-related [Arabidopsis thaliana]
  misc_feature (477)..(801): Homolog of NCBI NO: 30694964 NR Description: cinnamyl-alcohol dehydrogenase (CAD), putative
  misc_feature (483)..(801): Homolog of NCBI NO: 7488627 NR Description: probable cinnamyl-alcohol dehydrogenase (EC - apple tree >gi|2981475|gb|AAC06319.1| putative cinnamyl alcohol
  misc_feature (481)..(801): Homolog of NCBI NO: 15239741 NR Description: cinnamyl-alcohol dehydrogenase - like protein;
  misc_feature (481)..(801): Homolog of NCBI NO: 21594240 NR Description: cinnamyl-alcohol dehydrogenase-like protein
  misc_feature (483)..(801): Homolog of NCBI NO: 7431409 NR Description: cinnamyl-alcohol dehydrogenase (EC 1.1.1.195) - tree >gi|1143445|emb|CAA61275.1| cinnamyl alcohol dehydrogenase
  misc_feature (483)..(801): Homolog of NCBI NO: 37029996 NR Description: NADPH-dependent cinnamyl alcohol dehydrogenase
  misc_feature (483)..(801): Homolog of NCBI NO: 7431406 NR Description: probable cinnamyl-alcohol dehydrogenase (EC
  misc_feature (483)..(801): Homolog of NCBI NO: 34913420 NR Description: putative cinnamyl-alcohol dehydrogenase [Oryza
  misc_feature (483)..(800): Homolog of NCBI NO: 5852203 NR Description: aldehyde reductase [Vigna radiata]
MIRKSKWQYPQVGSPTPRILQLPRRHSVRRNASKGLKTTVSSSSQKDRRVKLEVLFHQERTFDRGASIVMVNDNGGEKKDEEEGRRRGKVADGREIGVSGLSSSSAVDEVEEAKWRFQAEMLRSECNLLRIEKEIALKKMERRKKRMERTLRSAVLTLLSGKERISEGTKESKVLEDEISYLVEKLNELKSPKVKDMEARNFKHNFDKQASVLRRELERFDEAVSEEVCVKGIQKMAEASFSVHSDQNALRNNNGNIDTLSSKMEALSKGVLLERMEKEYGSSLVAPSSSSVQDMYCKGIKAHEEKKDCSRHCKVVMRKIADEVRAEAEQWSQMQEMLNQVRKEMEELQSCRDFWQNRALEADSEIQNLHSSVEGWRRKALSSEAKLKNLQAEVCGLQEEIKRLRKEDKLEPEKNKLPSESEKRVLICRLKENRHSNNGDWSKYSEGRTTKPSSSRPPLREVKNSSVIARQRNSNIMKIEEEKTVCVTGASGYIASWIVKLLLLRGYTVKASVRDPNDPRKTEHLLALEGAEERLKLFKANLLEEGSFDSAIDGCEGVFHTASPFYHDVKDPQAELLDPAVKGTINVLSSCLKTSSVKRVVLTSSIAAVAFNGMPRTPETIVDETWFADPDYCRASKLWYVLSKTLAENAAWKFAKENNLQLVSINPAMVIGPLLQPTLNTSAAAVLSLIKGAQTFPNATFGWVNVKDVANAHIQAFENPDADGRYCLVERVAHYSEVVNILHDLYPDFQLPEKCADEKIYIPTYKVSKEKAESLGVEFVPLEVSIKETVESLRDKGFIRF

SEQ ID NO: 71545 - protein, 732 aa, Arabidopsis thaliana
  peptide (1)..(732): Ceres Seq. ID no. 4268295
  misc_feature (1)..(410): Pfam Name: Myosin tail Pfam Description: Myosin tail
  misc_feature (1)..(410): Homolog of NCBI NO: 30694961 NR Description: myosin-related [Arabidopsis thaliana]
  misc_feature (408)..(732): Homolog of NCBI NO: 30694964 NR Description: cinnamyl-alcohol dehydrogenase (CAD), putative
  misc_feature (414)..(732): Homolog of NCBI NO: 7488627 NR Description: probable cinnamyl-alcohol dehydrogenase (EC - apple tree >gi|2981475|gb|AAC06319.1| putative cinnamyl alcohol
  misc_feature (412)..(732): Homolog of NCBI NO: 15239741 NR Description: cinnamyl-alcohol dehydrogenase - like protein;
  misc_feature (412)..(732): Homolog of NCBI NO: 21594240 NR Description: cinnamyl-alcohol dehydrogenase-like protein
  misc_feature (414)..(732): Homolog of NCBI NO: 7431409 NR Description: cinnamyl-alcohol dehydrogenase (EC 1.1.1.195) - tree >gi|1143445|emb|CAA61275.1| cinnamyl alcohol dehydrogenase
  misc_feature (414)..(732): Homolog of NCBI NO: 37029996 NR Description: NADPH-dependent cinnamyl alcohol dehydrogenase
  misc_feature (414)..(732): Homolog of NCBI NO: 7431406 NR Description: probable cinnamyl-alcohol dehydrogenase (EC
  misc_feature (414)..(732): Homolog of NCBI NO: 34913420 NR Description: putative cinnamyl-alcohol dehydrogenase [Oryza
  misc_feature (414)..(731): Homolog of NCBI NO: 5852203 NR Description: aldehyde reductase [Vigna radiata]
MVNDNGGEKKDEEEGRRRGKVADGREIGVSGLSSSSAVDEVEEAKWRFQAEMLRSECNLLRIEKEIALKKMERRKKRMERTLRSAVLTLLSGKERISEGTKESKVLEDEISYLVEKLNELKSPKVKDMEARNFKHNFDKQASVLRRELERFDEAVSEEVCVKGIQKMAEASFSVHSDQNALRNNNGNIDTLSSKMEALSKGVLLERMEKEYGSSLVAPSSSSVQDMYCKGIKAHEEKKDCSRHCKVVMRKIADEVRAEAEQWSQMQEMLNQVRKEMEELQSCRDFWQNRALEADSEIQNLHSSVEGWRRKALSSEAKLKNLQAEVCGLQEEIKRLRKEDKLEPEKNKLPSESEKRVLICRLKENRHSNNGDWSKYSEGRTTKPSSSRPPLREVKNSSVIARQRNSNIMKIEEEKTVCVTGASGYIASWIVKLLLLRGYTVKASVRDPNDPRKTEHLLALEGAEERLKLFKANLLEEGSFDSAIDGCEGVFHTASPFYHDVKDPQAELLDPAVKGTINVLSSCLKTSSVKRVVLTSSIAAVAFNGMPRTPETIVDETWFADPDYCRASKLWYVLSKTLAENAAWKFAKENNLQLVSINPAMVIGPLLQPTLNTSAAAVLSLIKGAQTFPNATFGWVNVKDVANAHIQAFENPDADGRYCLVERVAHYSEVVNILHDLYPDFQLPEKCADEKIYIPTYKVSKEKAESLGVEFVPLEVSIKETVESLRDKGFIRF

SEQ ID NO: 71546 - DNA, 828 bp, Arabidopsis thaliana
  misc_feature (1)..(828): Ceres Seq. ID no. 4268296
  misc_feature: MA Experiment ID: 20000315 Result: Down-regulated in Transcription
  misc_feature: MA Experiment 20000315 PARAMETER Experiment Name: At_14day_Shoots-Roots_Sub_P Parameter: Age (day) Value: 14
  misc_feature: MA Experiment 20000315 PARAMETER Experiment Name: At_14day_Shoots-Roots_Sub_P Parameter: Organism Value: A. thaliana
  misc_feature: MA Experiment 20000315 PARAMETER Experiment Name: At_14day_Shoots-Roots_Sub_P Parameter: Plant Line Value: WS
  misc_feature: MA Experiment 20000315 PARAMETER Experiment Name: At_14day_Shoots-Roots_Sub_P Parameter: Tissue Value: Shoots vs. Whole Plant
  misc_feature: MA Experiment ID: 20000328 Result: Down-regulated in Transcription
  misc_feature: MA Experiment 20000328 PARAMETER Experiment Name: At_42deg_Heat_Sub_P Parameter: Age (day) Value: 14
  misc_feature: MA Experiment 20000328 PARAMETER Experiment Name: At_42deg_Heat_Sub_P Parameter: Organism Value: A. thaliana
  misc_feature: MA Experiment 20000328 PARAMETER Experiment Name: At_42deg_Heat_Sub_P Parameter: Plant Line Value: WS
  misc_feature: MA Experiment 20000328 PARAMETER Experiment Name: At_42deg_Heat_Sub_P Parameter: Temperature (deg C) Value: 42 vs. 22
  misc_feature: MA Experiment 20000328 PARAMETER Experiment Name: At_42deg_Heat_Sub_P Parameter: Timepoint (hr) Value: 6
  misc_feature: MA Experiment 20000328 PARAMETER Experiment Name: At_42deg_Heat_Sub_P Parameter: Tissue Value: Aerial
atgaaagggcttacgaggcttctcaattctctttcgcgacatacagcttccgtaacttgttctccatcttcttcttctcttctgatatcacgtcgctctctgtttatctcggcggcgacacactttccggtgaatttctcggagtcgataacaactaatgcttctcgtaactgttcgagatcttcttcatttcccttcaattggatcgagcaaaggaggacaatgtttatccaaacacaatcaacaccaaacccctcttctctaatgtttagtcctggtaaaccagttatggagattggaagtgctgacttccctaattctcgctctgctatgagttcacctttagctaaagccattttcgccattgatggtgtagttcgagttttctatgggtcagattttgttactgtaacaaagtcagatgatgtaacatgggatatactcaagcctgatatctttgcagtggtaatggacttttactcttctggtcagcctttgtttctcgactcacaagctacagctgccaaggataccgctattcatgaggatgactctgaaactgtagcaatgattaaggaactcttggagacgcgtatccgaccatcagtccaagatgatggaggggacatcgagtattgtggattcgatacggaaactggtatagtgaagcttagaatgcaaggagcttgtagcggttgtccaagttcatctgttactttgaaatccggaattgagaatatgcttatgcattatgtttccgaggtcaaaggtgttgagcaagaattcgatggtgaagaggagggaacatcttctggtccaatggagtag

SEQ ID NO: 71547 - protein, 275 aa, Arabidopsis thaliana
  peptide (1)..(275): Ceres Seq. ID no. 4268297
  misc_feature (191)..(261): Pfam Name: NifU-like domain Pfam Description: NifU-like domain
  misc_feature (1)..(275): Homolog of NCBI NO: 25405462 NR Description: unknown protein, 90320-88994 [imported] -
  misc_feature (1)..(274): Homolog of NCBI NO: 18402817 NR Description: expressed protein; protein id: At3g20970.1, by cDNA: gi_13899084, supported by cDNA: gi_18377515 [Arabidopsis >gi|9294004|dbj|BAB01907.1|
  misc_feature (11)..(275): Homolog of NCBI NO: 34897632 NR Description: hypothetical protein [Oryza sativa]
  misc_feature (7)..(275): Homolog of NCBI NO: 15223842 NR Description: unknown protein; protein id: At1g51390.1
  misc_feature (1)..(162): Homolog of NCBI NO: 15223842 NR Description: unknown protein; protein id: At1g51390.1
  misc_feature (72)..(263): Homolog of NCBI NO: 6554171 NR Description: TO42 [Drosophila melanogaster]
  misc_feature (72)..(263): Homolog of NCBI NO: 24643765 NR Description: CG32857-PA [Drosophila melanogaster]
  misc_feature (65)..(263): Homolog of NCBI NO: 31203061 NR Description: ENSANGP00000019230 [Anopheles gambiae]
  misc_feature (73)..(260): Homolog of NCBI NO: 37681825 NR Description: HIRA interacting protein 5 [Danio rerio]
  misc_feature (75)..(266): Homolog of NCBI NO: 26324295 NR Description: unnamed protein product [Mus musculus]
MKGLTRLLNSLSRHTASVTCSPSSSSLLISRRSLFISAATHFPVNFSESITTNASRNCSRSSSFPFNWIEQRRTMFIQTQSTPNPSSLMFSPGKPVMEIGSADFPNSRSAMSSPLAKAIFAIDGVVRVFYGSDFVTVTKSDDVTWDILKPDIFAVVMDFYSSGQPLFLDSQATAAKDTAIHEDDSETVAMIKELLETRIRPSVQDDGGDIEYCGFDTETGIVKLRMQGACSGCPSSSVTLKSGIENMLMHYVSEVKGVEQEFDGEEEGTSSGPME

SEQ ID NO: 71548 - protein, 201 aa, Arabidopsis thaliana; identical to SEQ ID NO: 45569
  peptide (1)..(201): Ceres Seq. ID no. 4268298
  misc_feature (117)..(187): Pfam Name: NifU-like domain Pfam Description: NifU-like domain
  misc_feature (1)..(201): Homolog of NCBI NO: 25405462 NR Description: unknown protein, 90320-88994 [imported] -
  misc_feature (1)..(200): Homolog of NCBI NO: 18402817 NR Description: expressed protein; protein id: At3g20970.1, by cDNA: gi_13899084, supported by cDNA: gi_18377515 [Arabidopsis >gi|9294004|dbj|BAB01907.1|
  misc_feature (1)..(201): Homolog of NCBI NO: 34897632 NR Description: hypothetical protein [Oryza sativa]
  misc_feature (1)..(201): Homolog of NCBI NO: 15223842 NR Description: unknown protein; protein id: At1g51390.1
  misc_feature (1)..(88): Homolog of NCBI NO: 15223842 NR Description: unknown protein; protein id: At1g51390.1
  misc_feature (1)..(189): Homolog of NCBI NO: 6554171 NR Description: TO42 [Drosophila melanogaster]
  misc_feature (1)..(189): Homolog of NCBI NO: 24643765 NR Description: CG32857-PA [Drosophila melanogaster]
  misc_feature (1)..(189): Homolog of NCBI NO: 31203061 NR Description: ENSANGP00000019230 [Anopheles gambiae]
  misc_feature (1)..(186): Homolog of NCBI NO: 37681825 NR Description: HIRA interacting protein 5 [Danio rerio]
  misc_feature (1)..(192): Homolog of NCBI NO: 26324295 NR Description: unnamed protein product [Mus musculus]

SEQ ID NO: 71549 - protein, 187 aa, Arabidopsis thaliana; identical to SEQ ID NO: 45570
  peptide (1)..(187): Ceres Seq. ID no. 4268299
  misc_feature (103)..(173): Pfam Name: NifU-like domain Pfam Description: NifU-like domain
  misc_feature (1)..(187): Homolog of NCBI NO: 25405462 NR Description: unknown protein, 90320-88994 [imported] -
  misc_feature (1)..(186): Homolog of NCBI NO: 18402817 NR Description: expressed protein; protein id: At3g20970.1, by cDNA: gi_13899084, supported by cDNA: gi_18377515 [Arabidopsis >gi|9294004|dbj|BAB01907.1|
  misc_feature (1)..(187): Homolog of NCBI NO: 34897632 NR Description: hypothetical protein [Oryza sativa]
  misc_feature (1)..(187): Homolog of NCBI NO: 15223842 NR Description: unknown protein; protein id: At1g51390.1
  misc_feature (1)..(74): Homolog of NCBI NO: 15223842 NR Description: unknown protein; protein id: At1g51390.1
  misc_feature (1)..(175): Homolog of NCBI NO: 6554171 NR Description: TO42 [Drosophila melanogaster]
  misc_feature (1)..(175): Homolog of NCBI NO: 24643765 NR Description: CG32857-PA [Drosophila melanogaster]
  misc_feature (1)..(175): Homolog of NCBI NO: 31203061 NR Description: ENSANGP00000019230 [Anopheles gambiae]
  misc_feature (1)..(172): Homolog of NCBI NO: 37681825 NR Description: HIRA interacting protein 5 [Danio rerio]
  misc_feature (1)..(178): Homolog of NCBI NO: 26324295 NR Description: unnamed protein product [Mus musculus]

SEQ ID NO: 71550 - DNA, 963 bp, Arabidopsis thaliana
  misc_feature (1)..(963): Ceres Seq. ID no. 4268818
  misc_feature: MA Experiment ID: 20000315 Result: Up-regulated in Transcription
  misc_feature: MA Experiment 20000315 PARAMETER Experiment Name: At_14day_Shoots-Roots_Sub_P Parameter: Age (day) Value: 14
  misc_feature: MA Experiment 20000315 PARAMETER Experiment Name: At_14day_Shoots-Roots_Sub_P Parameter: Organism Value: A. thaliana
  misc_feature: MA Experiment 20000315 PARAMETER Experiment Name: At_14day_Shoots-Roots_Sub_P Parameter: Plant Line Value: WS
  misc_feature: MA Experiment 20000315 PARAMETER Experiment Name: At_14day_Shoots-Roots_Sub_P Parameter: Tissue Value: Shoots vs. Whole Plant
  misc_feature: MA Experiment ID: 20000328 Result: Down-regulated in Transcription
  misc_feature: MA Experiment 20000328 PARAMETER Experiment Name: At_42deg_Heat_Sub_P Parameter: Age (day) Value: 14
  misc_feature: MA Experiment 20000328 PARAMETER Experiment Name: At_42deg_Heat_Sub_P Parameter: Organism Value: A. thaliana
  misc_feature: MA Experiment 20000328 PARAMETER Experiment Name: At_42deg_Heat_Sub_P Parameter: Plant Line Value: WS
  misc_feature: MA Experiment 20000328 PARAMETER Experiment Name: At_42deg_Heat_Sub_P Parameter: Temperature (deg C) Value: 42 vs. 22
  misc_feature: MA Experiment 20000328 PARAMETER Experiment Name: At_42deg_Heat_Sub_P Parameter: Timepoint (hr) Value: 6
  misc_feature: MA Experiment 20000328 PARAMETER Experiment Name: At_42deg_Heat_Sub_P Parameter: Tissue Value: Aerial
atgaagattcaaattatatggctcactttggttttaatcgtcgttgaagctaatgcagtcaaacaagggaaaaacgcaacgatcccggccctaatagtttttggagattcaataatggatacaggaaataacaataatcttcccactcttcttaaatgtaacttccctccatacggtaaagattatcctggaggctttgccactggaagattttctgatggaagagttccttctgatcttattgcggaaaaaataggattggctaagacattaccagcatatatgaatccatatttgaagccagaggatcttcttaaaggtgtaacatttgcatcaggaggaactggttatgatccattgacagcaaaaattatgtcagtgatatcagtgtgggatcaactcatatatttcaaagaatatatatcaaagatcaagaggcatttcggagaagaaaaagcaaaagatatcttggaacatagtttctttcttgtggtgtctagtagcaatgaccttgctcacacttatttagctcaagctcatagatatgatcgtacctcttatgccaatttcttggctgactctgctgttcatttcgtgagagaattacacaagcttggagctcaaaaaattggagtgtttagtgcagtccctgttggttgtgttccactccaaagaacagtttttggagataaagagttggatggtgttatcctttacattaatgtttatgatactcttttcgacatgatccaacaccctaaaaaatacggttttgaagtggctgatagaggatgttgcggtaaaggactgctcacgatctcctatttatgtaactcattgaaccaatttacgtgttctaactcttcagcttatatattttgggatagctatcatccaagtaaaagagcttatcaagttattgtcgacaatttacttgacaaatatttgagcaaagtatattga

SEQ ID NO: 71551 - protein, 320 aa, Arabidopsis thaliana
  peptide (1)..(320): Ceres Seq. ID no. 4268819
  misc_feature (31)..(311): Pfam Name: GDSL-like Lipase/Acylhydrolase Pfam Description: GDSL-like Lipase/Acylhydrolase
  misc_feature (1)..(320): Homolog of NCBI NO: 15229719 NR Description: putative protein; protein id: At3g43570.1 thaliana] >gi|9967506|emb|CAC05631.1| putative protein
  misc_feature (1)..(229): Homolog of NCBI NO: 18406327 NR Description: proline-rich protein, putative; protein id:
  misc_feature (230)..(320): Homolog of NCBI NO: 18406327 NR Description: proline-rich protein, putative; protein id:
  misc_feature (1)..(229): Homolog of NCBI NO: 15217977 NR Description: proline-rich protein, putative; protein id:
  misc_feature (230)..(320): Homolog of NCBI NO: 15217977 NR Description: proline-rich protein, putative; protein id:
  misc_feature (39)..(320): Homolog of NCBI NO: 22330312 NR Description: similar to proline-rich protein, putative;
  misc_feature (1)..(202): Homolog of NCBI NO: 15229307 NR Description: putative protein; protein id: At3g43550.1
  misc_feature (39)..(232): Homolog of NCBI NO: 15231934 NR Description: hypothetical protein; protein id: At3g14820.1
  misc_feature (231)..(315): Homolog of NCBI NO: 15231934 NR Description: hypothetical protein; protein id: At3g14820.1
  misc_feature (6)..(254): Homolog of NCBI NO: 15222901 NR Description: family II extracellular lipase 3 (EXL3); protein At1g75900.1, supported by cDNA: gi_15054385 [Arabidopsis >gi|15054386|gb|AAK30018.1| family II lipase EXL3 [Arabidopsis
MKIQIIWLTLVLIVVEANAVKQGKNATIPALIVFGDSIMDTGNNNNLPTLLKCNFPPYGKDYPGGFATGRFSDGRVPSDLIAEKIGLAKTLPAYMNPYLKPEDLLKGVTFASGGTGYDPLTAKIMSVISVWDQLIYFKEYISKIKRHFGEEKAKDILEHSFFLVVSSSNDLAHTYLAQAHRYDRTSYANFLADSAVHFVRELHKLGAQKIGVFSAVPVGCVPLQRTVFGDKELDGVILYINVYDTLFDMIQHPKKYGFEVADRGCCGKGLLTISYLCNSLNQFTCSNSSAYIFWDSYHPSKRAYQVIVDNLLDKYLSKVY

SEQ ID NO: 71552 - protein, 282 aa, Arabidopsis thaliana
  peptide (1)..(282): Ceres Seq. ID no. 4268820
  misc_feature (1)..(273): Pfam Name: GDSL-like Lipase/Acylhydrolase Pfam Description: GDSL-like Lipase/Acylhydrolase
  misc_feature (1)..(282): Homolog of NCBI NO: 22330312 NR Description: similar to proline-rich protein, putative;
  misc_feature (1)..(164): Homolog of NCBI NO: 15229307 NR Description: putative protein; protein id: At3g43550.1
  misc_feature (1)..(194): Homolog of NCBI NO: 15231934 NR Description: hypothetical protein; protein id: At3g14820.1
  misc_feature (1)..(191): Homolog of NCBI NO: 18406327 NR Description: proline-rich protein, putative; protein id:
  misc_feature (1)..(191): Homolog of NCBI NO: 15217977 NR Description: proline-rich protein, putative; protein id:
  misc_feature (192)..(282): Homolog of NCBI NO: 15217977 NR Description: proline-rich protein, putative; protein id:
  misc_feature (192)..(282): Homolog of NCBI NO: 18406327 NR Description: proline-rich protein, putative; protein id:
  misc_feature (1)..(282): Homolog of NCBI NO: 15229719 NR Description: putative protein; protein id: At3g43570.1 thaliana] >gi|9967506|emb|CAC05631.1| putative protein
  misc_feature (193)..(277): Homolog of NCBI NO: 15231934 NR Description: hypothetical protein; protein id: At3g14820.1
  misc_feature (1)..(216): Homolog of NCBI NO: 15222901 NR Description: family II extracellular lipase 3 (EXL3); protein At1g75900.1, supported by cDNA: gi_15054385 [Arabidopsis >gi|15054386|gb|AAK30018.1| family II lipase EXL3 [Arabidopsis
MDTGNNNNLPTLLKCNFPPYGKDYPGGFATGRFSDGRVPSDLIAEKIGLAKTLPAYMNPYLKPEDLLKGVTFASGGTGYDPLTAKIMSVISVWDQLIYFKEYISKIKRHFGEEKAKDILEHSFFLVVSSSNDLAHTYLAQAHRYDRTSYANFLADSAVHFVRELHKLGAQKIGVFSAVPVGCVPLQRTVFGDKELDGVILYINVYDTLFDMIQHPKKYGFEVADRGCCGKGLLTISYLCNSLNQFTCSNSSAYIFWDSYHPSKRAYQVIVDNLLDKYLSKVY

SEQ ID NO: 71553 - protein, 226 aa, Arabidopsis thaliana
  peptide (1)..(226): Ceres Seq. ID no. 4268821
  misc_feature (1)..(217): Pfam Name: GDSL-like Lipase/Acylhydrolase Pfam Description: GDSL-like Lipase/Acylhydrolase
  misc_feature (1)..(226): Homolog of NCBI NO: 15229719 NR Description: putative protein; protein id: At3g43570.1 thaliana] >gi|9967506|emb|CAC05631.1| putative protein
  misc_feature (1)..(135): Homolog of NCBI NO: 18406327 NR Description: proline-rich protein, putative; protein id:
  misc_feature (136)..(226): Homolog of NCBI NO: 18406327 NR Description: proline-rich protein, putative; protein id:
  misc_feature (1)..(135): Homolog of NCBI NO: 15217977 NR Description: proline-rich protein, putative; protein id:
  misc_feature (136)..(226): Homolog of NCBI NO: 15217977 NR Description: proline-rich protein, putative; protein id:
  misc_feature (1)..(226): Homolog of NCBI NO: 22330312 NR Description: similar to proline-rich protein, putative;
  misc_feature (1)..(108): Homolog of NCBI NO: 15229307 NR Description: putative protein; protein id: At3g43550.1
  misc_feature (1)..(138): Homolog of NCBI NO: 15231934 NR Description: hypothetical protein; protein id: At3g14820.1
  misc_feature (137)..(221): Homolog of NCBI NO: 15231934 NR Description: hypothetical protein; protein id: At3g14820.1
  misc_feature (1)..(160): Homolog of NCBI NO: 15222901 NR Description: family II extracellular lipase 3 (EXL3); protein At1g75900.1, supported by cDNA: gi_15054385 [Arabidopsis >gi|15054386|gb|AAK30018.1| family II lipase EXL3 [Arabidopsis
MNPYLKPEDLLKGVTFASGGTGYDPLTAKIMSVISVWDQLIYFKEYISKIKRHFGEEKAKDILEHSFFLVVSSSNDLAHTYLAQAHRYDRTSYANFLADSAVHFVRELHKLGAQKIGVFSAVPVGCVPLQRTVFGDKELDGVILYINVYDTLFDMIQHPKKYGFEVADRGCCGKGLLTISYLCNSLNQFTCSNSSAYIFWDSYHPSKRAYQVIVDNLLDKYLSKVY

SEQ ID NO: 71554 - DNA, 1017 bp, Arabidopsis thaliana
  misc_feature (1)..(1017): Ceres Seq. ID no. 4268897
  misc_feature: MA Experiment ID: 20000440 Result: Up-regulated in Transcription
  misc_feature: MA Experiment 20000440 PARAMETER Experiment Name: At_Closed-Flower__Sub_P Parameter: Tissue Value: Closed Flower vs. Whole Plant
atggtgttcgcagatgatgtgacaccaatcccagagggcaaaccccaagtggcgcagtggttcaatgccaacgttggtccattggctcaacgtaaaggcttagatcctgctcttgtagctgctgaggctgctccacgtatcatcaacggtggtgaattcaaaacactaacggacgcaataaagagcgttcctgcagggaacacaaagcgggtgatcataaagatggctcctggtgaatacaaagagaaggtcactatcgacaggaacaaacccttcattacattgatgggacaacccaatgccatgcctgttatcacctatgacggtaccgccgccaagtatggaaccgttgatagcgcctctctcattatcttatccgactatttcatggccgttaacatcgtcgttaagaacactgcgccggcaccagatggtaaaactaagggagcacaagctttatccatgagaatctccggaaattttgctgctttctacaactgcaaattctacggtttccaagacacaatctgtgacgatacaggaaaccatttcttcaaggattgttacgttgaaggaacattcgatttcatcttcggaagtggaacctctatgtacttgggaacacaattgcacgtggttggagacggtattagagtgatagcagcgcatgcaggaaagagcgcagaagagaagagtggatactctttcgtgcactgcaaggtgactggaaccggtggaggaatttatttgggaagagcatggatgagccaccctaaggttgtttatgcctacaccgagatgaccagcgttgtcaaccccaccggatggcaagaaaacaagactcccgcacatgacaaaaccgtgttctacggagagtacaagtgttcaggaccaggatcacacaaagccaagagagtaccattcacacaagacattgacgacaaagaagctaaccgtttcctatccctcggctacatccaaggatccaagtggcttctcccaccacccgctttgtaa

SEQ ID NO: 71555 - protein, 338 aa, Arabidopsis thaliana
  peptide (1)..(338): Ceres Seq. ID no. 4268898
  misc_feature (51)..(329): Pfam Name: Pectinesterase Pfam Description: Pectinesterase
  misc_feature (1)..(338): Homolog of NCBI NO: 25404855 NR Description: probable pectin methylesterase T17F3.3 [imported] Arabidopsis thaliana >gi|12325236|gb|AAG52566.1|AC010675_14
  misc_feature (1)..(338): Homolog of NCBI NO: 30697951 NR Description: pectinesterase family [Arabidopsis thaliana]
  misc_feature (1)..(338): Homolog of NCBI NO: 11358603 NR Description: pectin methyl-esterase-like protein - Arabidopsis
  misc_feature (1)..(338): Homolog of NCBI NO: 18415486 NR Description: pectinesterase family; protein id: At5g07410.1,
  misc_feature (1)..(338): Homolog of NCBI NO: 21593398 NR Description: pectin methyl-esterase-like protein [Arabidopsis
  misc_feature (1)..(337): Homolog of NCBI NO: 9758483 NR Description: pectin methylesterase-like protein [Arabidopsis
  misc_feature (49)..(337): Homolog of NCBI NO: 15240325 NR Description: pectinesterase family; protein id: At5g61680.1
  misc_feature (1)..(25): Homolog of NCBI NO: 15240325 NR Description: pectinesterase family; protein id: At5g61680.1
  misc_feature (1)..(337): Homolog of NCBI NO: 15240781 NR Description: pectinesterase family; protein id: At5g07420.1,
  misc_feature (1)..(336): Homolog of NCBI NO: 15240792 NR Description: pectinesterase family; protein id: At5g07430.1
MVFADDVTPIPEGKPQVAQWFNANVGPLAQRKGLDPALVAAEAAPRIINGGEFKTLTDAIKSVPAGNTKRVIIKMAPGEYKEKVTIDRNKPFITLMGQPNAMPVITYDGTAAKYGTVDSASLIILSDYFMAVNIVVKNTAPAPDGKTKGAQALSMRISGNFAAFYNCKFYGFQDTICDDTGNHFFKDCYVEGTFDFIFGSGTSMYLGTQLHVVGDGIRVIAAHAGKSAEEKSGYSFVHCKVTGTGGGIYLGRAWMSHPKVVYAYTEMTSVVNPTGWQENKTPAHDKTVFYGEYKCSGPGSHKAKRVPFTQDIDDKEANRFLSLGYIQGSKWLLPPPAL

SEQ ID NO: 71556 - protein, 264 aa, Arabidopsis thaliana; identical to SEQ ID NO: 49969
  peptide (1)..(264): Ceres Seq. ID no. 4268899
  misc_feature (1)..(255): Pfam Name: Pectinesterase Pfam Description: Pectinesterase
  misc_feature (1)..(264): Homolog of NCBI NO: 25404855 NR Description: probable pectin methylesterase T17F3.3 [imported] Arabidopsis thaliana >gi|12325236|gb|AAG52566.1|AC010675_14
  misc_feature (1)..(264): Homolog of NCBI NO: 30697951 NR Description: pectinesterase family [Arabidopsis thaliana]
  misc_feature (1)..(264): Homolog of NCBI NO: 11358603 NR Description: pectin methyl-esterase-like protein - Arabidopsis
  misc_feature (1)..(264): Homolog of NCBI NO: 18415486 NR Description: pectinesterase family; protein id: At5g07410.1,
  misc_feature (1)..(264): Homolog of NCBI NO: 21593398 NR Description: pectin methyl-esterase-like protein [Arabidopsis
  misc_feature (1)..(263): Homolog of NCBI NO: 9758483 NR Description: pectin methylesterase-like protein [Arabidopsis
  misc_feature (1)..(263): Homolog of NCBI NO: 15240325 NR Description: pectinesterase family; protein id: At5g61680.1
  misc_feature (1)..(263): Homolog of NCBI NO: 15240781 NR Description: pectinesterase family; protein id: At5g07420.1,
  misc_feature (1)..(262): Homolog of NCBI NO: 15240792 NR Description: pectinesterase family; protein id: At5g07430.1
  misc_feature (1)..(258): Homolog of NCBI NO: 15241163 NR Description: pectinesterase family; protein id: At5g19730.1, by cDNA: gi_17529289, supported by cDNA: gi_20465498 [Arabidopsis >gi|17529290|gb|AAL38872.1| putative pectin methylesterase

SEQ ID NO: 71557 - protein, 243 aa, Arabidopsis thaliana
  peptide (1)..(243): Ceres Seq. ID no. 4268900
  misc_feature (1)..(234): Pfam Name: Pectinesterase Pfam Description: Pectinesterase
  misc_feature (1)..(243): Homolog of NCBI NO: 25404855 NR Description: probable pectin methylesterase T17F3.3 [imported] Arabidopsis thaliana >gi|12325236|gb|AAG52566.1|AC010675_14
  misc_feature (1)..(243): Homolog of NCBI NO: 30697951 NR Description: pectinesterase family [Arabidopsis thaliana]
  misc_feature (1)..(243): Homolog of NCBI NO: 11358603 NR Description: pectin methyl-esterase-like protein - Arabidopsis
  misc_feature (1)..(243): Homolog of NCBI NO: 18415486 NR Description: pectinesterase family; protein id: At5g07410.1,
  misc_feature (1)..(243): Homolog of NCBI NO: 21593398 NR Description: pectin methyl-esterase-like protein [Arabidopsis
  misc_feature (1)..(242): Homolog of NCBI NO: 9758483 NR Description: pectin methylesterase-like protein [Arabidopsis
  misc_feature (1)..(242): Homolog of NCBI NO: 15240325 NR Description: pectinesterase family; protein id: At5g61680.1
  misc_feature (1)..(242): Homolog of NCBI NO: 15240781 NR Description: pectinesterase family; protein id: At5g07420.1,
  misc_feature (1)..(241): Homolog of NCBI NO: 15240792 NR Description: pectinesterase family; protein id: At5g07430.1
  misc_feature (1)..(237): Homolog of NCBI NO: 15241163 NR Description: pectinesterase family; protein id: At5g19730.1, by cDNA: gi_17529289, supported by cDNA: gi_20465498 [Arabidopsis >gi|17529290|gb|AAL38872.1| putative pectin methylesterase
MGQPNAMPVITYDGTAAKYGTVDSASLIILSDYFMAVNIVVKNTAPAPDGKTKGAQALSMRISGNFAAFYNCKFYGFQDTICDDTGNHFFKDCYVEGTFDFIFGSGTSMYLGTQLHVVGDGIRVIAAHAGKSAEEKSGYSFVHCKVTGTGGGIYLGRAWMSHPKVVYAYTEMTSVVNPTGWQENKTPAHDKTVFYGEYKCSGPGSHKAKRVPFTQDIDDKEANRFLSLGYIQGSKWLLPPPAL

SEQ ID NO: 71558 - DNA, 576 bp, Arabidopsis thaliana
  misc_feature (1)..(576): Ceres Seq. ID no. 4268917
  misc_feature: MA Experiment ID: 20000314 Result: Down-regulated in Transcription
  misc_feature: MA Experiment 20000314 PARAMETER Experiment Name: At_14day_Shoots-Roots_Sub_P Parameter: Age (day) Value: 14
  misc_feature: MA Experiment 20000314 PARAMETER Experiment Name: At_14day_Shoots-Roots_Sub_P Parameter: Organism Value: A. thaliana
  misc_feature: MA Experiment 20000314 PARAMETER Experiment Name: At_14day_Shoots-Roots_Sub_P Parameter: Plant Line Value: WS
  misc_feature: MA Experiment 20000314 PARAMETER Experiment Name: At_14day_Shoots-Roots_Sub_P Parameter: Tissue Value: Roots vs. Whole Plant
  misc_feature: MA Experiment ID: 20000328 Result: Down-regulated in Transcription
  misc_feature: MA Experiment 20000328 PARAMETER Experiment Name: At_42deg_Heat_Sub_P Parameter: Age (day) Value: 14
  misc_feature: MA Experiment 20000328 PARAMETER Experiment Name: At_42deg_Heat_Sub_P Parameter: Organism Value: A. thaliana
  misc_feature: MA Experiment 20000328 PARAMETER Experiment Name: At_42deg_Heat_Sub_P Parameter: Plant Line Value: WS
  misc_feature: MA Experiment 20000328 PARAMETER Experiment Name: At_42deg_Heat_Sub_P Parameter: Temperature (deg C) Value: 42 vs. 22
  misc_feature: MA Experiment 20000328 PARAMETER Experiment Name: At_42deg_Heat_Sub_P Parameter: Timepoint (hr) Value: 6
  misc_feature: MA Experiment 20000328 PARAMETER Experiment Name: At_42deg_Heat_Sub_P Parameter: Tissue Value: Aerial
  misc_feature: MA Experiment ID: 20000355 Result: Up-regulated in Transcription
  misc_feature: MA Experiment 20000355 PARAMETER Experiment Name: At_Siliques_Sub_P Parameter: Age (day) Value: 21
  misc_feature: MA Experiment 20000355 PARAMETER Experiment Name: At_Siliques_Sub_P Parameter: Organism Value: A. thaliana
  misc_feature: MA Experiment 20000355 PARAMETER Experiment Name: At_Siliques_Sub_P Parameter: Plant Line Value: WS
  misc_feature: MA Experiment 20000355 PARAMETER Experiment Name: At_Siliques_Sub_P Parameter: Tissue Value: Less Than 5mm Siliques vs. Whole Plant
atgaaccttggggatccggattttgtcgatgtttctaaggttatttctgatatgttgtctacaaattttgcacaaggcttgaagaaaaagataaacgacaacaaaacctttgatccaaattattacggtggcaggtgggatcagattaacgaccatgggacaagccatttatcaatcatagatagcgagaggaatgttgtttcactgactagtacaataaacagttactttggggcattgatgttatctccaagcaccggaattgttctgaacaacgaaatggatgatttctcaatccccatgaaatccagcagtaacctaactgtgccaccaccggcaccggccaatttcattcgtcctgggaaacgacctctgtcttctatgacacccaccattgtactcaaggatggtaaagtgaaagcctccgtgggtgcgagcggaggactgtacatcatcgctgggacaacagaagtttttctgaattatttcttcctcaagatggatcctctttcttccgttttggctccaagaatctaccatcagctgataccaaacatagtttcgtatgaaaactag

SEQ ID NO: 71559 - protein, 191 aa, Arabidopsis thaliana
  peptide (1)..(191): Ceres Seq. ID no. 4268918
  misc_feature (1)..(191): Pfam Name: Gamma-glutamyltranspeptidase Pfam Description: Gamma-glutamyltranspeptidase
  misc_feature (1)..(191): Homolog of NCBI NO: 15222461 NR Description: putative gamma-glutamyltransferase (light chain protein id: At1g69820.1 [Arabidopsis thaliana]
  misc_feature (1)..(191): Homolog of NCBI NO: 27348118 NR Description: gamma-glutamyl transferase [Raphanus sativus]
  misc_feature (1)..(191): Homolog of NCBI NO: 2129587 NR Description: gamma-glutamyltransferase (EC 2.3.2.2) -
  misc_feature (1)..(191): Homolog of NCBI NO: 7433816 NR Description: probable gamma-glutamyltransferase (EC 2.3.2.2)
  misc_feature (1)..(191): Homolog of NCBI NO: 22329258 NR Description: putative gamma-glutamyltransferase; protein id: supported by cDNA: gi_17978921 [Arabidopsis thaliana] AT4g39640/T19P19_30 [Arabidopsis thaliana]
  misc_feature (1)..(191): Homolog of NCBI NO: 28208262 NR Description: gamma-glutamyl transferase [Raphanus sativus]
  misc_feature (1)..(191): Homolog of NCBI NO: 15235951 NR Description: putative gamma-glutamyltransferase; protein id:
  misc_feature (1)..(191): Homolog of NCBI NO: 38567882 NR Description: OSJNBa0036B21.10 [Oryza sativa (japonica
  misc_feature (1)..(191): Homolog of NCBI NO: 15233493 NR Description: gamma-glutamyltransferase-like protein; protein
  misc_feature (1)..(191): Homolog of NCBI NO: 34895870 NR Description: putative gamma-glutamyltransferase [Oryza sativa
MNLGDPDFVDVSKVISDMLSTNFAQGLKKKINDNKTFDPNYYGGRWDQINDHGTSHLSIIDSERNVVSLTSTINSYFGALMLSPSTGIVLNNEMDDFSIPMKSSSNLTVPPPAPANFIRPGKRPLSSMTPTIVLKDGKVKASVGASGGLYIIAGTTEVFLNYFFLKMDPLSSVLAPRIYHQLIPNIVSYEN

SEQ ID NO: 71560 - protein, 174 aa, Arabidopsis thaliana
  peptide (1)..(174): Ceres Seq. ID no. 4268919
  misc_feature (1)..(174): Pfam Name: Gamma-glutamyltranspeptidase Pfam Description: Gamma-glutamyltranspeptidase
  misc_feature (1)..(174): Homolog of NCBI NO: 15222461 NR Description: putative gamma-glutamyltransferase (light chain protein id: At1g69820.1 [Arabidopsis thaliana]
  misc_feature (1)..(174): Homolog of NCBI NO: 27348118 NR Description: gamma-glutamyl transferase [Raphanus sativus]
  misc_feature (1)..(174): Homolog of NCBI NO: 2129587 NR Description: gamma-glutamyltransferase (EC 2.3.2.2) -
  misc_feature (1)..(174): Homolog of NCBI NO: 7433816 NR Description: probable gamma-glutamyltransferase (EC 2.3.2.2)
  misc_feature (1)..(174): Homolog of NCBI NO: 22329258 NR Description: putative gamma-glutamyltransferase; protein id: supported by cDNA: gi_17978921 [Arabidopsis thaliana] AT4g39640/T19P19_30 [Arabidopsis thaliana]
  misc_feature (1)..(174): Homolog of NCBI NO: 28208262 NR Description: gamma-glutamyl transferase [Raphanus sativus]
  misc_feature (1)..(174): Homolog of NCBI NO: 15235951 NR Description: putative gamma-glutamyltransferase; protein id:
  misc_feature (1)..(174): Homolog of NCBI NO: 38567882 NR Description: OSJNBa0036B21.10 [Oryza sativa (japonica
  misc_feature (1)..(174): Homolog of NCBI NO: 15233493 NR Description: gamma-glutamyltransferase-like protein; protein
  misc_feature (1)..(174): Homolog of NCBI NO: 34895870 NR Description: putative gamma-glutamyltransferase [Oryza sativa
MLSTNFAQGLKKKINDNKTFDPNYYGGRWDQINDHGTSHLSIIDSERNVVSLTSTINSYFGALMLSPSTGIVLNNEMDDFSIPMKSSSNLTVPPPAPANFIRPGKRPLSSMTPTIVLKDGKVKASVGASGGLYIIAGTTEVFLNYFFLKMDPLSSVLAPRIYHQLIPNIVSYEN

SEQ ID NO: 71561 - protein, 111 aa, Arabidopsis thaliana
  peptide (1)..(111): Ceres Seq. ID no. 4268920
  misc_feature (1)..(111): Pfam Name: Gamma-glutamyltranspeptidase Pfam Description: Gamma-glutamyltranspeptidase
  misc_feature (1)..(111): Homolog of NCBI NO: 15222461 NR Description: putative gamma-glutamyltransferase (light chain protein id: At1g69820.1 [Arabidopsis thaliana]
  misc_feature (1)..(111): Homolog of NCBI NO: 27348118 NR Description: gamma-glutamyl transferase [Raphanus sativus]
  misc_feature (1)..(111): Homolog of NCBI NO: 2129587 NR Description: gamma-glutamyltransferase (EC 2.3.2.2) -
  misc_feature (1)..(111): Homolog of NCBI NO: 22329258 NR Description: putative gamma-glutamyltransferase; protein id: supported by cDNA: gi_17978921 [Arabidopsis thaliana] AT4g39640/T19P19_30 [Arabidopsis thaliana]
  misc_feature (1)..(111): Homolog of NCBI NO: 7433816 NR Description: probable gamma-glutamyltransferase (EC 2.3.2.2)
  misc_feature (1)..(111): Homolog of NCBI NO: 28208262 NR Description: gamma-glutamyl transferase [Raphanus sativus]
  misc_feature (1)..(111): Homolog of NCBI NO: 15235951 NR Description: putative gamma-glutamyltransferase; protein id:
  misc_feature (1)..(111): Homolog of NCBI NO: 38567882 NR Description: OSJNBa0036B21.10 [Oryza sativa (japonica
  misc_feature (1)..(111): Homolog of NCBI NO: 15233493 NR Description: gamma-glutamyltransferase-like protein; protein
  misc_feature (1)..(111): Homolog of NCBI NO: 34895870 NR Description: putative gamma-glutamyltransferase [Oryza sativa
MLSPSTGIVLNNEMDDFSIPMKSSSNLTVPPPAPANFIRPGKRPLSSMTPTIVLKDGKVKASVGASGGLYIIAGTTEVFLNYFFLKMDPLSSVLAPRIYHQLIPNIVSYEN

SEQ ID NO: 71562 - DNA, 2295 bp, Arabidopsis thaliana
  misc_feature (1)..(2295): Ceres Seq. ID no. 4269931
  misc_feature: MA Experiment ID: 20000180 Result: Down-regulated in Transcription
  misc_feature: MA Experiment 20000180 PARAMETER Experiment Name: At_Germinating_Seeds_P Parameter: Age (hr) Value: 24 vs. 0
  misc_feature: MA Experiment 20000180 PARAMETER Experiment Name: At_Germinating_Seeds_P Parameter: Tissue Value: Germinating Seeds
  misc_feature: MA Experiment ID: 20001451 Result: Down-regulated in Transcription
  misc_feature: MA Experiment 20001451 PARAMETER Experiment Name: At_Far-red-induction_P Parameter: Age (day) Value: 7
  misc_feature: MA Experiment 20001451 PARAMETER Experiment Name: At_Far-red-induction_P Parameter: Light Value: Far-red vs. White
  misc_feature: MA Experiment 20001451 PARAMETER Experiment Name: At_Far-red-induction_P Parameter: Organism Value: A. thaliana
  misc_feature: MA Experiment 20001451 PARAMETER Experiment Name: At_Far-red-induction_P Parameter: Plant Line Value: Columbia
  misc_feature: MA Experiment 20001451 PARAMETER Experiment Name: At_Far-red-induction_P Parameter: Timepoint (hr) Value: 24
  misc_feature: MA Experiment 20001451 PARAMETER Experiment Name: At_Far-red-induction_P Parameter: Tissue Value: Whole Plant
atgcctcgtaaaggattatccaatttcgatgattatgatgatggttttgatgatgatgacgatgcttttgattatgactatgatgttgatatagatgaacatgaagaagaagctgctgctgaaccaaaggaagaaattgctaaaacgcaagggctttggcgatgtgctatctgtacatatgacaatgttgagactatgtttgtgtgtgatatctgcggtgttcttcgtcatcctgtcgccggaaatcaaagtatcaataagaatacagttgagagcagatgcaaagaacctgtggtatccaaattggcaaagtcccttttcggatcagtcccatctaataaaccgaaaagagctgttctttgtctgcctgaacacacgaatcttgtgatggaacagggacctctgcctggaatttcccgtgggaatattcatgatctttacaaggcctttagttctaaaaattcctgcgttagtatagctgttcgtgttgtgagtctctttgcaattgtggtgttgcaaaggcgttattctgacagttccttttcaacttatgtagcacctttcaagtttgatgctccatcgccagatgatttagtctccaatggactaacatcctcaaaaactggtccaaaaggctcaggtgatgctagcatgagacagaaggagaagcaagatagcgtagaacagaaacctttaaagaaaggaggagatagttcagaaacaagctcccgaggtagacatgataaacttgatgataagggcggtgctggcggcataaaatcaggcaaaagtttgccaaaagcaaaagcagatatgtctaatgagacaagttcgtcctctaaatatatggagacgtcggagagtcttactggtactatgaacaagatgtctttgattggggaaacagaaaactctagcgatattaaaattagaggaccaaaatcacaatctaagcataagccagaggagtggatgcttcttgataaagaatcagatgcactaagccagcttaatcttgccatcgtggggcatgttgattccggtaagtctacactttcgggtagattattgcatcttttgggaagaatatcgcagaagcaaatgcacaagtatgagaaagaagcaaagttgcagggcaaagggtcctttgcatatgcctgggcattggatgagagtgctgaagagagggaacgaggaataacaatgactgtggctgttgcttatttcaattccaaaagacatcatgttgttttgctcgactctcctggacacaaagattttgttccaaacatgatagcaggagcaacacaagcagatgctgcgattcttgtcatagatgcatctgttggtgcttttgaagctggttttgataatttgaaagggcagacaagggagcatgcacgggttctgagaggttttggcgtggagcaagtcatagttgcaatcaacaaaatggatattgttggctactcaaaggaaagatttgatttgattaagcagcacgttggatcttttttgcaatcctgtcgttttaaggattcttctctgacatggattccattaagtgccatggaaaaccaaaacttggtggcagctccctctgataaccgcctatcctcatggtatcaaggtccatgtttattggatgccgtcgactctgtcaagtctcctgatagagacgtctcaaagcctctactcatgcctatatgtgacgctgtaagatcaacttcgcaagggcaggtatctgcatgtggcaaacttgaagctggagctgtccggccaggatctaaggtaatggttatgccatcaggagatcaaggaaccatacgatcactagagcgtgactctcaggcttgcaccattgcaagagctggagataacgtagcgttagcgttgcaagggatcgatgcaaatcaagtaatggcaggagatgtattgtgccatcctgatttccctgtatcagtagcaactcatttggaattgatggtgctcgtcttggaaggcgcaacaccgatcttgctcggttctcagttggagtttcatgtgcatcatgcaaaggaagcagcaacagttgtgaaacttgtggcaatgcttgatcccaaaacagggcagccaacaaagaagtctcctcgttgtctaactgctaaacagagcgcaatgcttgaggttagtctccaaaatccagtatgtgtggagacattttctgagagtagagctcttggaagagtgttccttagatcatcgggaagaactgttgctatgggcaaagttactcggattatccaagactcataa

SEQ ID NO: 71563 - protein, 764 aa, Arabidopsis thaliana
  peptide (1)..(764): Ceres Seq. ID no. 4269932
  misc_feature (334)..(558): Pfam Name: Elongation factor Tu GTP binding domain Pfam Description: Elongation factor Tu GTP binding domain
  misc_feature (210)..(763): Homolog of NCBI NO: 38347078 NR Description: OSJNBa0006A01.19 [Oryza sativa (japonica
  misc_feature (1)..(76): Homolog of NCBI NO: 38347078 NR Description: OSJNBa0006A01.19 [Oryza sativa (japonica
  misc_feature (178)..(759): Homolog of NCBI NO: 38567963 NR Description: OSJNBa0093F12.4 [Oryza sativa (japonica
  misc_feature (1)..(76): Homolog of NCBI NO: 38567963 NR Description: OSJNBa0093F12.4 [Oryza sativa (japonica
  misc_feature (178)..(763): Homolog of NCBI NO: 34895284 NR Description: putative eukaryoticrelease factor [Oryza sativa
  misc_feature (1)..(76): Homolog of NCBI NO: 34895284 NR Description: putative eukaryoticrelease factor [Oryza sativa
  misc_feature (270)..(760): Homolog of NCBI NO: 38344203 NR Description: OSJNBa0064G10.19 [Oryza sativa (japonica
  misc_feature (185)..(279): Homolog of NCBI NO: 38344203 NR Description: OSJNBa0064G10.19 [Oryza sativa (japonica
  misc_feature (35)..(120): Homolog of NCBI NO: 38344203 NR Description: OSJNBa0064G10.19 [Oryza sativa (japonica
  misc_feature (268)..(760): Homolog of NCBI NO: 31206733 NR Description: ENSANGP00000002945 [Anopheles gambiae]
MPRKGLSNFDDYDDGFDDDDDAFDYDYDVDIDEHEEEAAAEPKEEIAKTQGLWRCAICTYDNVETMFVCDICGVLRHPVAGNQSINKNTVESRCKEPVVSKLAKSLFGSVPSNKPKRAVLCLPEHTNLVMEQGPLPGISRGNIHDLYKAFSSKNSCVSIAVRVVSLFAIVVLQRRYSDSSFSTYVAPFKFDAPSPDDLVSNGLTSSKTGPKGSGDASMRQKEKQDSVEQKPLKKGGDSSETSSRGRHDKLDDKGGAGGIKSGKSLPKAKADMSNETSSSSKYMETSESLTGTMNKMSLIGETENSSDIKIRGPKSQSKHKPEEWMLLDKESDALSQLNLAIVGHVDSGKSTLSGRLLHLLGRISQKQMHKYEKEAKLQGKGSFAYAWALDESAEERERGITMTVAVAYFNSKRHHVVLLDSPGHKDFVPNMIAGATQADAAILVIDASVGAFEAGFDNLKGQTREHARVLRGFGVEQVIVAINKMDIVGYSKERFDLIKQHVGSFLQSCRFKDSSLTWIPLSAMENQNLVAAPSDNRLSSWYQGPCLLDAVDSVKSPDRDVSKPLLMPICDAVRSTSQGQVSACGKLEAGAVRPGSKVMVMPSGDQGTIRSLERDSQACTIARAGDNVALALQGIDANQVMAGDVLCHPDFPVSVATHLELMVLVLEGATPILLGSQLEFHVHHAKEAATVVKLVAMLDPKTGQPTKKSPRCLTAKQSAMLEVSLQNPVCVETFSESRALGRVFLRSSGRTVAMGKVTRIIQDS

SEQ ID NO: 71564 - protein, 699 aa, Arabidopsis thaliana
  peptide (1)..(699): Ceres Seq. ID no. 4269933
  misc_feature (269)..(493): Pfam Name: Elongation factor Tu GTP binding domain Pfam Description: Elongation factor Tu GTP binding domain
  misc_feature (145)..(698): Homolog of NCBI NO: 38347078 NR Description: OSJNBa0006A01.19 [Oryza sativa (japonica
  misc_feature (1)..(11): Homolog of NCBI NO: 38347078 NR Description: OSJNBa0006A01.19 [Oryza sativa (japonica
  misc_feature (113)..(694): Homolog of NCBI NO: 38567963 NR Description: OSJNBa0093F12.4 [Oryza sativa (japonica
  misc_feature (1)..(11): Homolog of NCBI NO: 38567963 NR Description: OSJNBa0093F12.4 [Oryza sativa (japonica
  misc_feature (113)..(698): Homolog of NCBI NO: 34895284 NR Description: putative eukaryoticrelease factor [Oryza sativa
  misc_feature (1)..(11): Homolog of NCBI NO: 34895284 NR Description: putative eukaryoticrelease factor [Oryza sativa
  misc_feature (205)..(695): Homolog of NCBI NO: 38344203 NR Description: OSJNBa0064G10.19 [Oryza sativa (japonica
  misc_feature (120)..(214): Homolog of NCBI NO: 38344203 NR Description: OSJNBa0064G10.19 [Oryza sativa (japonica
  misc_feature (1)..(55): Homolog of NCBI NO: 38344203 NR Description: OSJNBa0064G10.19 [Oryza sativa (japonica
  misc_feature (203)..(695): Homolog of NCBI NO: 31206733 NR Description: ENSANGP00000002945 [Anopheles gambiae]
MFVCDICGVLRHPVAGNQSINKNTVESRCKEPVVSKLAKSLFGSVPSNKPKRAVLCLPEHTNLVMEQGPLPGISRGNIHDLYKAFSSKNSCVSIAVRVVSLFAIVVLQRRYSDSSFSTYVAPFKFDAPSPDDLVSNGLTSSKTGPKGSGDASMRQKEKQDSVEQKPLKKGGDSSETSSRGRHDKLDDKGGAGGIKSGKSLPKAKADMSNETSSSSKYMETSESLTGTMNKMSLIGETENSSDIKIRGPKSQSKHKPEEWMLLDKESDALSQLNLAIVGHVDSGKSTLSGRLLHLLGRISQKQMHKYEKEAKLQGKGSFAYAWALDESAEERERGITMTVAVAYFNSKRHHVVLLDSPGHKDFVPNMIAGATQADAAILVIDASVGAFEAGFDNLKGQTREHARVLRGFGVEQVIVAINKMDIVGYSKERFDLIKQHVGSFLQSCRFKDSSLTWIPLSAMENQNLVAAPSDNRLSSWYQGPCLLDAVDSVKSPDRDVSKPLLMPICDAVRSTSQGQVSACGKLEAGAVRPGSKVMVMPSGDQGTIRSLERDSQACTIARAGDNVALALQGIDANQVMAGDVLCHPDFPVSVATHLELMVLVLEGATPILLGSQLEFHVHHAKEAATVVKLVAMLDPKTGQPTKKSPRCLTAKQSAMLEVSLQNPVCVETFSESRALGRVFLRSSGRTVAMGKVTRIIQDS

SEQ ID NO: 71565 - protein, 635 aa, Arabidopsis thaliana
  peptide (1)..(635): Ceres Seq. ID no. 4269934
  misc_feature (205)..(429): Pfam Name: Elongation factor Tu GTP binding domain Pfam Description: Elongation factor Tu GTP binding domain
  misc_feature (81)..(634): Homolog of NCBI NO: 38347078 NR Description: OSJNBa0006A01.19 [Oryza sativa (japonica
  misc_feature (49)..(630): Homolog of NCBI NO: 38567963 NR Description: OSJNBa0093F12.4 [Oryza sativa (japonica
  misc_feature (49)..(634): Homolog of NCBI NO: 34895284 NR Description: putative eukaryoticrelease factor [Oryza sativa
  misc_feature (141)..(631): Homolog of NCBI NO: 38344203 NR Description: OSJNBa0064G10.19 [Oryza sativa (japonica
  misc_feature (56)..(150): Homolog of NCBI NO: 38344203 NR Description: OSJNBa0064G10.19 [Oryza sativa (japonica
  misc_feature (139)..(631): Homolog of NCBI NO: 31206733 NR Description: ENSANGP00000002945 [Anopheles gambiae]
  misc_feature (126)..(631): Homolog of NCBI NO: 5729864 NR Description: HBS1-like [Homo sapiens]
  misc_feature (149)..(631): Homolog of NCBI NO: 5689413 NR Description: KIAA1038 protein [Homo sapiens]
  misc_feature (198)..(631): Homolog of NCBI NO: 16307413 NR Description: Similar to HBS1 (S. cerevisiae)-like [Mus
  misc_feature (208)..(631): Homolog of NCBI NO: 9789945 NR Description: Hbs1-like (S. cerevisiae); eukaryotic release
MEQGPLPGISRGNIHDLYKAFSSKNSCVSIAVRVVSLFAIVVLQRRYSDSSFSTYVAPFKFDAPSPDDLVSNGLTSSKTGPKGSGDASMRQKEKQDSVEQKPLKKGGDSSETSSRGRHDKLDDKGGAGGIKSGKSLPKAKADMSNETSSSSKYMETSESLTGTMNKMSLIGETENSSDIKIRGPKSQSKHKPEEWMLLDKESDALSQLNLAIVGHVDSGKSTLSGRLLHLLGRISQKQMHKYEKEAKLQGKGSFAYAWALDESAEERERGITMTVAVAYFNSKRHHVVLLDSPGHKDFVPNMIAGATQADAAILVIDASVGAFEAGFDNLKGQTREHARVLRGFGVEQVIVAINKMDIVGYSKERFDLIKQHVGSFLQSCRFKDSSLTWIPLSAMENQNLVAAPSDNRLSSWYQGPCLLDAVDSVKSPDRDVSKPLLMPICDAVRSTSQGQVSACGKLEAGAVRPGSKVMVMPSGDQGTIRSLERDSQACTIARAGDNVALALQGIDANQVMAGDVLCHPDFPVSVATHLELMVLVLEGATPILLGSQLEFHVHHAKEAATVVKLVAMLDPKTGQPTKKSPRCLTAKQSAMLEVSLQNPVCVETFSESRALGRVFLRSSGRTVAMGKVTRIIQDS

SEQ ID NO: 71566 - DNA, 1653 bp, Arabidopsis thaliana
  misc_feature (1)..(1653): Ceres Seq. ID no. 4270211
  misc_feature: MA Experiment ID: 20000355 Result: Up-regulated in Transcription
  misc_feature: MA Experiment 20000355 PARAMETER Experiment Name: At_Siliques_Sub_P Parameter: Age (day) Value: 21
  misc_feature: MA Experiment 20000355 PARAMETER Experiment Name: At_Siliques_Sub_P Parameter: Organism Value: A. thaliana
  misc_feature: MA Experiment 20000355 PARAMETER Experiment Name: At_Siliques_Sub_P Parameter: Plant Line Value: WS
  misc_feature: MA Experiment 20000355 PARAMETER Experiment Name: At_Siliques_Sub_P Parameter: Tissue Value: Less Than 5mm Siliques vs. Whole Plant
  misc_feature: MA Experiment ID: 20000440 Result: Up-regulated in Transcription
  misc_feature: MA Experiment 20000440 PARAMETER Experiment Name: At_Closed-Flower__Sub_P Parameter: Tissue Value: Closed Flower vs. Whole Plant
atggcgaattctcaaagatcatcatctctgatcgatccaaggaacggtttctgcacatcaaactccacattttacagtaaacgcaaaccattggcacttccttcaaaagaatcactcgacatcacaacattcatctcctcccaaacgtaccgtggcaaaaccgccttcatagacgcagccacggaccaccgcataagcttctccgatttatggatggccgtggatcgtgtcgccgactgtctcctccacgacgtgggaatacggagaggtgacgtggtcctagtcctctctcccaacaccatctccatccccattgtctgcctctccgtgatgtctcttggcgctgtcttaactaccgctaatcctctcaacaccgctagtgaaatcttaagacaaatcgcggatagcaatccaaaactcgccttcacaacaccggaactggctcccaaaatcgccagttccggtatctctatcgtcctcgagcgcgtagaagacactctacgcgttccgagaggactcaaagtggttgggaatctaactgaaatgatgaagaaagaaccaagtggacaagcagtcagaaaccaagttcataaagacgacacggcgatgttgctttactcctcggggacgacgggacgaagcaaaggagtgaattcgtctcacgggaacttaatagcacacgtggcgagatacatcgcggagccattcgagcagccacaacagaccttcatttgcactgttccgttgttccacacttttggtttactaaacttcgttttggccaccttagcgttaggtacgaccgttgtcatcctcccgaggtttgacctcggagagatgatggcggctgtcgagaaatacagagcgacgactctgattctcgtgccgccagttttagtaactatgataaacaaagcggatcaaataatgaagaagtacgacgtgagcttcttgagaacggtgcggtgcggtggagcacctttgagcaaggaagttactcaagggtttatgaagaaatatccaacggttgatgtttatcaaggatacgcattgacggaatctaacggtgcaggagcttcgatagaatcagtggaggagagtcggaggtacggtgcggtggggttgttgtcatgtggtgtagaagcgaggattgtggatccgaatacgggtcaggtcatgggtttgaaccaaacgggcgaactttggcttaaagggccttctatcgccaaaggttatttcaggaatgaagaagaaattataacttcagaaggatggcttaaaacaggagatctatgctatatagacaacgatggatttctttttatcgttgatcgattgaaagagcttatcaaatacaaaggttaccaggtacctccagctgaactagaggctctcttactaaaccatccagatattctcgatgcagccgttattccgtttccagataaagaagcaggacaatttccgatggcttacgtagcacgaaagcctgagagtaatctttgtgagaaaaaggttatcgactttatttctaaacaggtggcaccatataagaaaataagaaaagtcgcatttatagactctataccaaagactccatcgggcaaaacacttcgcaaggatctaatcaaatttgccatttcaaaaatttaa

SEQ ID NO: 71567 - protein, 550 aa, Arabidopsis thaliana
  peptide (1)..(550): Ceres Seq. ID no. 4270212
  misc_feature (66)..(410): Pfam Name: AMP-binding enzyme Pfam Description: AMP-binding enzyme
  misc_feature (1)..(550): Homolog of NCBI NO: 30693203 NR Description: 4-coumarate:CoA ligase (4-coumaroyl-CoA synthase)
  misc_feature (1)..(550): Homolog of NCBI NO: 29888141 NR Description: 4-coumarate-CoA ligase-like protein [Arabidopsis
  misc_feature (1)..(550): Homolog of NCBI NO: 10177788 NR Description: AMP-binding protein-like [Arabidopsis thaliana]
  misc_feature (1)..(543): Homolog of NCBI NO: 25402913 NR Description: protein F5M15.18 [imported] - Arabidopsis >gi|8778604|gb|AAF79612.1|AC027665_13 F5M15.18 [Arabidopsis
  misc_feature (1)..(410): Homolog of NCBI NO: 15217958 NR Description: hypothetical protein; protein id: At1g20490.1
  misc_feature (423)..(550): Homolog of NCBI NO: 15217958 NR Description: hypothetical protein; protein id: At1g20490.1
  misc_feature (1)..(413): Homolog of NCBI NO: 25402913 NR Description: protein F5M15.18 [imported] - Arabidopsis >gi|8778604|gb|AAF79612.1|AC027665_13 F5M15.18 [Arabidopsis
  misc_feature (423)..(529): Homolog of NCBI NO: 25402913 NR Description: protein F5M15.18 [imported] - Arabidopsis >gi|8778604|gb|AAF79612.1|AC027665_13 F5M15.18 [Arabidopsis
  misc_feature (11)..(548): Homolog of NCBI NO: 18394871 NR Description: expressed protein; protein id: At1g20510.1 thaliana] >gi|13430676|gb|AAK25960.1|AF360250_1 unknown protein thaliana] >gi|14532846|gb|AAK64105.1| unknown protein
  misc_feature (11)..(548): Homolog of NCBI NO: 29893225 NR Description: 4-coumarate-CoA ligase-like protein [Arabidopsis
MANSQRSSSLIDPRNGFCTSNSTFYSKRKPLALPSKESLDITTFISSQTYRGKTAFIDAATDHRISFSDLWMAVDRVADCLLHDVGIRRGDVVLVLSPNTISIPIVCLSVMSLGAVLTTANPLNTASEILRQIADSNPKLAFTTPELAPKIASSGISIVLERVEDTLRVPRGLKVVGNLTEMMKKEPSGQAVRNQVHKDDTAMLLYSSGTTGRSKGVNSSHGNLIAHVARYIAEPFEQPQQTFICTVPLFHTFGLLNFVLATLALGTTVVILPRFDLGEMMAAVEKYRATTLILVPPVLVTMINKADQIMKKYDVSFLRTVRCGGAPLSKEVTQGFMKKYPTVDVYQGYALTESNGAGASIESVEESRRYGAVGLLSCGVEARIVDPNTGQVMGLNQTGELWLKGPSIAKGYFRNEEEIITSEGWLKTGDLCYIDNDGFLFIVDRLKELIKYKGYQVPPAELEALLLNHPDILDAAVIPFPDKEAGQFPMAYVARKPESNLCEKKVIDFISKQVAPYKKIRKVAFIDSIPKTPSGKTLRKDLIKFAISKI

SEQ ID NO: 71568 - protein, 479 aa, Arabidopsis thaliana
  peptide (1)..(479): Ceres Seq. ID no. 4270213
  misc_feature (1)..(339): Pfam Name: AMP-binding enzyme Pfam Description: AMP-binding enzyme
  misc_feature (1)..(479): Homolog of NCBI NO: 10177788 NR Description: AMP-binding protein-like [Arabidopsis thaliana]
  misc_feature (1)..(472): Homolog of NCBI NO: 25402913 NR Description: protein F5M15.18 [imported] - Arabidopsis >gi|8778604|gb|AAF79612.1|AC027665_13 F5M15.18 [Arabidopsis
  misc_feature (1)..(339): Homolog of NCBI NO: 15217958 NR Description: hypothetical protein; protein id: At1g20490.1
  misc_feature (352)..(479): Homolog of NCBI NO: 15217958 NR Description: hypothetical protein; protein id: At1g20490.1
  misc_feature (1)..(479): Homolog of NCBI NO: 30693203 NR Description: 4-coumarate:CoA ligase (4-coumaroyl-CoA synthase)
  misc_feature (1)..(479): Homolog of NCBI NO: 29888141 NR Description: 4-coumarate-CoA ligase-like protein [Arabidopsis
  misc_feature (1)..(342): Homolog of NCBI NO: 25402913 NR Description: protein F5M15.18 [imported] - Arabidopsis >gi|8778604|gb|AAF79612.1|AC027665_13 F5M15.18 [Arabidopsis
  misc_feature (352)..(458): Homolog of NCBI NO: 25402913 NR Description: protein F5M15.18 [imported] - Arabidopsis >gi|8778604|gb|AAF79612.1|AC027665_13 F5M15.18 [Arabidopsis
  misc_feature (1)..(477): Homolog of NCBI NO: 18394871 NR Description: expressed protein; protein id: At1g20510.1 thaliana] >gi|13430676|gb|AAK25960.1|AF360250_1 unknown protein thaliana] >gi|14532846|gb|AAK64105.1| unknown protein
  misc_feature (1)..(477): Homolog of NCBI NO: 29893225 NR Description: 4-coumarate-CoA ligase-like protein [Arabidopsis
MAVDRVADCLLHDVGIRRGDVVLVLSPNTISIPIVCLSVMSLGAVLTTANPLNTASEILRQIADSNPKLAFTTPELAPKIASSGISIVLERVEDTLRVPRGLKVVGNLTEMMKKEPSGQAVRNQVHKDDTAMLLYSSGTTGRSKGVNSSHGNLIAHVARYIAEPFEQPQQTFICTVPLFHTFGLLNFVLATLALGTTVVILPRFDLGEMMAAVEKYRATTLILVPPVLVTMINKADQIMKKYDVSFLRTVRCGGAPLSKEVTQGFMKKYPTVDVYQGYALTESNGAGASIESVEESRRYGAVGLLSCGVEARIVDPNTGQVMGLNQTGELWLKGPSIAKGYFRNEEEIITSEGWLKTGDLCYIDNDGFLFIVDRLKELIKYKGYQVPPAELEALLLNHPDILDAAVIPFPDKEAGQFPMAYVARKPESNLCEKKVIDFISKQVAPYKKIRKVAFIDSIPKTPSGKTLRKDLIKFAISKI

SEQ ID NO: 71569 - protein, 440 aa, Arabidopsis thaliana
  peptide (1)..(440): Ceres Seq. ID no. 4270214
  misc_feature (1)..(300): Pfam Name: AMP-binding enzyme Pfam Description: AMP-binding enzyme
  misc_feature (1)..(440): Homolog of NCBI NO: 30693203 NR Description: 4-coumarate:CoA ligase (4-coumaroyl-CoA synthase)
  misc_feature (1)..(440): Homolog of NCBI NO: 29888141 NR Description: 4-coumarate-CoA ligase-like protein [Arabidopsis
  misc_feature (1)..(440): Homolog of NCBI NO: 10177788 NR Description: AMP-binding protein-like [Arabidopsis thaliana]
  misc_feature (1)..(433): Homolog of NCBI NO: 25402913 NR Description: protein F5M15.18 [imported] - Arabidopsis >gi|8778604|gb|AAF79612.1|AC027665_13 F5M15.18 [Arabidopsis
  misc_feature (1)..(300): Homolog of NCBI NO: 15217958 NR Description: hypothetical protein; protein id: At1g20490.1
  misc_feature (313)..(440): Homolog of NCBI NO: 15217958 NR Description: hypothetical protein; protein id: At1g20490.1
  misc_feature (1)..(303): Homolog of NCBI NO: 25402913 NR Description: protein F5M15.18 [imported] - Arabidopsis >gi|8778604|gb|AAF79612.1|AC027665_13 F5M15.18 [Arabidopsis
  misc_feature (313)..(419): Homolog of NCBI NO: 25402913 NR Description: protein F5M15.18 [imported] - Arabidopsis >gi|8778604|gb|AAF79612.1|AC027665_13 F5M15.18 [Arabidopsis
  misc_feature (1)..(438): Homolog of NCBI NO: 18394871 NR Description: expressed protein; protein id: At1g20510.1 thaliana] >gi|13430676|gb|AAK25960.1|AF360250_1 unknown protein thaliana] >gi|14532846|gb|AAK64105.1| unknown protein
  misc_feature (1)..(438): Homolog of NCBI NO: 29893225 NR Description: 4-coumarate-CoA ligase-like protein [Arabidopsis
MSLGAVLTTANPLNTASEILRQIADSNPKLAFTTPELAPKIASSGISIVLERVEDTLRVPRGLKVVGNLTEMMKKEPSGQAVRNQVHKDDTAMLLYSSGTTGRSKGVNSSHGNLIAHVARYIAEPFEQPQQTFICTVPLFHTFGLLNFVLATLALGTTVVILPRFDLGEMMAAVEKYRATTLILVPPVLVTMINKADQIMKKYDVSFLRTVRCGGAPLSKEVTQGFMKKYPTVDVYQGYALTESNGAGASIESVEESRRYGAVGLLSCGVEARIVDPNTGQVMGLNQTGELWLKGPSIAKGYFRNEEEIITSEGWLKTGDLCYIDNDGFLFIVDRLKELIKYKGYQVPPAELEALLLNHPDILDAAVIPFPDKEAGQFPMAYVARKPESNLCEKKVIDFISKQVAPYKKIRKVAFIDSIPKTPSGKTLRKDLIKFAISKI

SEQ ID NO: 71570 - DNA, 2160 bp, Arabidopsis thaliana
  misc_feature (1)..(2160): Ceres Seq. ID no. 4305462
  misc_feature: MA Experiment ID: 20000171 Result: Up-regulated in Transcription
  misc_feature: MA Experiment 20000171 PARAMETER Experiment Name: At_42deg_Heat_P Parameter: Age (day) Value: 14
  misc_feature: MA Experiment 20000171 PARAMETER Experiment Name: At_42deg_Heat_P Parameter: Organism Value: A. thaliana
  misc_feature: MA Experiment 20000171 PARAMETER Experiment Name: At_42deg_Heat_P Parameter: Plant Line Value: WS
  misc_feature: MA Experiment 20000171 PARAMETER Experiment Name: At_42deg_Heat_P Parameter: Temperature (deg C) Value: 42 vs. 22
  misc_feature: MA Experiment 20000171 PARAMETER Experiment Name: At_42deg_Heat_P Parameter: Timepoint (hr) Value: 1
  misc_feature: MA Experiment 20000171 PARAMETER Experiment Name: At_42deg_Heat_P Parameter: Tissue Value: Aerial
  misc_feature: MA Experiment ID: 20000173 Result: Up-regulated in Transcription
  misc_feature: MA Experiment 20000173 PARAMETER Experiment Name: At_42deg_Heat_P Parameter: Age (day) Value: 14
  misc_feature: MA Experiment 20000173 PARAMETER Experiment Name: At_42deg_Heat_P Parameter: Organism Value: A. thaliana
  misc_feature: MA Experiment 20000173 PARAMETER Experiment Name: At_42deg_Heat_P Parameter: Plant Line Value: WS
  misc_feature: MA Experiment 20000173 PARAMETER Experiment Name: At_42deg_Heat_P Parameter: Temperature (deg C) Value: 42 vs. 22
  misc_feature: MA Experiment 20000173 PARAMETER Experiment Name: At_42deg_Heat_P Parameter: Timepoint (hr) Value: 6
  misc_feature: MA Experiment 20000173 PARAMETER Experiment Name: At_42deg_Heat_P Parameter: Tissue Value: Aerial
  misc_feature: MA Experiment ID: 20000439 Result: Up-regulated in Transcription
  misc_feature: MA Experiment 20000439 PARAMETER Experiment Name: At_Roots__P Parameter: Age (day) Value: 14 vs. 21
  misc_feature: MA Experiment 20000439 PARAMETER Experiment Name: At_Roots__P Parameter: Organism Value: A. thaliana
  misc_feature: MA Experiment 20000439 PARAMETER Experiment Name: At_Roots__P Parameter: Tissue Value: Roots vs. Whole Plant
  misc_feature: MA Experiment ID: 20001558 Result: Up-regulated in Transcription
  misc_feature: MA Experiment 20001558 PARAMETER Experiment Name: At_Drought_Soil_Dry_P Parameter: Age (day) Value: 27
  misc_feature: MA Experiment 20001558 PARAMETER Experiment Name: At_Drought_Soil_Dry_P Parameter: Organism Value: A. thaliana
  misc_feature: MA Experiment 20001558 PARAMETER Experiment Name: At_Drought_Soil_Dry_P Parameter: Plant Line Value: WS
  misc_feature: MA Experiment 20001558 PARAMETER Experiment Name: At_Drought_Soil_Dry_P Parameter: Post Timepoint (hr) Value: 6
  misc_feature: MA Experiment 20001558 PARAMETER Experiment Name: At_Drought_Soil_Dry_P Parameter: Post-Treatment Value: Re-Water vs. No Drought
  misc_feature: MA Experiment 20001558 PARAMETER Experiment Name: At_Drought_Soil_Dry_P Parameter: Timepoint (day) Value: 13
  misc_feature: MA Experiment 20001558 PARAMETER Experiment Name: At_Drought_Soil_Dry_P Parameter: Treatment Value: Drought vs. No Drought
  misc_feature: MA Experiment ID: 20001906 Result: Down-regulated in Transcription
  misc_feature: MA Experiment 20001906 PARAMETER Experiment Name: At_Drought_Reproduction_P Parameter: Age (day) Value: 35
  misc_feature: MA Experiment 20001906 PARAMETER Experiment Name: At_Drought_Reproduction_P Parameter: Organism Value: A. thaliana
  misc_feature: MA Experiment 20001906 PARAMETER Experiment Name: At_Drought_Reproduction_P Parameter: Plant Line Value: WS
  misc_feature: MA Experiment 20001906 PARAMETER Experiment Name: At_Drought_Reproduction_P Parameter: Timepoint (day) Value: 5
  misc_feature: MA Experiment 20001906 PARAMETER Experiment Name: At_Drought_Reproduction_P Parameter: Tissue Value: Siliques
  misc_feature: MA Experiment 20001906 PARAMETER Experiment Name: At_Drought_Reproduction_P Parameter: Treatment Value: Drought vs. No Drought
  misc_feature: Pfam Name: Pkinase Pfam Description: Protein kinase domain
atgagggagaattgggcggtggtggctctgtttacactatgcattgtagggtttgagcttagattcatccatggagctactgatgcatcagacacttcagcattgaacacattgttcagtggtatgcattctccagctcagctaacacaatggactgcagcagctggtgatccttgtggccagaattggagaggcgtcacttgttccggctcacgagttactcaaataaagttgtcaggtcttgagctctctggaactcttggaggatacatgcttgataaattgacttctcttaccgagcttgatctaagcagcaataatcttggaggtgatttaccatatcagtttcctccaaatctgcaacgattgaaccttgcgaataatcaattcactggagctgcttcgtactcactttctcagattacaccacttaagtatctcaatcttggtcacaatcagtttaaggggcagatagctatcgacttctccaagctcgactctctcacaaccttggacttctctttcaattctttcacgaactctttaccggcaacgttttcctctctaacaagtttaaaatcactataccttcagaacaatcagttctcaggcacagtcgatgtcttagccggtcttcctcttgagactctgaacattgcgaacaatgacttcacggggtggatccccagttctttaaagggcatcacattaataaaagatggcaactcattcaatactggacctgcacctccaccaccacctggtacacctcctatccgtggctccccgagccgtaaatctggaggacgtgaaagccggtctagtgatgagtccaccagaaatggagattccaagaaatcaggaatcggagcgggggcaattgcgggcataatcatttcattgttagtagttacagctcttcttgttgctttcttcttgttcagaagaaaaaaatcaaagaggtcatcacccatggacattgagaaaaccgataaccagcctttcactcttgcttcaaacgactttcacgaaaacaattccattcagagttcttcatcagttgagacaaagaaactggacacttcattgtctattaatcttcgacctccaccaattgatagaaacaaatcatttgatgatgaagattcgacaagaaagcctattgctgtcaagaaatccacagtggtggttccttcaaatgtgagactctattcagttgcagatctccaaattgctactggcagtttcagcgtagataatcttcttggagaagggacttttggacgagtatacagagctgagtttgatgatggaaaggttcttgctgtgaagaaaattgattcgtctgctctcccacatggcatgaccgatgatttcattgaaatggtatcgaaaatagccaatttggatcatccaaatgtgaccaagcttgttggttactgtgctgagcacggacaacatctcgtggtctatgaattccacaaaaatggatcattacatgacttcttacacttatcagaagaggaaagtaaagcattggtgtggaattcacgagtcaagatcgctcttgggactgcacgcgcattggagtatctgcatgaagtttgctcaccgtctatagtggacaagaatatcaaatcagctaatattttactcgattcagagctgaatcctcacttatcagattctggtctcgcaagcttccttcccacagctaatgagttattaaaccaaaccgatgaagggtatagcgcacctgaagtatcaatgtcaggccaatattctttgaagagtgacatttacagttttggagtagtgatgcttgaacttttaactgggagaaaaccatttgacagcacaaggtcaagatctgagcagtcactggttcgatgggcgacaccacaacttcacgacattgatgctttagccaaaatggttgatccagctcttaaagggctttatcctgtcaaatccctttctcgatttgcagatgttatcgctctctgtgtccagccggagccggagtttagaccaccaatgtctgaagttgtgcaggctctagttgtgttagtgcagagagctaacatgagcaagagaactgtcggagttgatccatcgcaacgtgctggtagtgccgacacgaccagtgattacatgtaa

SEQ ID NO: 71571 - protein, 719 aa, Arabidopsis thaliana
  peptide (1)..(719): Ceres Seq. ID no. 4305463
  misc_feature: Pfam Name: Pkinase Pfam Description: Protein kinase domain
  misc_feature (1)..(719): Homolog of NCBI NO: 30683104 NR Description: leucine-rich repeat transmembrane protein kinase, [Arabidopsis thaliana] >gi|9279582|dbj|BAB01040.1|
  misc_feature (1)..(530): Homolog of NCBI NO: 12324024 NR Description: leucine-rich repeat transmembrane protein kinase
  misc_feature (28)..(713): Homolog of NCBI NO: 7489783 NR Description: leucine-rich repeat transmembrane protein kinase
  misc_feature (5)..(713): Homolog of NCBI NO: 29367551 NR Description: putative leucine-rich repeat transmembrane
  misc_feature (27)..(719): Homolog of NCBI NO: 15217283 NR Description: Putative leucine-rich repeat transmembrane
  misc_feature (22)..(713): Homolog of NCBI NO: 7489784 NR Description: leucine-rich repeat transmembrane protein kinase
  misc_feature (6)..(704): Homolog of NCBI NO: 34906746 NR Description: similar to leucine-rich repeat transmembrane
  misc_feature (96)..(443): Homolog of NCBI NO: 37533916 NR Description: putative leucine-rich repeat transmembrane
  misc_feature (439)..(713): Homolog of NCBI NO: 37533916 NR Description: putative leucine-rich repeat transmembrane
  misc_feature (5)..(275): Homolog of NCBI NO: 37533916 NR Description: putative leucine-rich repeat transmembrane
MRENWAVVALFTLCIVGFELRFIHGATDASDTSALNTLFSGMHSPAQLTQWTAAAGDPCGQNWRGVTCSGSRVTQIKLSGLELSGTLGGYMLDKLTSLTELDLSSNNLGGDLPYQFPPNLQRLNLANNQFTGAASYSLSQITPLKYLNLGHNQFKGQIAIDFSKLDSLTTLDFSFNSFTNSLPATFSSLTSLKSLYLQNNQFSGTVDVLAGLPLETLNIANNDFTGWIPSSLKGITLIKDGNSFNTGPAPPPPPGTPPIRGSPSRKSGGRESRSSDESTRNGDSKKSGIGAGAIAGIIISLLVVTALLVAFFLFRRKKSKRSSPMDIEKTDNQPFTLASNDFHENNSIQSSSSVETKKLDTSLSINLRPPPIDRNKSFDDEDSTRKPIAVKKSTVVVPSNVRLYSVADLQIATGSFSVDNLLGEGTFGRVYRAEFDDGKVLAVKKIDSSALPHGMTDDFIEMVSKIANLDHPNVTKLVGYCAEHGQHLVVYEFHKNGSLHDFLHLSEEESKALVWNSRVKIALGTARALEYLHEVCSPSIVDKNIKSANILLDSELNPHLSDSGLASFLPTANELLNQTDEGYSAPEVSMSGQYSLKSDIYSFGVVMLELLTGRKPFDSTRSRSEQSLVRWATPQLHDIDALAKMVDPALKGLYPVKSLSRFADVIALCVQPEPEFRPPMSEVVQALVVLVQRANMSKRTVGVDPSQRAGSADTTSDYM

SEQ ID NO: 71572 - protein, 678 aa, Arabidopsis thaliana
  peptide (1)..(678): Ceres Seq. ID no. 4305464
  misc_feature: Pfam Name: Pkinase Pfam Description: Protein kinase domain
  misc_feature (1)..(678): Homolog of NCBI NO: 30683104 NR Description: leucine-rich repeat transmembrane protein kinase, [Arabidopsis thaliana] >gi|9279582|dbj|BAB01040.1|
  misc_feature (1)..(489): Homolog of NCBI NO: 12324024 NR Description: leucine-rich repeat transmembrane protein kinase
  misc_feature (1)..(672): Homolog of NCBI NO: 7489783 NR Description: leucine-rich repeat transmembrane protein kinase
  misc_feature (1)..(672): Homolog of NCBI NO: 29367551 NR Description: putative leucine-rich repeat transmembrane
  misc_feature (1)..(678): Homolog of NCBI NO: 15217283 NR Description: Putative leucine-rich repeat transmembrane
  misc_feature (1)..(672): Homolog of NCBI NO: 7489784 NR Description: leucine-rich repeat transmembrane protein kinase
  misc_feature (1)..(663): Homolog of NCBI NO: 34906746 NR Description: similar to leucine-rich repeat transmembrane
  misc_feature (55)..(402): Homolog of NCBI NO: 37533916 NR Description: putative leucine-rich repeat transmembrane
  misc_feature (398)..(672): Homolog of NCBI NO: 37533916 NR Description: putative leucine-rich repeat transmembrane
  misc_feature (1)..(234): Homolog of NCBI NO: 37533916 NR Description: putative leucine-rich repeat transmembrane
MHSPAQLTQWTAAAGDPCGQNWRGVTCSGSRVTQIKLSGLELSGTLGGYMLDKLTSLTELDLSSNNLGGDLPYQFPPNLQRLNLANNQFTGAASYSLSQITPLKYLNLGHNQFKGQIAIDFSKLDSLTTLDFSFNSFTNSLPATFSSLTSLKSLYLQNNQFSGTVDVLAGLPLETLNIANNDFTGWIPSSLKGITLIKDGNSFNTGPAPPPPPGTPPIRGSPSRKSGGRESRSSDESTRNGDSKKSGIGAGAIAGIIISLLVVTALLVAFFLFRRKKSKRSSPMDIEKTDNQPFTLASNDFHENNSIQSSSSVETKKLDTSLSINLRPPPIDRNKSFDDEDSTRKPIAVKKSTVVVPSNVRLYSVADLQIATGSFSVDNLLGEGTFGRVYRAEFDDGKVLAVKKIDSSALPHGMTDDFIEMVSKIANLDHPNVTKLVGYCAEHGQHLVVYEFHKNGSLHDFLHLSEEESKALVWNSRVKIALGTARALEYLHEVCSPSIVDKNIKSANILLDSELNPHLSDSGLASFLPTANELLNQTDEGYSAPEVSMSGQYSLKSDIYSFGVVMLELLTGRKPFDSTRSRSEQSLVRWATPQLHDIDALAKMVDPALKGLYPVKSLSRFADVIALCVQPEPEFRPPMSEVVQALVVLVQRANMSKRTVGVDPSQRAGSADTTSDYM

SEQ ID NO: 71573 - protein, 629 aa, Arabidopsis thaliana
  peptide (1)..(629): Ceres Seq. ID no. 4305465
  misc_feature: Pfam Name: Pkinase Pfam Description: Protein kinase domain
  misc_feature (1)..(629): Homolog of NCBI NO: 30683104 NR Description: leucine-rich repeat transmembrane protein kinase, [Arabidopsis thaliana] >gi|9279582|dbj|BAB01040.1|
  misc_feature (1)..(440): Homolog of NCBI NO: 12324024 NR Description: leucine-rich repeat transmembrane protein kinase
  misc_feature (1)..(623): Homolog of NCBI NO: 7489783 NR Description: leucine-rich repeat transmembrane protein kinase
  misc_feature (1)..(623): Homolog of NCBI NO: 29367551 NR Description: putative leucine-rich repeat transmembrane
  misc_feature (1)..(629): Homolog of NCBI NO: 15217283 NR Description: Putative leucine-rich repeat transmembrane
  misc_feature (1)..(623): Homolog of NCBI NO: 7489784 NR Description: leucine-rich repeat transmembrane protein kinase
  misc_feature (1)..(614): Homolog of NCBI NO: 34906746 NR Description: similar to leucine-rich repeat transmembrane
  misc_feature (6)..(353): Homolog of NCBI NO: 37533916 NR Description: putative leucine-rich repeat transmembrane
  misc_feature (349)..(623): Homolog of NCBI NO: 37533916 NR Description: putative leucine-rich repeat transmembrane
  misc_feature (1)..(185): Homolog of NCBI NO: 37533916 NR Description: putative leucine-rich repeat transmembrane
MLDKLTSLTELDLSSNNLGGDLPYQFPPNLQRLNLANNQFTGAASYSLSQITPLKYLNLGHNQFKGQIAIDFSKLDSLTTLDFSFNSFTNSLPATFSSLTSLKSLYLQNNQFSGTVDVLAGLPLETLNIANNDFTGWIPSSLKGITLIKDGNSFNTGPAPPPPPGTPPIRGSPSRKSGGRESRSSDESTRNGDSKKSGIGAGAIAGIIISLLVVTALLVAFFLFRRKKSKRSSPMDIEKTDNQPFTLASNDFHENNSIQSSSSVETKKLDTSLSINLRPPPIDRNKSFDDEDSTRKPIAVKKSTVVVPSNVRLYSVADLQIATGSFSVDNLLGEGTFGRVYRAEFDDGKVLAVKKIDSSALPHGMTDDFIEMVSKIANLDHPNVTKLVGYCAEHGQHLVVYEFHKNGSLHDFLHLSEEESKALVWNSRVKIALGTARALEYLHEVCSPSIVDKNIKSANILLDSELNPHLSDSGLASFLPTANELLNQTDEGYSAPEVSMSGQYSLKSDIYSFGVVMLELLTGRKPFDSTRSRSEQSLVRWATPQLHDIDALAKMVDPALKGLYPVKSLSRFADVIALCVQPEPEFRPPMSEVVQALVVLVQRANMSKRTVGVDPSQRAGSADTTSDYM

SEQ ID NO: 71574 - DNA, 1215 bp, Arabidopsis thaliana
  misc_feature (1)..(1215): Ceres Seq. ID no. 4307910
  misc_feature: MA Experiment ID: 20000184 Result: Down-regulated in Transcription
  misc_feature: MA Experiment 20000184 PARAMETER Experiment Name: At_Shoots__P Parameter: Age (day) Value: 7
  misc_feature: MA Experiment 20000184 PARAMETER Experiment Name: At_Shoots__P Parameter: Tissue Value: Shoots vs. Whole Plant
  misc_feature: MA Experiment ID: 20000495 Result: Down-regulated in Transcription
  misc_feature: MA Experiment 20000495 PARAMETER Experiment Name: At_Guard_Cells_P Parameter: Harvest Date Value: 8/2/2002
  misc_feature: MA Experiment 20000495 PARAMETER Experiment Name: At_Guard_Cells_P Parameter: Organism Value: A. thaliana
  misc_feature: MA Experiment 20000495 PARAMETER Experiment Name: At_Guard_Cells_P Parameter: Tissue Value: Guard Cells vs. Leaves
atgggaggaagaggtggtggtagtactgattatgatgataaggttggtaggaagaggaagaaggagaaagagagaagtagtagtggtagtgggaaggagaagaggcataagtttccgaatcgtggcgaaaggaagtcagaagagattgatgagatgtggaaatctattgctcataacccagagaatgatgaagaaggtgttaggactatggatgatgataatttcattgacgatactggtttggatccttctgagaggtatggaggtgacgctggagaccgttctccaactcattatcctcaggcagaagagggtgaggatgaagatgaggtaaataaccttttcaaaatggggaagaaaaagaaaaagactgaaagaaatcctgcggaaattgcgcttttggttgagaatgtgatggctgagcttgaggttactgctgaggaagatgcagaacttaatagacaggggaagcctgctatcaacaagcttaagaaactttcgcttcttaccgatgtacttggaaagaagcagcttcaaacagaattcctggaccatggagttttaaccctgttgaagaattggcttgagcctcttccagatggaagcttgccaaatataaacatccgtgcagctattctaagagttcttactgattttccgattgacttggaccagtatgatagaagggagcaattgaaaaagagtgggcttggaaaggtcattatgttcttatcaaagtccgacgaggaaactaattccaacagacgacttgctaaggatttggttgataaatggtctcgtccaattttcaacaagagtactaggtttgaggacatgagaaatctcgatgaagatagggttccctatagaagaccaccagtgaagaaacctagcaacaaagcgacaatggagtccagagatggtgactttgacttggaaattcgggaacgtaaaactggtctgacttcgggtcagagttcaaggggagacaggcaaatgacgatgaggccggaagcaaccccattggactttttgatccgtcctcaatccaagattgatccagatgagatcatagcccgtgcaaaacaggtttctcaggaccagcgtcgggtcaagatgaacaagaaacttcagcagctaaaaggaacaaagaagaagcggctacaagctacgaaagtgagcgttgaaggtcggggtatgatcaagtacctctag

SEQ ID NO: 71575 - protein, 404 aa, Arabidopsis thaliana
  peptide (1)..(404): Ceres Seq. ID no. 4307911
  misc_feature (133)..(400): Pfam Name: IWS1 C-terminus Pfam Description: IWS1 C-terminus
  misc_feature (1)..(404): Homolog of NCBI NO: 15222574 NR Description: unknown protein; protein id: At1g32130.1
  misc_feature (2)..(404): Homolog of NCBI NO: 34895776 NR Description: P0434B04.3 [Oryza sativa (japonica
  misc_feature (37)..(404): Homolog of NCBI NO: 15234085 NR Description: putative protein; protein id: At4g19000.1
  misc_feature (103)..(400): Homolog of NCBI NO: 31203501 NR Description: ENSANGP00000010073 [Anopheles gambiae]
  misc_feature (55)..(400): Homolog of NCBI NO: 24642454 NR Description: CG9915-PA [Drosophila melanogaster]
  misc_feature (13)..(400): Homolog of NCBI NO: 16552402 NR Description: unnamed protein product [Homo sapiens]
  misc_feature (13)..(400): Homolog of NCBI NO: 21739669 NR Description: hypothetical protein [Homo sapiens]
  misc_feature (13)..(400): Homolog of NCBI NO: 24308177 NR Description: hypothetical protein FLJ10006 [Homo sapiens]
  misc_feature (134)..(400): Homolog of NCBI NO: 7023152 NR Description: unnamed protein product [Homo sapiens]
  misc_feature (113)..(385): Homolog of NCBI NO: 31241925 NR Description: ENSANGP00000012213 [Anopheles gambiae]
MGGRGGGSTDYDDKVGRKRKKEKERSSSGSGKEKRHKFPNRGERKSEEIDEMWKSIAHNPENDEEGVRTMDDDNFIDDTGLDPSERYGGDAGDRSPTHYPQAEEGEDEDEVNNLFKMGKKKKKTERNPAEIALLVENVMAELEVTAEEDAELNRQGKPAINKLKKLSLLTDVLGKKQLQTEFLDHGVLTLLKNWLEPLPDGSLPNINIRAAILRVLTDFPIDLDQYDRREQLKKSGLGKVIMFLSKSDEETNSNRRLAKDLVDKWSRPIFNKSTRFEDMRNLDEDRVPYRRPPVKKPSNKATMESRDGDFDLEIRERKTGLTSGQSSRGDRQMTMRPEATPLDFLIRPQSKIDPDEIIARAKQVSQDQRRVKMNKKLQQLKGTKKKRLQATKVSVEGRGMIKYL

SEQ ID NO: 71576 - protein, 353 aa, Arabidopsis thaliana
  peptide (1)..(353): Ceres Seq. ID no. 4307912
  misc_feature (82)..(349): Pfam Name: IWS1 C-terminus Pfam Description: IWS1 C-terminus
  misc_feature (1)..(353): Homolog of NCBI NO: 15222574 NR Description: unknown protein; protein id: At1g32130.1
  misc_feature (1)..(353): Homolog of NCBI NO: 34895776 NR Description: P0434B04.3 [Oryza sativa (japonica
  misc_feature (1)..(353): Homolog of NCBI NO: 15234085 NR Description: putative protein; protein id: At4g19000.1
  misc_feature (52)..(349): Homolog of NCBI NO: 31203501 NR Description: ENSANGP00000010073 [Anopheles gambiae]
  misc_feature (4)..(349): Homolog of NCBI NO: 24642454 NR Description: CG9915-PA [Drosophila melanogaster]
  misc_feature (1)..(349): Homolog of NCBI NO: 16552402 NR Description: unnamed protein product [Homo sapiens]
  misc_feature (1)..(349): Homolog of NCBI NO: 21739669 NR Description: hypothetical protein [Homo sapiens]
  misc_feature (1)..(349): Homolog of NCBI NO: 24308177 NR Description: hypothetical protein FLJ10006 [Homo sapiens]
  misc_feature (83)..(349): Homolog of NCBI NO: 7023152 NR Description: unnamed protein product [Homo sapiens]
  misc_feature (62)..(334): Homolog of NCBI NO: 31241925 NR Description: ENSANGP00000012213 [Anopheles gambiae]
MWKSIAHNPENDEEGVRTMDDDNFIDDTGLDPSERYGGDAGDRSPTHYPQAEEGEDEDEVNNLFKMGKKKKKTERNPAEIALLVENVMAELEVTAEEDAELNRQGKPAINKLKKLSLLTDVLGKKQLQTEFLDHGVLTLLKNWLEPLPDGSLPNINIRAAILRVLTDFPIDLDQYDRREQLKKSGLGKVIMFLSKSDEETNSNRRLAKDLVDKWSRPIFNKSTRFEDMRNLDEDRVPYRRPPVKKPSNKATMESRDGDFDLEIRERKTGLTSGQSSRGDRQMTMRPEATPLDFLIRPQSKIDPDEIIARAKQVSQDQRRVKMNKKLQQLKGTKKKRLQATKVSVEGRGMIKYL

SEQ ID NO: 71577 - protein, 335 aa, Arabidopsis thaliana
  peptide (1)..(335): Ceres Seq. ID no. 4307913
  misc_feature (64)..(331): Pfam Name: IWS1 C-terminus Pfam Description: IWS1 C-terminus
  misc_feature (1)..(335): Homolog of NCBI NO: 15222574 NR Description: unknown protein; protein id: At1g32130.1
  misc_feature (1)..(335): Homolog of NCBI NO: 34895776 NR Description: P0434B04.3 [Oryza sativa (japonica
  misc_feature (1)..(335): Homolog of NCBI NO: 15234085 NR Description: putative protein; protein id: At4g19000.1
  misc_feature (34)..(331): Homolog of NCBI NO: 31203501 NR Description: ENSANGP00000010073 [Anopheles gambiae]
  misc_feature (1)..(331): Homolog of NCBI NO: 24642454 NR Description: CG9915-PA [Drosophila melanogaster]
  misc_feature (1)..(331): Homolog of NCBI NO: 16552402 NR Description: unnamed protein product [Homo sapiens]
  misc_feature (1)..(331): Homolog of NCBI NO: 21739669 NR Description: hypothetical protein [Homo sapiens]
  misc_feature (1)..(331): Homolog of NCBI NO: 24308177 NR Description: hypothetical protein FLJ10006 [Homo sapiens]
  misc_feature (65)..(331): Homolog of NCBI NO: 7023152 NR Description: unnamed protein product [Homo sapiens]
  misc_feature (44)..(316): Homolog of NCBI NO: 31241925 NR Description: ENSANGP00000012213 [Anopheles gambiae]
MDDDNFIDDTGLDPSERYGGDAGDRSPTHYPQAEEGEDEDEVNNLFKMGKKKKKTERNPAEIALLVENVMAELEVTAEEDAELNRQGKPAINKLKKLSLLTDVLGKKQLQTEFLDHGVLTLLKNWLEPLPDGSLPNINIRAAILRVLTDFPIDLDQYDRREQLKKSGLGKVIMFLSKSDEETNSNRRLAKDLVDKWSRPIFNKSTRFEDMRNLDEDRVPYRRPPVKKPSNKATMESRDGDFDLEIRERKTGLTSGQSSRGDRQMTMRPEATPLDFLIRPQSKIDPDEIIARAKQVSQDQRRVKMNKKLQQLKGTKKKRLQATKVSVEGRGMIKYL

SEQ ID NO: 71578 - DNA, 861 bp, Arabidopsis thaliana
  misc_feature (1)..(861): Ceres Seq. ID no. 4360073
  misc_feature: MA Experiment ID: 20000169 Result: Up-regulated in Transcription
  misc_feature: MA Experiment 20000169 PARAMETER Experiment Name: At_100uM_ABA_P Parameter: Age (day) Value: 14
  misc_feature: MA Experiment 20000169 PARAMETER Experiment Name: At_100uM_ABA_P Parameter: Organism Value: A. thaliana
  misc_feature: MA Experiment 20000169 PARAMETER Experiment Name: At_100uM_ABA_P Parameter: Plant Line Value: WS
  misc_feature: MA Experiment 20000169 PARAMETER Experiment Name: At_100uM_ABA_P Parameter: Timepoint (hr) Value: 6
  misc_feature: MA Experiment 20000169 PARAMETER Experiment Name: At_100uM_ABA_P Parameter: Tissue Value: Aerial
  misc_feature: MA Experiment 20000169 PARAMETER Experiment Name: At_100uM_ABA_P Parameter: Treatment Value: 100uM ABA vs. No Treatment
  misc_feature: MA Experiment ID: 20000173 Result: Down-regulated in Transcription
  misc_feature: MA Experiment 20000173 PARAMETER Experiment Name: At_42deg_Heat_P Parameter: Age (day) Value: 14
  misc_feature: MA Experiment 20000173 PARAMETER Experiment Name: At_42deg_Heat_P Parameter: Organism Value: A. thaliana
  misc_feature: MA Experiment 20000173 PARAMETER Experiment Name: At_42deg_Heat_P Parameter: Plant Line Value: WS
  misc_feature: MA Experiment 20000173 PARAMETER Experiment Name: At_42deg_Heat_P Parameter: Temperature (deg C) Value: 42 vs. 22
  misc_feature: MA Experiment 20000173 PARAMETER Experiment Name: At_42deg_Heat_P Parameter: Timepoint (hr) Value: 6
  misc_feature: MA Experiment 20000173 PARAMETER Experiment Name: At_42deg_Heat_P Parameter: Tissue Value: Aerial
  misc_feature: MA Experiment ID: 20000179 Result: Up-regulated in Transcription
  misc_feature: MA Experiment 20000179 PARAMETER Experiment Name: At_Germinating_Seeds_P Parameter: Age (hr) Value: 6 vs. 0
  misc_feature: MA Experiment 20000179 PARAMETER Experiment Name: At_Germinating_Seeds_P Parameter: Tissue Value: Germinating Seeds
  misc_feature: MA Experiment ID: 20000180 Result: Up-regulated in Transcription
  misc_feature: MA Experiment 20000180 PARAMETER Experiment Name: At_Germinating_Seeds_P Parameter: Age (hr) Value: 24 vs. 0
  misc_feature: MA Experiment 20000180 PARAMETER Experiment Name: At_Germinating_Seeds_P Parameter: Tissue Value: Germinating Seeds
  misc_feature: MA Experiment ID: 20000184 Result: Down-regulated in Transcription
  misc_feature: MA Experiment 20000184 PARAMETER Experiment Name: At_Shoots__P Parameter: Age (day) Value: 7
  misc_feature: MA Experiment 20000184 PARAMETER Experiment Name: At_Shoots__P Parameter: Tissue Value: Shoots vs. Whole Plant
  misc_feature: MA Experiment ID: 20000234 Result: Down-regulated in Transcription
  misc_feature: MA Experiment 20000234 PARAMETER Experiment Name: At_Siliques_P Parameter: Age (day) Value: 21
  misc_feature: MA Experiment 20000234 PARAMETER Experiment Name: At_Siliques_P Parameter: Organism Value: A. thaliana
  misc_feature: MA Experiment 20000234 PARAMETER Experiment Name: At_Siliques_P Parameter: Plant Line Value: WS
  misc_feature: MA Experiment 20000234 PARAMETER Experiment Name: At_Siliques_P Parameter: Tissue Value: Less Than 5mm Siliques vs. Whole Plant
  misc_feature: MA Experiment ID: 20000235 Result: Down-regulated in Transcription
  misc_feature: MA Experiment 20000235 PARAMETER Experiment Name: At_Siliques_P Parameter: Age (day) Value: 21
  misc_feature: MA Experiment 20000235 PARAMETER Experiment Name: At_Siliques_P Parameter: Organism Value: A. thaliana
  misc_feature: MA Experiment 20000235 PARAMETER Experiment Name: At_Siliques_P Parameter: Plant Line Value: WS
  misc_feature: MA Experiment 20000235 PARAMETER Experiment Name: At_Siliques_P Parameter: Tissue Value: 5-10mm Siliques vs. Whole Plant
  misc_feature: MA Experiment ID: 20000265 Result: Down-regulated in Transcription
  misc_feature: MA Experiment 20000265 PARAMETER Experiment Name: At_Open_Flower_P Parameter: Age (day) Value: 21
  misc_feature: MA Experiment 20000265 PARAMETER Experiment Name: At_Open_Flower_P Parameter: Plant Line Value: WS
  misc_feature: MA Experiment 20000265 PARAMETER Experiment Name: At_Open_Flower_P Parameter: Tissue Value: Closed Flower vs. Whole Plant
  misc_feature: MA Experiment ID: 20000437 Result: Up-regulated in Transcription
  misc_feature: MA Experiment 20000437 PARAMETER Experiment Name: At_Drought_P Parameter: Age (day) Value: 8
  misc_feature: MA Experiment 20000437 PARAMETER Experiment Name: At_Drought_P Parameter: Organism Value: A. thaliana
  misc_feature: MA Experiment 20000437 PARAMETER Experiment Name: At_Drought_P Parameter: Plant Line Value: WS
  misc_feature: MA Experiment 20000437 PARAMETER Experiment Name: At_Drought_P Parameter: Timepoint (hr) Value: 24
  misc_feature: MA Experiment 20000437 PARAMETER Experiment Name: At_Drought_P Parameter: Tissue Value: Whole Plant
  misc_feature: MA Experiment 20000437 PARAMETER Experiment Name: At_Drought_P Parameter: Treatment Value: Drought vs. No Drought
  misc_feature: MA Experiment ID: 20000573 Result: Up-regulated in Transcription
  misc_feature: MA Experiment 20000573 PARAMETER Experiment Name: At_100uM_ABA_Mutants__P Parameter: Organism Value: A. thaliana
  misc_feature: MA Experiment 20000573 PARAMETER Experiment Name: At_100uM_ABA_Mutants__P Parameter: Plant Line Value: CS22 vs. Ler wt
  misc_feature: MA Experiment 20000573 PARAMETER Experiment Name: At_100uM_ABA_Mutants__P Parameter: Timepoint (hr) Value: N/A
  misc_feature: MA Experiment 20000573 PARAMETER Experiment Name: At_100uM_ABA_Mutants__P Parameter: Tissue Value: Whole Plant
  misc_feature: MA Experiment 20000573 PARAMETER Experiment Name: At_100uM_ABA_Mutants__P Parameter: Treatment Value: None
  misc_feature: MA Experiment ID: 20000794 Result: Up-regulated in Transcription
  misc_feature: MA Experiment 20000794 PARAMETER Experiment Name: At_Petals_P Parameter: Age (day) Value: 23-25 days
  misc_feature: MA Experiment 20000794 PARAMETER Experiment Name: At_Petals_P Parameter: Plant Line Value: WS
  misc_feature: MA Experiment 20000794 PARAMETER Experiment Name: At_Petals_P Parameter: Tissue Value: Petals vs. Whole plant
  misc_feature: MA Experiment ID: 20001247 Result: Up-regulated in Transcription
  misc_feature: MA Experiment 20001247 PARAMETER Experiment Name: At_Far-red-induction_P Parameter: Age (day) Value: 7
  misc_feature: MA Experiment 20001247 PARAMETER Experiment Name: At_Far-red-induction_P Parameter: Light Value: Far-red vs. White
  misc_feature: MA Experiment 20001247 PARAMETER Experiment Name: At_Far-red-induction_P Parameter: Organism Value: A. thaliana
  misc_feature: MA Experiment 20001247 PARAMETER Experiment Name: At_Far-red-induction_P Parameter: Plant Line Value: Columbia
  misc_feature: MA Experiment 20001247 PARAMETER Experiment Name: At_Far-red-induction_P Parameter: Timepoint (hr) Value: 1
  misc_feature: MA Experiment 20001247 PARAMETER Experiment Name: At_Far-red-induction_P Parameter: Tissue Value: Whole Plant
  misc_feature: MA Experiment ID: 20001248 Result: Up-regulated in Transcription
  misc_feature: MA Experiment 20001248 PARAMETER Experiment Name: At_Far-red-induction_P Parameter: Age (day) Value: 7
  misc_feature: MA Experiment 20001248 PARAMETER Experiment Name: At_Far-red-induction_P Parameter: Light Value: Far-red vs. White
  misc_feature: MA Experiment 20001248 PARAMETER Experiment Name: At_Far-red-induction_P Parameter: Organism Value: A. thaliana
  misc_feature: MA Experiment 20001248 PARAMETER Experiment Name: At_Far-red-induction_P Parameter: Plant Line Value: Columbia
  misc_feature: MA Experiment 20001248 PARAMETER Experiment Name: At_Far-red-induction_P Parameter: Timepoint (hr) Value: 4
  misc_feature: MA Experiment 20001248 PARAMETER Experiment Name: At_Far-red-induction_P Parameter: Tissue Value: Whole Plant
  misc_feature: MA Experiment ID: 20001450 Result: Up-regulated in Transcription
  misc_feature: MA Experiment 20001450 PARAMETER Experiment Name: At_Far-red-induction_P Parameter: Age (day) Value: 7
  misc_feature: MA Experiment 20001450 PARAMETER Experiment Name: At_Far-red-induction_P Parameter: Light Value: Far-red vs. White
  misc_feature: MA Experiment 20001450 PARAMETER Experiment Name: At_Far-red-induction_P Parameter: Organism Value: A. thaliana
  misc_feature: MA Experiment 20001450 PARAMETER Experiment Name: At_Far-red-induction_P Parameter: Plant Line Value: Columbia
  misc_feature: MA Experiment 20001450 PARAMETER Experiment Name: At_Far-red-induction_P Parameter: Timepoint (hr) Value: 8
  misc_feature: MA Experiment 20001450 PARAMETER Experiment Name: At_Far-red-induction_P Parameter: Tissue Value: Whole Plant
  misc_feature: MA Experiment ID: 20001451 Result: Up-regulated in Transcription
  misc_feature: MA Experiment 20001451 PARAMETER Experiment Name: At_Far-red-induction_P Parameter: Age (day) Value: 7
  misc_feature: MA Experiment 20001451 PARAMETER Experiment Name: At_Far-red-induction_P Parameter: Light Value: Far-red vs. White
  misc_feature: MA Experiment 20001451 PARAMETER Experiment Name: At_Far-red-induction_P Parameter: Organism Value: A. thaliana
  misc_feature: MA Experiment 20001451 PARAMETER Experiment Name: At_Far-red-induction_P Parameter: Plant Line Value: Columbia
  misc_feature: MA Experiment 20001451 PARAMETER Experiment Name: At_Far-red-induction_P Parameter: Timepoint (hr) Value: 24
  misc_feature: MA Experiment 20001451 PARAMETER Experiment Name: At_Far-red-induction_P Parameter: Tissue Value: Whole Plant
  misc_feature: MA Experiment ID: 20001557 Result: Down-regulated in Transcription
  misc_feature: MA Experiment 20001557 PARAMETER Experiment Name: At_Drought_Soil_Dry_P Parameter: Age (day) Value: 27
  misc_feature: MA Experiment 20001557 PARAMETER Experiment Name: At_Drought_Soil_Dry_P Parameter: Organism Value: A. thaliana
  misc_feature: MA Experiment 20001557 PARAMETER Experiment Name: At_Drought_Soil_Dry_P Parameter: Plant Line Value: WS
  misc_feature: MA Experiment 20001557 PARAMETER Experiment Name: At_Drought_Soil_Dry_P Parameter: Post Timepoint (hr) Value: 3
  misc_feature: MA Experiment 20001557 PARAMETER Experiment Name: At_Drought_Soil_Dry_P Parameter: Post-Treatment Value: Re-Water vs. No Drought
  misc_feature: MA Experiment 20001557 PARAMETER Experiment Name: At_Drought_Soil_Dry_P Parameter: Timepoint (day) Value: 13
  misc_feature: MA Experiment 20001557 PARAMETER Experiment Name: At_Drought_Soil_Dry_P Parameter: Treatment Value: Drought vs. No Drought
  misc_feature: MA Experiment ID: 20001558 Result: Down-regulated in Transcription
  misc_feature: MA Experiment 20001558 PARAMETER Experiment Name: At_Drought_Soil_Dry_P Parameter: Age (day) Value: 27
  misc_feature: MA Experiment 20001558 PARAMETER Experiment Name: At_Drought_Soil_Dry_P Parameter: Organism Value: A. thaliana
  misc_feature: MA Experiment 20001558 PARAMETER Experiment Name: At_Drought_Soil_Dry_P Parameter: Plant Line Value: WS
  misc_feature: MA Experiment 20001558 PARAMETER Experiment Name: At_Drought_Soil_Dry_P Parameter: Post Timepoint (hr) Value: 6
  misc_feature: MA Experiment 20001558 PARAMETER Experiment Name: At_Drought_Soil_Dry_P Parameter: Post-Treatment Value: Re-Water vs. No Drought
  misc_feature: MA Experiment 20001558 PARAMETER Experiment Name: At_Drought_Soil_Dry_P Parameter: Timepoint (day) Value: 13
  misc_feature: MA Experiment 20001558 PARAMETER Experiment Name: At_Drought_Soil_Dry_P Parameter: Treatment Value: Drought vs. No Drought
atggcgtttacactaggtggaagagctcgtcgtctagtctctgcaacatcagttcatcaaaatggttgcttacacaaactgcaacaaattggatcggatcggtttcagcttggtgaagcaaaagcaataagattactacccaggagaacaaacatggttcaagaattaggaatcagggaagaatttatggatctaaacagagaaacagagacaagttatgattttctggatgaaatgagacacagatttctgaaattcaagagacaaaagtatctaccggagatagaaaagtttaaagctttggccatagctcaatcaccaaaggtaatggtgataggatgtgcagattcaagggtatgtccatcttatgtactaggatttcaacctggtgaagcttttactatccgaaatgtcgccaatctcgttaccccggttcagaatggaccaacagaaaccaactcggctcttgagtttgcggtcaccactcttcaggttgagaacattatagttatgggtcatagcaattgtggaggaattgcagcacttatgagtcatcaaaaccaccaagggcaacactctaggtgggttatgaatgggaaagccgctaagttaagaacacaattagcttcatcacatttatcctttgatgaacaatgcagaaactgtgagaaggaatctataaaggattctgtgatgaatttgataacttattcatggataagagatagagtaaagagaggtgaagtcaagattcatggatgttattacaatttgtcagattgtagtcttgagaagtggagattaagttcagacaagactaactatggattctatatttcagacagagagatatggagttga

SEQ ID NO: 71579 - protein, 286 aa, Arabidopsis thaliana
  peptide (1)..(286): Ceres Seq. ID no. 4360074
  misc_feature (1)..(286): Homolog of NCBI NO: 25404198 NR Description: probable carbonic anhydrase T18I24.9 [imported] - thaliana >gi|12321393|gb|AAG50771.1|AC079131_16 carbonic
  misc_feature (1)..(286): Homolog of NCBI NO: 30696223 NR Description: carbonic anhydrase -related [Arabidopsis >gi|12321261|gb|AAG50705.1|AC079604_12 carbonic anhydrase,
  misc_feature (1)..(246): Homolog of NCBI NO: 30696219 NR Description: carbonic anhydrase -related [Arabidopsis thaliana]
  misc_feature (1)..(246): Homolog of NCBI NO: 21539555 NR Description: putative carbonic anhydrase [Arabidopsis >gi|23197874|gb|AAN15464.1| putative carbonic anhydrase
  misc_feature (57)..(286): Homolog of NCBI NO: 18418245 NR Description: carbonate dehydratase - like protein; protein id: supported by cDNA: 6589., supported by cDNA: gi_14334477 thaliana] >gi|14334478|gb|AAK59437.1| putative carbonate
  misc_feature (67)..(280): Homolog of NCBI NO: 15223141 NR Description: carbonic anhydrase, putative; protein id: supported by cDNA: 38715., supported by cDNA: gi_14334469, by cDNA: gi_21280999 [Arabidopsis thaliana]
  misc_feature (67)..(280): Homolog of NCBI NO: 30698715 NR Description: carbonic anhydrase -related [Arabidopsis thaliana]
  misc_feature (37)..(268): Homolog of NCBI NO: 27652186 NR Description: carbonic anhydrase 3 [Flaveria bidentis]
  misc_feature (58)..(268): Homolog of NCBI NO: 21903379 NR Description: Carbonic anhydrase 2 (Carbonate dehydratase 2) AT5g14740 [Arabidopsis thaliana]
  misc_feature (58)..(268): Homolog of NCBI NO: 30685030 NR Description: CARBONIC ANHYDRASE 2 [Arabidopsis thaliana]
MAFTLGGRARRLVSATSVHQNGCLHKLQQIGSDRFQLGEAKAIRLLPRRTNMVQELGIREEFMDLNRETETSYDFLDEMRHRFLKFKRQKYLPEIEKFKALAIAQSPKVMVIGCADSRVCPSYVLGFQPGEAFTIRNVANLVTPVQNGPTETNSALEFAVTTLQVENIIVMGHSNCGGIAALMSHQNHQGQHSRWVMNGKAAKLRTQLASSHLSFDEQCRNCEKESIKDSVMNLITYSWIRDRVKRGEVKIHGCYYNLSDCSLEKWRLSSDKTNYGFYISDREIWS

SEQ ID NO: 71580 - protein, 235 aa, Arabidopsis thaliana
  peptide (1)..(235): Ceres Seq. ID no. 4360075
  misc_feature (1)..(235): Homolog of NCBI NO: 25404198 NR Description: probable carbonic anhydrase T18I24.9 [imported] - thaliana >gi|12321393|gb|AAG50771.1|AC079131_16 carbonic
  misc_feature (1)..(235): Homolog of NCBI NO: 30696223 NR Description: carbonic anhydrase -related [Arabidopsis >gi|12321261|gb|AAG50705.1|AC079604_12 carbonic anhydrase,
  misc_feature (1)..(195): Homolog of NCBI NO: 30696219 NR Description: carbonic anhydrase -related [Arabidopsis thaliana]
  misc_feature (1)..(195): Homolog of NCBI NO: 21539555 NR Description: putative carbonic anhydrase [Arabidopsis >gi|23197874|gb|AAN15464.1| putative carbonic anhydrase
  misc_feature (6)..(235): Homolog of NCBI NO: 18418245 NR Description: carbonate dehydratase - like protein; protein id: supported by cDNA: 6589., supported by cDNA: gi_14334477 thaliana] >gi|14334478|gb|AAK59437.1| putative carbonate
  misc_feature (16)..(229): Homolog of NCBI NO: 15223141 NR Description: carbonic anhydrase, putative; protein id: supported by cDNA: 38715., supported by cDNA: gi_14334469, by cDNA: gi_21280999 [Arabidopsis thaliana]
  misc_feature (16)..(229): Homolog of NCBI NO: 30698715 NR Description: carbonic anhydrase -related [Arabidopsis thaliana]
  misc_feature (1)..(217): Homolog of NCBI NO: 27652186 NR Description: carbonic anhydrase 3 [Flaveria bidentis]
  misc_feature (7)..(217): Homolog of NCBI NO: 21903379 NR Description: Carbonic anhydrase 2 (Carbonate dehydratase 2) AT5g14740 [Arabidopsis thaliana]
  misc_feature (7)..(217): Homolog of NCBI NO: 30685030 NR Description: CARBONIC ANHYDRASE 2 [Arabidopsis thaliana]
MVQELGIREEFMDLNRETETSYDFLDEMRHRFLKFKRQKYLPEIEKFKALAIAQSPKVMVIGCADSRVCPSYVLGFQPGEAFTIRNVANLVTPVQNGPTETNSALEFAVTTLQVENIIVMGHSNCGGIAALMSHQNHQGQHSRWVMNGKAAKLRTQLASSHLSFDEQCRNCEKESIKDSVMNLITYSWIRDRVKRGEVKIHGCYYNLSDCSLEKWRLSSDKTNYGFYISDREIWS

SEQ ID NO: 71581 - protein, 224 aa, Arabidopsis thaliana
  peptide (1)..(224): Ceres Seq. ID no. 4360076
  misc_feature (1)..(224): Homolog of NCBI NO: 25404198 NR Description: probable carbonic anhydrase T18I24.9 [imported] - thaliana >gi|12321393|gb|AAG50771.1|AC079131_16 carbonic
  misc_feature (1)..(224): Homolog of NCBI NO: 30696223 NR Description: carbonic anhydrase -related [Arabidopsis >gi|12321261|gb|AAG50705.1|AC079604_12 carbonic anhydrase,
  misc_feature (1)..(184): Homolog of NCBI NO: 30696219 NR Description: carbonic anhydrase -related [Arabidopsis thaliana]
  misc_feature (1)..(184): Homolog of NCBI NO: 21539555 NR Description: putative carbonic anhydrase [Arabidopsis >gi|23197874|gb|AAN15464.1| putative carbonic anhydrase
  misc_feature (1)..(224): Homolog of NCBI NO: 18418245 NR Description: carbonate dehydratase - like protein; protein id: supported by cDNA: 6589., supported by cDNA: gi_14334477 thaliana] >gi|14334478|gb|AAK59437.1| putative carbonate
  misc_feature (5)..(218): Homolog of NCBI NO: 15223141 NR Description: carbonic anhydrase, putative; protein id: supported by cDNA: 38715., supported by cDNA: gi_14334469, by cDNA: gi_21280999 [Arabidopsis thaliana]
  misc_feature (5)..(218): Homolog of NCBI NO: 30698715 NR Description: carbonic anhydrase -related [Arabidopsis thaliana]
  misc_feature (1)..(206): Homolog of NCBI NO: 27652186 NR Description: carbonic anhydrase 3 [Flaveria bidentis]
  misc_feature (1)..(206): Homolog of NCBI NO: 21903379 NR Description: Carbonic anhydrase 2 (Carbonate dehydratase 2) AT5g14740 [Arabidopsis thaliana]
  misc_feature (1)..(206): Homolog of NCBI NO: 30685030 NR Description: CARBONIC ANHYDRASE 2 [Arabidopsis thaliana]
MDLNRETETSYDFLDEMRHRFLKFKRQKYLPEIEKFKALAIAQSPKVMVIGCADSRVCPSYVLGFQPGEAFTIRNVANLVTPVQNGPTETNSALEFAVTTLQVENIIVMGHSNCGGIAALMSHQNHQGQHSRWVMNGKAAKLRTQLASSHLSFDEQCRNCEKESIKDSVMNLITYSWIRDRVKRGEVKIHGCYYNLSDCSLEKWRLSSDKTNYGFYISDREIWS

SEQ ID NO: 71582 - DNA, 3288 bp, Arabidopsis thaliana
  misc_feature (1)..(3288): Ceres Seq. ID no. 4360097
  misc_feature: MA Experiment ID: 20000169 Result: Up-regulated in Transcription
  misc_feature: MA Experiment 20000169 PARAMETER Experiment Name: At_100uM_ABA_P Parameter: Age (day) Value: 14
  misc_feature: MA Experiment 20000169 PARAMETER Experiment Name: At_100uM_ABA_P Parameter: Organism Value: A. thaliana
  misc_feature: MA Experiment 20000169 PARAMETER Experiment Name: At_100uM_ABA_P Parameter: Plant Line Value: WS
  misc_feature: MA Experiment 20000169 PARAMETER Experiment Name: At_100uM_ABA_P Parameter: Timepoint (hr) Value: 6
  misc_feature: MA Experiment 20000169 PARAMETER Experiment Name: At_100uM_ABA_P Parameter: Tissue Value: Aerial
  misc_feature: MA Experiment 20000169 PARAMETER Experiment Name: At_100uM_ABA_P Parameter: Treatment Value: 100uM ABA vs. No Treatment
  misc_feature: MA Experiment ID: 20000180 Result: Up-regulated in Transcription
  misc_feature: MA Experiment 20000180 PARAMETER Experiment Name: At_Germinating_Seeds_P Parameter: Age (hr) Value: 24 vs. 0
  misc_feature: MA Experiment 20000180 PARAMETER Experiment Name: At_Germinating_Seeds_P Parameter: Tissue Value: Germinating Seeds
  misc_feature: MA Experiment ID: 20000182 Result: Up-regulated in Transcription
  misc_feature: MA Experiment 20000182 PARAMETER Experiment Name: At_2mM_SA_P Parameter: Age (day) Value: 14
  misc_feature: MA Experiment 20000182 PARAMETER Experiment Name: At_2mM_SA_P Parameter: Organism Value: A. thaliana
  misc_feature: MA Experiment 20000182 PARAMETER Experiment Name: At_2mM_SA_P Parameter: Plant Line Value: WS
  misc_feature: MA Experiment 20000182 PARAMETER Experiment Name: At_2mM_SA_P Parameter: Timepoint (hr) Value: 6
  misc_feature: MA Experiment 20000182 PARAMETER Experiment Name: At_2mM_SA_P Parameter: Tissue Value: Aerial
  misc_feature: MA Experiment 20000182 PARAMETER Experiment Name: At_2mM_SA_P Parameter: Treatment Value: 2mM SA vs. No Treatment
  misc_feature: MA Experiment ID: 20000438 Result: Down-regulated in Transcription
  misc_feature: MA Experiment 20000438 PARAMETER Experiment Name: At_Shoots__P Parameter: Age (day) Value: 14
  misc_feature: MA Experiment 20000438 PARAMETER Experiment Name: At_Shoots__P Parameter: Tissue Value: Shoots vs. Whole Plant
  misc_feature: MA Experiment ID: 20000439 Result: Up-regulated in Transcription
  misc_feature: MA Experiment 20000439 PARAMETER Experiment Name: At_Roots__P Parameter: Age (day) Value: 14 vs. 21
  misc_feature: MA Experiment 20000439 PARAMETER Experiment Name: At_Roots__P Parameter: Organism Value: A. thaliana
  misc_feature: MA Experiment 20000439 PARAMETER Experiment Name: At_Roots__P Parameter: Tissue Value: Roots vs. Whole Plant
  misc_feature: MA Experiment ID: 20000453 Result: Up-regulated in Transcription
  misc_feature: MA Experiment 20000453 PARAMETER Experiment Name: At_100uM_ABA_P Parameter: Age (day) Value: 15
  misc_feature: MA Experiment 20000453 PARAMETER Experiment Name: At_100uM_ABA_P Parameter: Organism Value: A. thaliana
  misc_feature: MA Experiment 20000453 PARAMETER Experiment Name: At_100uM_ABA_P Parameter: Plant Line Value: WS
  misc_feature: MA Experiment 20000453 PARAMETER Experiment Name: At_100uM_ABA_P Parameter: Timepoint (hr) Value: 24
  misc_feature: MA Experiment 20000453 PARAMETER Experiment Name: At_100uM_ABA_P Parameter: Tissue Value: Aerial
  misc_feature: MA Experiment 20000453 PARAMETER Experiment Name: At_100uM_ABA_P Parameter: Treatment Value: 100uM ABA vs. No Treatment
  misc_feature: MA Experiment ID: 20000527 Result: Down-regulated in Transcription
  misc_feature: MA Experiment 20000527 PARAMETER Experiment Name: At_10percent_PEG_P Parameter: Age (day) Value: 20
  misc_feature: MA Experiment 20000527 PARAMETER Experiment Name: At_10percent_PEG_P Parameter: Organism Value: A. thaliana
  misc_feature: MA Experiment 20000527 PARAMETER Experiment Name: At_10percent_PEG_P Parameter: Plant Line Value: WS
  misc_feature: MA Experiment 20000527 PARAMETER Experiment Name: At_10percent_PEG_P Parameter: Timepoint (day) Value: 20
  misc_feature: MA Experiment 20000527 PARAMETER Experiment Name: At_10percent_PEG_P Parameter: Tissue Value: Whole Plant
  misc_feature: MA Experiment 20000527 PARAMETER Experiment Name: At_10percent_PEG_P Parameter: Treatment Value: 10percent PEG vs. No Treatment
  misc_feature: MA Experiment ID: 20000794 Result: Up-regulated in Transcription
  misc_feature: MA Experiment 20000794 PARAMETER Experiment Name: At_Petals_P Parameter: Age (day) Value: 23-25 days
  misc_feature: MA Experiment 20000794 PARAMETER Experiment Name: At_Petals_P Parameter: Plant Line Value: WS
  misc_feature: MA Experiment 20000794 PARAMETER Experiment Name: At_Petals_P Parameter: Tissue Value: Petals vs. Whole plant
  misc_feature: MA Experiment ID: 20001904 Result: Up-regulated in Transcription
  misc_feature: MA Experiment 20001904 PARAMETER Experiment Name: At_Drought_Reproduction_P Parameter: Age (day) Value: 37
  misc_feature: MA Experiment 20001904 PARAMETER Experiment Name: At_Drought_Reproduction_P Parameter: Organism Value: A. thaliana
  misc_feature: MA Experiment 20001904 PARAMETER Experiment Name: At_Drought_Reproduction_P Parameter: Plant Line Value: WS
  misc_feature: MA Experiment 20001904 PARAMETER Experiment Name: At_Drought_Reproduction_P Parameter: Timepoint (day) Value: 7
  misc_feature: MA Experiment 20001904 PARAMETER Experiment Name: At_Drought_Reproduction_P Parameter: Tissue Value: Rosettes
  misc_feature: MA Experiment 20001904 PARAMETER Experiment Name: At_Drought_Reproduction_P Parameter: Treatment Value: Drought vs. No Drought
  misc_feature: MA Experiment ID: 20001905 Result: Up-regulated in Transcription
  misc_feature: MA Experiment 20001905 PARAMETER Experiment Name: At_Drought_Reproduction_P Parameter: Age (day) Value: 40
  misc_feature: MA Experiment 20001905 PARAMETER Experiment Name: At_Drought_Reproduction_P Parameter: Organism Value: A. thaliana
  misc_feature: MA Experiment 20001905 PARAMETER Experiment Name: At_Drought_Reproduction_P Parameter: Plant Line Value: WS
  misc_feature: MA Experiment 20001905 PARAMETER Experiment Name: At_Drought_Reproduction_P Parameter: Timepoint (day) Value: 10
  misc_feature: MA Experiment 20001905 PARAMETER Experiment Name: At_Drought_Reproduction_P Parameter: Tissue Value: Rosettes
  misc_feature: MA Experiment 20001905 PARAMETER Experiment Name: At_Drought_Reproduction_P Parameter: Treatment Value: Drought vs. No Drought
  misc_feature: MA Experiment ID: 20001906 Result: Up-regulated in Transcription
  misc_feature: MA Experiment 20001906 PARAMETER Experiment Name: At_Drought_Reproduction_P Parameter: Age (day) Value: 35
  misc_feature: MA Experiment 20001906 PARAMETER Experiment Name: At_Drought_Reproduction_P Parameter: Organism Value: A. thaliana
  misc_feature: MA Experiment 20001906 PARAMETER Experiment Name: At_Drought_Reproduction_P Parameter: Plant Line Value: WS
  misc_feature: MA Experiment 20001906 PARAMETER Experiment Name: At_Drought_Reproduction_P Parameter: Timepoint (day) Value: 5
  misc_feature: MA Experiment 20001906 PARAMETER Experiment Name: At_Drought_Reproduction_P Parameter: Tissue Value: Siliques
  misc_feature: MA Experiment 20001906 PARAMETER Experiment Name: At_Drought_Reproduction_P Parameter: Treatment Value: Drought vs. No Drought
  misc_feature: MA Experiment ID: 20001911 Result: Up-regulated in Transcription
  misc_feature: MA Experiment 20001911 PARAMETER Experiment Name: At_Drought_Reproduction_P Parameter: Age (day) Value: 40
  misc_feature: MA Experiment 20001911 PARAMETER Experiment Name: At_Drought_Reproduction_P Parameter: Organism Value: A. thaliana
  misc_feature: MA Experiment 20001911 PARAMETER Experiment Name: At_Drought_Reproduction_P Parameter: Plant Line Value: WS
  misc_feature: MA Experiment 20001911 PARAMETER Experiment Name: At_Drought_Reproduction_P Parameter: Timepoint (day) Value: 10
  misc_feature: MA Experiment 20001911 PARAMETER Experiment Name: At_Drought_Reproduction_P Parameter: Tissue Value: Flowers
  misc_feature: MA Experiment 20001911 PARAMETER Experiment Name: At_Drought_Reproduction_P Parameter: Treatment Value: Drought vs. No Drought
atgacgactacttcagaaatttctcttcaagaagaatacgtcaccgacgccgttgaccaccgtggacttgccgccagaagatccaataccggtagatggagagccgccttgttcataatcggtgtggaggtggctgagaggttcgcttactatggaatcggatcaaacttaataagctacttgactggaccacttggtgaatccacggctgtagccgccgctaatgtcaacgcgtggtcaggaattgccactcttcttcctgttcttggagcttttgtcgccgacgcatttctcggtcgttaccgaacaattatcatctcttctcttatctacgtcctgggattggcgtttctgactttatctgcgtttctgattcccaatactactgaagtgacatcttcaacttcttcttttctcaatgtactcttcttcttctctctgtatttggtggctattggacaaagtggacacaagccttgtgttcaagcttttggtgctgaccagtttgatgaaaaagactctcaagagaaatctgacagaagctccttcttcaactggtggtaccttagtctgtctgcaggaatctgctttgcgattttagttgttgtatacatccaggaagagttcagctgggcttttgggtttggaatcccatgtgtgttcatggtgatctctcttgttcttttcgtgtcagggagaaggatttataggtacagtaaaagaagacatgaagaggaaataaacccttttacgaggataggtagagtcttctttgtagcactcaagaaccaaagattgagttcatcagacttgtgcaaagttgagctagaggcaaatacatccccagagaaacagagttttttcaacaaagcattgcttgtacccaatgattcttctcaaggagaaaacgcatccaagtctagtgatgttgaagatgccacagctcttatcaggctaattccagtatggtttacgactctggcttacgcgataccctacgcgcaatacatgacatttttcactaagcaaggcgtcacaatggatagaacaattcttcctggtgttaagatcccacctgcttctcttcaggtctttatcggcatatcaatagtcctctttgtccccatctacgaccgagttttcgtccccatcgccaggttaataaccaaagaaccttgtggcatcacaaccctcaaaagaattggaactggaattgtactgtcgactatcactatggtaattgcagctctggttgagttcaagcggctcgagactgcgaaagaacacgggcttatagaccaaccggaagcaactcttccaatgtcgatatggtggttaatccctcagtacttgttgctgggattggctgacgtatatactttagtgggaatgcaagagttcttctacagccaagtccctactgagctgagaagcatcggtctcgcgctttacttaagcgcgttgggcgtgggaagcttattaagcagcttactcatctctctgatagacttggccactggaggagacgcaggaaacagctggtttaacagtaatctgaacagagctcatcttgattacttctattggttactagcgattaaaatgacgacgacttccaaaacttctcttcaagaagaatacgtcatcgacgccgttgaccaccgtggcttttccgccagaaggtctattaccggtagatggagagctgcatggttcattatcggtgtggaggtggcggagaggttcgcgaactacgggatcggatcaaacctgataagctacttgactggaccacttggtcaatctacggcggtcgccgccgctaatgtcaacgcttggtctggaatttccactattcttcctcttcttggagcttttgtcgccgacgcttttcttggtcgctacataacaattatcatcgcttcttttatctatgtcctgggactggcgtttctgactttatctgcgtttctgattcccaacaatactgaagtgacctcgtcaccttcttcttttctcaatgcactcttcttcttctctctttatttggtggctattggacaaagtggacacaagccttgtgttcaggcttttggtgcagatcagtttgatgagaagaacccgcaagagaatagtgatagaagctctttcttcaactggtggtaccttagtatgtgtgcaggaatcggcctagcgattttagtggttgtgtacatccaagaaaatgtaagctgggcacttgggtttggaatcccatgtgtgttcatggtgatctctcttgttcttttcgttttagggagaaagagttataggtttagtaaaacaagacaagaagaggaaacaaacccgtttacgagaataggtagagtcttctttgtagcattcaagaaccagagattgaattcatcagacttgtgcaaagttgagctaatagaggcaaatcgatctcaagaatctccagaggagctgagttttctcaacaaagcattgcttgtcccaaatgattctgatgaaggagaagtggcatgcaagtctagagatgtcgaagatgctacagctcttgtcaggcttattccagtatggcttacaactttggcttacgcgatacctttcgcgcagtacatgactttctttacaaagcaaggtgtcacaatggaaagaacaatatttccaggtgtagagatcccacctgcttctcttcaggttcttatcagcatatcaattgttctctttgtccccatctatgaccgtgttttggtcccaatcggaaggtcaataactaaagatccttgtggcatcacaactctcaaaagaattggaaccggaatggtactagcaactctcactatggtggtggctgctttggttgagtcaaagcggctcgagactgcaaaagaatacggacttatagaccaaccgaaaacaactcttccaatgtcgatatggtggttattccctcagtatatgttactgggattggctgacgtacacactttagtaggaatgcaagagttcttctacagccaagtccccactgagctgagaagcctcggtctcgcgatttacttaagtgcaatgggcgttggaagcttattaagcagcttactcatctatctgatcgatttggccactggaggagacgccggaaacagctggttcaacagtaatctgaacagagcccatctagattacttctattggttacttgcggttgttagtgccgttgggttctttacgttcttgttcatctccaagtcctatatatatcgccgggtggacgtagtgtag

SEQ ID NO: 71583 - protein, 1095 aa, Arabidopsis thaliana
  peptide (1)..(1095): Ceres Seq. ID no. 4360098
  misc_feature (635)..(1026): Pfam Name: POT family Pfam Description: POT family
  misc_feature (571)..(859): Homolog of NCBI NO: 25406147 NR Description: probable peptide transporter PTR2-B T9N14.15 - Arabidopsis thaliana >gi|12323655|gb|AAG51788.1|AC067754_4
  misc_feature (23)..(532): Homolog of NCBI NO: 12322195 NR Description: oligopeptide transporter, putative [Arabidopsis
  misc_feature (597)..(859): Homolog of NCBI NO: 12322195 NR Description: oligopeptide transporter, putative [Arabidopsis
  misc_feature (540)..(1095): Homolog of NCBI NO: 15219905 NR Description: peptide transporter, putative; protein id: [Arabidopsis thaliana] >gi|25402971|pir||G86358 protein Similar
  misc_feature (535)..(1095): Homolog of NCBI NO: 18086410 NR Description: At1g72120/F28P5_2 [Arabidopsis thaliana]
  misc_feature (23)..(532): Homolog of NCBI NO: 25406147 NR Description: probable peptide transporter PTR2-B T9N14.15 - Arabidopsis thaliana >gi|12323655|gb|AAG51788.1|AC067754_4
  misc_feature (1)..(553): Homolog of NCBI NO: 18086410 NR Description: At1g72120/F28P5_2 [Arabidopsis thaliana]
  misc_feature (540)..(1095): Homolog of NCBI NO: 28416707 NR Description: At1g22550 [Arabidopsis thaliana]
  misc_feature (540)..(1095): Homolog of NCBI NO: 15219907 NR Description: peptide transporter, putative; protein id: [Arabidopsis thaliana] >gi|25402974|pir||B86359 protein Similar
  misc_feature (6)..(532): Homolog of NCBI NO: 15219905 NR Description: peptide transporter, putative; protein id: [Arabidopsis thaliana] >gi|25402971|pir||G86358 protein Similar
MTTTSEISLQEEYVTDAVDHRGLAARRSNTGRWRAALFIIGVEVAERFAYYGIGSNLISYLTGPLGESTAVAAANVNAWSGIATLLPVLGAFVADAFLGRYRTIIISSLIYVLGLAFLTLSAFLIPNTTEVTSSTSSFLNVLFFFSLYLVAIGQSGHKPCVQAFGADQFDEKDSQEKSDRSSFFNWWYLSLSAGICFAILVVVYIQEEFSWAFGFGIPCVFMVISLVLFVSGRRIYRYSKRRHEEEINPFTRIGRVFFVALKNQRLSSSDLCKVELEANTSPEKQSFFNKALLVPNDSSQGENASKSSDVEDATALIRLIPVWFTTLAYAIPYAQYMTFFTKQGVTMDRTILPGVKIPPASLQVFIGISIVLFVPIYDRVFVPIARLITKEPCGITTLKRIGTGIVLSTITMVIAALVEFKRLETAKEHGLIDQPEATLPMSIWWLIPQYLLLGLADVYTLVGMQEFFYSQVPTELRSIGLALYLSALGVGSLLSSLLISLIDLATGGDAGNSWFNSNLNRAHLDYFYWLLAIKMTTTSKTSLQEEYVIDAVDHRGFSARRSITGRWRAAWFIIGVEVAERFANYGIGSNLISYLTGPLGQSTAVAAANVNAWSGISTILPLLGAFVADAFLGRYITIIIASFIYVLGLAFLTLSAFLIPNNTEVTSSPSSFLNALFFFSLYLVAIGQSGHKPCVQAFGADQFDEKNPQENSDRSSFFNWWYLSMCAGIGLAILVVVYIQENVSWALGFGIPCVFMVISLVLFVLGRKSYRFSKTRQEEETNPFTRIGRVFFVAFKNQRLNSSDLCKVELIEANRSQESPEELSFLNKALLVPNDSDEGEVACKSRDVEDATALVRLIPVWLTTLAYAIPFAQYMTFFTKQGVTMERTIFPGVEIPPASLQVLISISIVLFVPIYDRVLVPIGRSITKDPCGITTLKRIGTGMVLATLTMVVAALVESKRLETAKEYGLIDQPKTTLPMSIWWLFPQYMLLGLADVHTLVGMQEFFYSQVPTELRSLGLAIYLSAMGVGSLLSSLLIYLIDLATGGDAGNSWFNSNLNRAHLDYFYWLLAVVSAVGFFTFLFISKSYIYRRVDVV

SEQ ID NO: 71584 - protein, 874 aa, Arabidopsis thaliana
  peptide (1)..(874): Ceres Seq. ID no. 4360099
  misc_feature (414)..(805): Pfam Name: POT family Pfam Description: POT family
  misc_feature (1)..(332): Homolog of NCBI NO: 18086410 NR Description: At1g72120/F28P5_2 [Arabidopsis thaliana]
  misc_feature (314)..(874): Homolog of NCBI NO: 18086410 NR Description: At1g72120/F28P5_2 [Arabidopsis thaliana]
  misc_feature (1)..(311): Homolog of NCBI NO: 25406147 NR Description: probable peptide transporter PTR2-B T9N14.15 - Arabidopsis thaliana >gi|12323655|gb|AAG51788.1|AC067754_4
  misc_feature (350)..(638): Homolog of NCBI NO: 25406147 NR Description: probable peptide transporter PTR2-B T9N14.15 - Arabidopsis thaliana >gi|12323655|gb|AAG51788.1|AC067754_4
  misc_feature (1)..(311): Homolog of NCBI NO: 12322195 NR Description: oligopeptide transporter, putative [Arabidopsis
  misc_feature (376)..(638): Homolog of NCBI NO: 12322195 NR Description: oligopeptide transporter, putative [Arabidopsis
  misc_feature (319)..(874): Homolog of NCBI NO: 15219905 NR Description: peptide transporter, putative; protein id: [Arabidopsis thaliana] >gi|25402971|pir||G86358 protein Similar
  misc_feature (319)..(874): Homolog of NCBI NO: 28416707 NR Description: At1g22550 [Arabidopsis thaliana]
  misc_feature (319)..(874): Homolog of NCBI NO: 15219907 NR Description: peptide transporter, putative; protein id: [Arabidopsis thaliana] >gi|25402974|pir||B86359 protein Similar
  misc_feature (1)..(311): Homolog of NCBI NO: 15219905 NR Description: peptide transporter, putative; protein id: [Arabidopsis thaliana] >gi|25402971|pir||G86358 protein Similar
MVISLVLFVSGRRIYRYSKRRHEEEINPFTRIGRVFFVALKNQRLSSSDLCKVELEANTSPEKQSFFNKALLVPNDSSQGENASKSSDVEDATALIRLIPVWFTTLAYAIPYAQYMTFFTKQGVTMDRTILPGVKIPPASLQVFIGISIVLFVPIYDRVFVPIARLITKEPCGITTLKRIGTGIVLSTITMVIAALVEFKRLETAKEHGLIDQPEATLPMSIWWLIPQYLLLGLADVYTLVGMQEFFYSQVPTELRSIGLALYLSALGVGSLLSSLLISLIDLATGGDAGNSWFNSNLNRAHLDYFYWLLAIKMTTTSKTSLQEEYVIDAVDHRGFSARRSITGRWRAAWFIIGVEVAERFANYGIGSNLISYLTGPLGQSTAVAAANVNAWSGISTILPLLGAFVADAFLGRYITIIIASFIYVLGLAFLTLSAFLIPNNTEVTSSPSSFLNALFFFSLYLVAIGQSGHKPCVQAFGADQFDEKNPQENSDRSSFFNWWYLSMCAGIGLAILVVVYIQENVSWALGFGIPCVFMVISLVLFVLGRKSYRFSKTRQEEETNPFTRIGRVFFVAFKNQRLNSSDLCKVELIEANRSQESPEELSFLNKALLVPNDSDEGEVACKSRDVEDATALVRLIPVWLTTLAYAIPFAQYMTFFTKQGVTMERTIFPGVEIPPASLQVLISISIVLFVPIYDRVLVPIGRSITKDPCGITTLKRIGTGMVLATLTMVVAALVESKRLETAKEYGLIDQPKTTLPMSIWWLFPQYMLLGLADVHTLVGMQEFFYSQVPTELRSLGLAIYLSAMGVGSLLSSLLIYLIDLATGGDAGNSWFNSNLNRAHLDYFYWLLAVVSAVGFFTFLFISKSYIYRRVDVV

SEQ ID NO: 71585 - protein, 759 aa, Arabidopsis thaliana
  peptide (1)..(759): Ceres Seq. ID no. 4360100
  misc_feature (299)..(690): Pfam Name: POT family Pfam Description: POT family
  misc_feature (1)..(217): Homolog of NCBI NO: 18086410 NR Description: At1g72120/F28P5_2 [Arabidopsis thaliana]
  misc_feature (199)..(759): Homolog of NCBI NO: 18086410 NR Description: At1g72120/F28P5_2 [Arabidopsis thaliana]
  misc_feature (1)..(196): Homolog of NCBI NO: 25406147 NR Description: probable peptide transporter PTR2-B T9N14.15 - Arabidopsis thaliana >gi|12323655|gb|AAG51788.1|AC067754_4
  misc_feature (235)..(523): Homolog of NCBI NO: 25406147 NR Description: probable peptide transporter PTR2-B T9N14.15 - Arabidopsis thaliana >gi|12323655|gb|AAG51788.1|AC067754_4
  misc_feature (1)..(196): Homolog of NCBI NO: 12322195 NR Description: oligopeptide transporter, putative [Arabidopsis
  misc_feature (261)..(523): Homolog of NCBI NO: 12322195 NR Description: oligopeptide transporter, putative [Arabidopsis
  misc_feature (204)..(759): Homolog of NCBI NO: 15219905 NR Description: peptide transporter, putative; protein id: [Arabidopsis thaliana] >gi|25402971|pir||G86358 protein Similar
  misc_feature (204)..(759): Homolog of NCBI NO: 28416707 NR Description: At1g22550 [Arabidopsis thaliana]
  misc_feature (204)..(759): Homolog of NCBI NO: 15219907 NR Description: peptide transporter, putative; protein id: [Arabidopsis thaliana] >gi|25402974|pir||B86359 protein Similar
  misc_feature (1)..(196): Homolog of NCBI NO: 15219905 NR Description: peptide transporter, putative; protein id: [Arabidopsis thaliana] >gi|25402971|pir||G86358 protein Similar
MTFFTKQGVTMDRTILPGVKIPPASLQVFIGISIVLFVPIYDRVFVPIARLITKEPCGITTLKRIGTGIVLSTITMVIAALVEFKRLETAKEHGLIDQPEATLPMSIWWLIPQYLLLGLADVYTLVGMQEFFYSQVPTELRSIGLALYLSALGVGSLLSSLLISLIDLATGGDAGNSWFNSNLNRAHLDYFYWLLAIKMTTTSKTSLQEEYVIDAVDHRGFSARRSITGRWRAAWFIIGVEVAERFANYGIGSNLISYLTGPLGQSTAVAAANVNAWSGISTILPLLGAFVADAFLGRYITIIIASFIYVLGLAFLTLSAFLIPNNTEVTSSPSSFLNALFFFSLYLVAIGQSGHKPCVQAFGADQFDEKNPQENSDRSSFFNWWYLSMCAGIGLAILVVVYIQENVSWALGFGIPCVFMVISLVLFVLGRKSYRFSKTRQEEETNPFTRIGRVFFVAFKNQRLNSSDLCKVELIEANRSQESPEELSFLNKALLVPNDSDEGEVACKSRDVEDATALVRLIPVWLTTLAYAIPFAQYMTFFTKQGVTMERTIFPGVEIPPASLQVLISISIVLFVPIYDRVLVPIGRSITKDPCGITTLKRIGTGMVLATLTMVVAALVESKRLETAKEYGLIDQPKTTLPMSIWWLFPQYMLLGLADVHTLVGMQEFFYSQVPTELRSLGLAIYLSAMGVGSLLSSLLIYLIDLATGGDAGNSWFNSNLNRAHLDYFYWLLAVVSAVGFFTFLFISKSYIYRRVDVV

SEQ ID NO: 71586 - DNA, 1152 bp, Arabidopsis thaliana
  misc_feature (1)..(1152): Ceres Seq. ID no. 4360904
atggagaccgtagtggtgattgtgggagctggaccggccggtttagcaacatcggtttgtctaaaccaacactcaatcccaaacgtgatcctcgagaaagaagacatctatgcatccctttggaagaaacgagcgtacgatcgtctcaaacttcacttagccaaagaattttgccagcttcctttcatgccacacggtcgtgaggttccaacctttatgtccaaagagcttttcgtcaactaccttgacgcttacgttgcccgtttcgacatcaaccctaggtacaaccgtaccgtgaagtcctcaacgttcgatgagtccaataacaagtggagggtcgtggccgaaaacacggtaaccggagaaaccgaggtgtattggtcggagtttctggtggttgcgaccggggagaacggagatgggaatattccgatggtggaggggattgacacttttgggggagagattatgcactcgagtgagtacaagtccggtcgtgattttaaagataaaaatgttcttgtggtcggaggtggaaattccggtatggagattagttttgatctttgcaacttcggagctaatacgaccattctaattagaactccaagacacgtggtgactaaagaagtgatacacttggggatgacacttctgaagtatgctccagtggcgatggtcgacacattggtgacgactatggcaaaaattttgtacggagatctctccaagtacggactcttccgaccaaaacaaggtcctttcgccaccaaactctttaccggaaaagctcctgtcattgatgttggaactgtcgagaagattcgcgatggcgagattcaggttatcaatggtgggattggaagcatcaacgggaagaccttgacgttcgaaaacggacataaacaagatttcgatgcgattgtgtttgctactggttacaaaagctccgtttgcaattggttagaggactatgaatacgtgatgaagaaggatggattccccaaagcaccgatgccaaaacattggaaaggagagaagaatctttactgtgccggattttcaagaaaaggaatcgccggaggtgctgaggatgctatgtctgtagccgacgacatcagatctatcttggctaccttaaaaaataattga

SEQ ID NO: 71587 - protein, 383 aa, Arabidopsis thaliana
  peptide (1)..(383): Ceres Seq. ID no. 4360905
  misc_feature (6)..(350): Pfam Name: Pyridine nucleotide-disulphide oxidoreductase Pfam Description: Pyridine nucleotide-disulphide oxidoreductase
  misc_feature (1)..(383): Homolog of NCBI NO: 15221995 NR Description: flavin-containing monooxygenase, putative;
  misc_feature (1)..(377): Homolog of NCBI NO: 15218988 NR Description: flavin-containing monooxygenases, putative;
  misc_feature (2)..(373): Homolog of NCBI NO: 6979340 NR Description: hypothetical protein, similar to
  misc_feature (1)..(373): Homolog of NCBI NO: 6979339 NR Description: hypothetical protein, similar to
  misc_feature (2)..(373): Homolog of NCBI NO: 6539579 NR Description: unnamed protein product [Oryza sativa (japonica
  misc_feature (6)..(376): Homolog of NCBI NO: 15240026 NR Description: dimethylaniline monooxygenase-like; protein id: [Arabidopsis thaliana] >gi|8953750|dbj|BAA98069.1|
  misc_feature (6)..(376): Homolog of NCBI NO: 15219671 NR Description: putative dimethylaniline monooxygenase; protein At1g04180.1 [Arabidopsis thaliana] >gi|7485875|pir||T00955
  misc_feature (6)..(376): Homolog of NCBI NO: 15235409 NR Description: putative protein; protein id: At4g28720.1
  misc_feature (6)..(373): Homolog of NCBI NO: 15219767 NR Description: putative dimethylaniline monooxygenase; protein At1g04610.1 [Arabidopsis thaliana] >gi|25406796|pir||G86178
  misc_feature (6)..(373): Homolog of NCBI NO: 22327064 NR Description: putative protein; protein id: At5g25620.1, by cDNA: gi_17528989, supported by cDNA: gi_21280978 [Arabidopsis >gi|17528990|gb|AAL38705.1| unknown protein [Arabidopsis
METVVVIVGAGPAGLATSVCLNQHSIPNVILEKEDIYASLWKKRAYDRLKLHLAKEFCQLPFMPHGREVPTFMSKELFVNYLDAYVARFDINPRYNRTVKSSTFDESNNKWRVVAENTVTGETEVYWSEFLVVATGENGDGNIPMVEGIDTFGGEIMHSSEYKSGRDFKDKNVLVVGGGNSGMEISFDLCNFGANTTILIRTPRHVVTKEVIHLGMTLLKYAPVAMVDTLVTTMAKILYGDLSKYGLFRPKQGPFATKLFTGKAPVIDVGTVEKIRDGEIQVINGGIGSINGKTLTFENGHKQDFDAIVFATGYKSSVCNWLEDYEYVMKKDGFPKAPMPKHWKGEKNLYCAGFSRKGIAGGAEDAMSVADDIRSILATLKNN

SEQ ID NO: 71588 - protein, 321 aa, Arabidopsis thaliana
  peptide (1)..(321): Ceres Seq. ID no. 4360906
  misc_feature (1)..(288): Pfam Name: Pyridine nucleotide-disulphide oxidoreductase Pfam Description: Pyridine nucleotide-disulphide oxidoreductase
  misc_feature (1)..(321): Homolog of NCBI NO: 15221995 NR Description: flavin-containing monooxygenase, putative;
  misc_feature (1)..(315): Homolog of NCBI NO: 15218988 NR Description: flavin-containing monooxygenases, putative;
  misc_feature (1)..(311): Homolog of NCBI NO: 6979340 NR Description: hypothetical protein, similar to
  misc_feature (1)..(311): Homolog of NCBI NO: 6979339 NR Description: hypothetical protein, similar to
  misc_feature (1)..(311): Homolog of NCBI NO: 6539579 NR Description: unnamed protein product [Oryza sativa (japonica
  misc_feature (1)..(314): Homolog of NCBI NO: 15240026 NR Description: dimethylaniline monooxygenase-like; protein id: [Arabidopsis thaliana] >gi|8953750|dbj|BAA98069.1|
  misc_feature (1)..(314): Homolog of NCBI NO: 15219671 NR Description: putative dimethylaniline monooxygenase; protein At1g04180.1 [Arabidopsis thaliana] >gi|7485875|pir||T00955
  misc_feature (1)..(314): Homolog of NCBI NO: 15235409 NR Description: putative protein; protein id: At4g28720.1
  misc_feature (1)..(311): Homolog of NCBI NO: 15219767 NR Description: putative dimethylaniline monooxygenase; protein At1g04610.1 [Arabidopsis thaliana] >gi|25406796|pir||G86178
  misc_feature (1)..(311): Homolog of NCBI NO: 22327064 NR Description: putative protein; protein id: At5g25620.1, by cDNA: gi_17528989, supported by cDNA: gi_21280978 [Arabidopsis >gi|17528990|gb|AAL38705.1| unknown protein [Arabidopsis
MPHGREVPTFMSKELFVNYLDAYVARFDINPRYNRTVKSSTFDESNNKWRVVAENTVTGETEVYWSEFLVVATGENGDGNIPMVEGIDTFGGEIMHSSEYKSGRDFKDKNVLVVGGGNSGMEISFDLCNFGANTTILIRTPRHVVTKEVIHLGMTLLKYAPVAMVDTLVTTMAKILYGDLSKYGLFRPKQGPFATKLFTGKAPVIDVGTVEKIRDGEIQVINGGIGSINGKTLTFENGHKQDFDAIVFATGYKSSVCNWLEDYEYVMKKDGFPKAPMPKHWKGEKNLYCAGFSRKGIAGGAEDAMSVADDIRSILATLKNN

SEQ ID NO: 71589 - protein, 311 aa, Arabidopsis thaliana
  peptide (1)..(311): Ceres Seq. ID no. 4360907
  misc_feature (1)..(278): Pfam Name: Pyridine nucleotide-disulphide oxidoreductase Pfam Description: Pyridine nucleotide-disulphide oxidoreductase
  misc_feature (1)..(311): Homolog of NCBI NO: 15221995 NR Description: flavin-containing monooxygenase, putative;
  misc_feature (1)..(305): Homolog of NCBI NO: 15218988 NR Description: flavin-containing monooxygenases, putative;
  misc_feature (1)..(301): Homolog of NCBI NO: 6979340 NR Description: hypothetical protein, similar to
  misc_feature (1)..(301): Homolog of NCBI NO: 6979339 NR Description: hypothetical protein, similar to
  misc_feature (1)..(301): Homolog of NCBI NO: 6539579 NR Description: unnamed protein product [Oryza sativa (japonica
  misc_feature (1)..(304): Homolog of NCBI NO: 15240026 NR Description: dimethylaniline monooxygenase-like; protein id: [Arabidopsis thaliana] >gi|8953750|dbj|BAA98069.1|
  misc_feature (1)..(304): Homolog of NCBI NO: 15219671 NR Description: putative dimethylaniline monooxygenase; protein At1g04180.1 [Arabidopsis thaliana] >gi|7485875|pir||T00955
  misc_feature (1)..(304): Homolog of NCBI NO: 15235409 NR Description: putative protein; protein id: At4g28720.1
  misc_feature (1)..(301): Homolog of NCBI NO: 15219767 NR Description: putative dimethylaniline monooxygenase; protein At1g04610.1 [Arabidopsis thaliana] >gi|25406796|pir||G86178
  misc_feature (1)..(301): Homolog of NCBI NO: 22327064 NR Description: putative protein; protein id: At5g25620.1, by cDNA: gi_17528989, supported by cDNA: gi_21280978 [Arabidopsis >gi|17528990|gb|AAL38705.1| unknown protein [Arabidopsis
MSKELFVNYLDAYVARFDINPRYNRTVKSSTFDESNNKWRVVAENTVTGETEVYWSEFLVVATGENGDGNIPMVEGIDTFGGEIMHSSEYKSGRDFKDKNVLVVGGGNSGMEISFDLCNFGANTTILIRTPRHVVTKEVIHLGMTLLKYAPVAMVDTLVTTMAKILYGDLSKYGLFRPKQGPFATKLFTGKAPVIDVGTVEKIRDGEIQVINGGIGSINGKTLTFENGHKQDFDAIVFATGYKSSVCNWLEDYEYVMKKDGFPKAPMPKHWKGEKNLYCAGFSRKGIAGGAEDAMSVADDIRSILATLKNN

SEQ ID NO: 71590 - DNA, 1539 bp, Arabidopsis thaliana
  misc_feature (1)..(1539): Ceres Seq. ID no. 4361900
  misc_feature: MA Experiment ID: 20000185 Result: Up-regulated in Transcription
  misc_feature: MA Experiment 20000185 PARAMETER Experiment Name: At_Roots__P Parameter: Age (day) Value: 7 vs. 21
  misc_feature: MA Experiment 20000185 PARAMETER Experiment Name: At_Roots__P Parameter: Organism Value: A. thaliana
  misc_feature: MA Experiment 20000185 PARAMETER Experiment Name: At_Roots__P Parameter: Tissue Value: Roots vs. Whole Plant
  misc_feature: MA Experiment ID: 20000437 Result: Down-regulated in Transcription
  misc_feature: MA Experiment 20000437 PARAMETER Experiment Name: At_Drought_P Parameter: Age (day) Value: 8
  misc_feature: MA Experiment 20000437 PARAMETER Experiment Name: At_Drought_P Parameter: Organism Value: A. thaliana
  misc_feature: MA Experiment 20000437 PARAMETER Experiment Name: At_Drought_P Parameter: Plant Line Value: WS
  misc_feature: MA Experiment 20000437 PARAMETER Experiment Name: At_Drought_P Parameter: Timepoint (hr) Value: 24
  misc_feature: MA Experiment 20000437 PARAMETER Experiment Name: At_Drought_P Parameter: Tissue Value: Whole Plant
  misc_feature: MA Experiment 20000437 PARAMETER Experiment Name: At_Drought_P Parameter: Treatment Value: Drought vs. No Drought
atggcggaatctgcaggagaatcctataggcttctctctgtttcttcatcaaccacatttcttgccttcataatcatcttcttacttgcgggtatagcaagaagaaagagaagagcgcctcacaggctgcctccgggaagcagaggatggcctttgatcggagataccttcgcttggctcaacgccgtcgctggttctcatccttcaagcttcgtcgagaaacaaataaaaaagttcgtctctttgctatgctctgttttgttattaatactcaagaggcctgataatagtggttttaatgaaattaggtatgggaggatattctcgtgtagcttgtttgggaaatgggcagtggtatcagcagacccggattttaaccggtttataatgcagaacgaaggaaagctatttcagtcaagttatccaaagtctttcagggatttggttgggaaagatggagtgatcacagtgcatggtgatcagcagagacggcttcactcgattgcatcgagcatgatgcgtcatgaccagctcaagactcattttcttgaggttattcccgtcgttatgctccagacactgagtaatttcaaggacggtgaagtcgtgcttctccaagatatctgcagaaaggttgccattcatcttatggttaaccaacttctcggtgtgtcgagcgaatcagaagtcgatgaaatgtctcagcttttctctgattttgttgatggatgtctctctgttcctattgacttgcctggtttcacatacaacaaagcaatgaaggcacgaaaggagatcataaggaagataaacaagacgatagaaaagcggttgcaaaacaaagcagcatcagatactgctggtaatggtgtacttggaagattgcttgaagaagaaagtttaccaaacgaatcaatggcagattttatcatcaatctactgtttgccggaaatgaaacaacctcaaaaacaatgctgtttgcggtttacttcctcactcattgtcctaaggccatgacccaactcctggaggaacatgataggctcgcgggtggaatgttaacatggcaagattacaagacaatggacttcactcaatgcgtaatagatgaaacactcaggcttggtggaattgcgatatggcttatgagagaggccaaagaagatgtctcatatcaagattatgtcattcccaagggatgcttcgtagttccgtttctctcggcagtgcacttagacgagagctattacaaagaaagtctctccttcaatccatggcgatggcttgaccctgaaactcagcaaaagaggaattggagaacgagccctttttattgcccatttggtggaggaactcggttttgcccaggagcagaactggctcgccttcaaattgctctctttctgcattacttcatcaccacatataagtggacacaacttaaggaagatcgtatctccttcttcccttcggctcgtctagtgaatggcttcaaaatccagttgaacagacgagacagtgatcctccgaatcaataa

SEQ ID NO: 71591 - protein, 512 aa, Arabidopsis thaliana
  peptide (1)..(512): Ceres Seq. ID no. 4361901
  misc_feature (230)..(502): Pfam Name: Cytochrome P450 Pfam Description: Cytochrome P450
  misc_feature (1)..(512): Homolog of NCBI NO: 15219454 NR Description: steroid 22-alpha-hydroxylase, putative; protein
  misc_feature (103)..(506): Homolog of NCBI NO: 15239203 NR Description: cytochrome p450, putative; protein id: supported by cDNA: 36334., supported by cDNA: gi_14596098, by cDNA: gi_15450716, supported by cDNA: gi_17380617, supported
  misc_feature (20)..(111): Homolog of NCBI NO: 15239203 NR Description: cytochrome p450, putative; protein id: supported by cDNA: 36334., supported by cDNA: gi_14596098, by cDNA: gi_15450716, supported by cDNA: gi_17380617, supported
  misc_feature (103)..(508): Homolog of NCBI NO: 9587211 NR Description: cytochrome P450 [Vigna radiata]
  misc_feature (14)..(114): Homolog of NCBI NO: 9587211 NR Description: cytochrome P450 [Vigna radiata]
  misc_feature (31)..(508): Homolog of NCBI NO: 34902330 NR Description: Putative steroid 22-alpha-hydroxylase [Oryza
  misc_feature (93)..(504): Homolog of NCBI NO: 18400142 NR Description: cytochrome P450, putative; protein id: supported by cDNA: gi_14971016 [Arabidopsis thaliana] CYP90D [Arabidopsis thaliana] >gi|28393374|gb|AAO42111.1|
  misc_feature (42)..(75): Homolog of NCBI NO: 18400142 NR Description: cytochrome P450, putative; protein id: supported by cDNA: gi_14971016 [Arabidopsis thaliana] CYP90D [Arabidopsis thaliana] >gi|28393374|gb|AAO42111.1|
  misc_feature (291)..(504): Homolog of NCBI NO: 15229822 NR Description: steroid 22-alpha-hydroxylase (DWF4); protein id:
  misc_feature (103)..(277): Homolog of NCBI NO: 15229822 NR Description: steroid 22-alpha-hydroxylase (DWF4); protein id:
MAESAGESYRLLSVSSSTTFLAFIIIFLLAGIARRKRRAPHRLPPGSRGWPLIGDTFAWLNAVAGSHPSSFVEKQIKKFVSLLCSVLLLILKRPDNSGFNEIRYGRIFSCSLFGKWAVVSADPDFNRFIMQNEGKLFQSSYPKSFRDLVGKDGVITVHGDQQRRLHSIASSMMRHDQLKTHFLEVIPVVMLQTLSNFKDGEVVLLQDICRKVAIHLMVNQLLGVSSESEVDEMSQLFSDFVDGCLSVPIDLPGFTYNKAMKARKEIIRKINKTIEKRLQNKAASDTAGNGVLGRLLEEESLPNESMADFIINLLFAGNETTSKTMLFAVYFLTHCPKAMTQLLEEHDRLAGGMLTWQDYKTMDFTQCVIDETLRLGGIAIWLMREAKEDVSYQDYVIPKGCFVVPFLSAVHLDESYYKESLSFNPWRWLDPETQQKRNWRTSPFYCPFGGGTRFCPGAELARLQIALFLHYFITTYKWTQLKEDRISFFPSARLVNGFKIQLNRRDSDPPNQ

SEQ ID NO: 71592 - protein, 383 aa, Arabidopsis thaliana
  peptide (1)..(383): Ceres Seq. ID no. 4361902
  misc_feature (101)..(373): Pfam Name: Cytochrome P450 Pfam Description: Cytochrome P450
  misc_feature (1)..(383): Homolog of NCBI NO: 15219454 NR Description: steroid 22-alpha-hydroxylase, putative; protein
  misc_feature (1)..(377): Homolog of NCBI NO: 15239203 NR Description: cytochrome p450, putative; protein id: supported by cDNA: 36334., supported by cDNA: gi_14596098, by cDNA: gi_15450716, supported by cDNA: gi_17380617, supported
  misc_feature (1)..(379): Homolog of NCBI NO: 9587211 NR Description: cytochrome P450 [Vigna radiata]
  misc_feature (1)..(379): Homolog of NCBI NO: 34902330 NR Description: Putative steroid 22-alpha-hydroxylase [Oryza
  misc_feature (1)..(375): Homolog of NCBI NO: 18400142 NR Description: cytochrome P450, putative; protein id: supported by cDNA: gi_14971016 [Arabidopsis thaliana] CYP90D [Arabidopsis thaliana] >gi|28393374|gb|AAO42111.1|
  misc_feature (162)..(375): Homolog of NCBI NO: 15229822 NR Description: steroid 22-alpha-hydroxylase (DWF4); protein id:
  misc_feature (1)..(148): Homolog of NCBI NO: 15229822 NR Description: steroid 22-alpha-hydroxylase (DWF4); protein id:
  misc_feature (162)..(375): Homolog of NCBI NO: 2935342 NR Description: steroid 22-alpha-hydroxylase; DWF4; CYP90B1
  misc_feature (1)..(148): Homolog of NCBI NO: 2935342 NR Description: steroid 22-alpha-hydroxylase; DWF4; CYP90B1
  misc_feature (1)..(348): Homolog of NCBI NO: 9294019 NR Description: cytochrome P450-like protein [Arabidopsis
MQNEGKLFQSSYPKSFRDLVGKDGVITVHGDQQRRLHSIASSMMRHDQLKTHFLEVIPVVMLQTLSNFKDGEVVLLQDICRKVAIHLMVNQLLGVSSESEVDEMSQLFSDFVDGCLSVPIDLPGFTYNKAMKARKEIIRKINKTIEKRLQNKAASDTAGNGVLGRLLEEESLPNESMADFIINLLFAGNETTSKTMLFAVYFLTHCPKAMTQLLEEHDRLAGGMLTWQDYKTMDFTQCVIDETLRLGGIAIWLMREAKEDVSYQDYVIPKGCFVVPFLSAVHLDESYYKESLSFNPWRWLDPETQQKRNWRTSPFYCPFGGGTRFCPGAELARLQIALFLHYFITTYKWTQLKEDRISFFPSARLVNGFKIQLNRRDSDPPNQ

SEQ ID NO: 71593 - protein, 341 aa, Arabidopsis thaliana
  peptide (1)..(341): Ceres Seq. ID no. 4361903
  misc_feature (59)..(331): Pfam Name: Cytochrome P450 Pfam Description: Cytochrome P450
  misc_feature (1)..(341): Homolog of NCBI NO: 15219454 NR Description: steroid 22-alpha-hydroxylase, putative; protein
  misc_feature (1)..(335): Homolog of NCBI NO: 15239203 NR Description: cytochrome p450, putative; protein id: supported by cDNA: 36334., supported by cDNA: gi_14596098, by cDNA: gi_15450716, supported by cDNA: gi_17380617, supported
  misc_feature (1)..(337): Homolog of NCBI NO: 9587211 NR Description: cytochrome P450 [Vigna radiata]
  misc_feature (1)..(337): Homolog of NCBI NO: 34902330 NR Description: Putative steroid 22-alpha-hydroxylase [Oryza
  misc_feature (1)..(333): Homolog of NCBI NO: 18400142 NR Description: cytochrome P450, putative; protein id: supported by cDNA: gi_14971016 [Arabidopsis thaliana] CYP90D [Arabidopsis thaliana] >gi|28393374|gb|AAO42111.1|
  misc_feature (120)..(333): Homolog of NCBI NO: 15229822 NR Description: steroid 22-alpha-hydroxylase (DWF4); protein id:
  misc_feature (1)..(106): Homolog of NCBI NO: 15229822 NR Description: steroid 22-alpha-hydroxylase (DWF4); protein id:
  misc_feature (120)..(333): Homolog of NCBI NO: 2935342 NR Description: steroid 22-alpha-hydroxylase; DWF4; CYP90B1
  misc_feature (1)..(106): Homolog of NCBI NO: 2935342 NR Description: steroid 22-alpha-hydroxylase; DWF4; CYP90B1
  misc_feature (1)..(306): Homolog of NCBI NO: 9294019 NR Description: cytochrome P450-like protein [Arabidopsis
MMRHDQLKTHFLEVIPVVMLQTLSNFKDGEVVLLQDICRKVAIHLMVNQLLGVSSESEVDEMSQLFSDFVDGCLSVPIDLPGFTYNKAMKARKEIIRKINKTIEKRLQNKAASDTAGNGVLGRLLEEESLPNESMADFIINLLFAGNETTSKTMLFAVYFLTHCPKAMTQLLEEHDRLAGGMLTWQDYKTMDFTQCVIDETLRLGGIAIWLMREAKEDVSYQDYVIPKGCFVVPFLSAVHLDESYYKESLSFNPWRWLDPETQQKRNWRTSPFYCPFGGGTRFCPGAELARLQIALFLHYFITTYKWTQLKEDRISFFPSARLVNGFKIQLNRRDSDPPNQ

SEQ ID NO: 71594 - DNA, 981 bp, Arabidopsis thaliana
  misc_feature (1)..(981): Ceres Seq. ID no. 4362003
  misc_feature: MA Experiment ID: 20000355 Result: Up-regulated in Transcription
  misc_feature: MA Experiment 20000355 PARAMETER Experiment Name: At_Siliques_Sub_P Parameter: Age (day) Value: 21
  misc_feature: MA Experiment 20000355 PARAMETER Experiment Name: At_Siliques_Sub_P Parameter: Organism Value: A. thaliana
  misc_feature: MA Experiment 20000355 PARAMETER Experiment Name: At_Siliques_Sub_P Parameter: Plant Line Value: WS
  misc_feature: MA Experiment 20000355 PARAMETER Experiment Name: At_Siliques_Sub_P Parameter: Tissue Value: Less Than 5mm Siliques vs. Whole Plant
atgtggaagcattgtttatgtcagaaacatgagaaatccgaaaagtgggttgatattgtccctagtcacaagcctcatcgtagtaacggcagatttcgagtcgtctcttacaacaccctagctcatcggatggcgtcgtcgtctctcatgtatgtctctcctccagagtctatcctgtgggagaaacgttcgaaggcgattcttgataatataaagaattttgaagctgatttcatctgtctacaagaagtagacgagtaccatagttttttcgatagaaacatggaagctcaaggatactctggaattcctattgaaaataaagaaggctatgaatgcgcaatctttttcaagcccaaatttgcagagttcattacataccaaacaaccagaatccaaggatacaccaaatatgaaaacctttgcgtggcgccgagtagtagtaccgtaagtagtgagtctagtgacgttgttaacgctgaagagctttctgtggtaatggtagcgttcaagattttaaaaccatttaatcatgtcgttattattgcaagctctcatttaaaatccgggaaacctgatcgatgggatgatttaaagctagctcaagtcaagactctaatgactgaattagcctcgttcaaggagattatatcagcgctaacaaattgcagtccatcggtgatccttgctggtgacttcaattcgaaaccctacgtgcataaatacataaattcagacaatataccgtctgatattgatctacgaagtgtgtatgaatttacgaaaggagagccaaggttcacaaataatgtgccagggtttgctgaaacactcgattacatgttctacacgcattctgaaattatttctcctgtgaagctcctggattcgccggacgaagtcgatttcttacccaatgaaattcatccgagtgatcatttacccatcggcgttgagtttgagatcaaccgaaacatatag

SEQ ID NO: 71595 - protein, 326 aa, Arabidopsis thaliana
  peptide (1)..(326): Ceres Seq. ID no. 4362004
  misc_feature (67)..(320): Pfam Name: Endonuclease/Exonuclease/phosphatase family Pfam Description: Endonuclease/Exonuclease/phosphatase family
  misc_feature (28)..(237): Homolog of NCBI NO: 11282423 NR Description: hypothetical protein F14P22.150 - Arabidopsis >gi|6735373|emb|CAB68194.1| putative protein [Arabidopsis
  misc_feature (44)..(326): Homolog of NCBI NO: 15222370 NR Description: hypothetical protein; protein id: At1g31530.1 thaliana] >gi|12597850|gb|AAG60160.1|AC074360_25 hypothetical
  misc_feature (57)..(326): Homolog of NCBI NO: 12322536 NR Description: hypothetical protein [Arabidopsis thaliana]
  misc_feature (166)..(324): Homolog of NCBI NO: 15222367 NR Description: hypothetical protein; protein id: At1g31500.1 thaliana] >gi|12322547|gb|AAG51276.1|AC027135_17 hypothetical [Arabidopsis thaliana] >gi|12597833|gb|AAG60143.1|AC074360_8
  misc_feature (60)..(162): Homolog of NCBI NO: 15222367 NR Description: hypothetical protein; protein id: At1g31500.1 thaliana] >gi|12322547|gb|AAG51276.1|AC027135_17 hypothetical [Arabidopsis thaliana] >gi|12597833|gb|AAG60143.1|AC074360_8
  misc_feature (166)..(324): Homolog of NCBI NO: 28973671 NR Description: unknown protein [Arabidopsis thaliana]
  misc_feature (60)..(237): Homolog of NCBI NO: 28973671 NR Description: unknown protein [Arabidopsis thaliana]
  misc_feature (22)..(284): Homolog of NCBI NO: 19075401 NR Description: putative global transcriptional regulator; ccr4 subunit homologue [Schizosaccharomyces pombe]
  misc_feature (28)..(237): Homolog of NCBI NO: 22331849 NR Description: putative protein; protein id: At3g58560.1, by cDNA: gi_18087603 [Arabidopsis thaliana] AT3g58560/F14P22_150 [Arabidopsis thaliana]
  misc_feature (20)..(103): Homolog of NCBI NO: 31209447 NR Description: ENSANGP00000013019 [Anopheles gambiae]
MWKHCLCQKHEKSEKWVDIVPSHKPHRSNGRFRVVSYNTLAHRMASSSLMYVSPPESILWEKRSKAILDNIKNFEADFICLQEVDEYHSFFDRNMEAQGYSGIPIENKEGYECAIFFKPKFAEFITYQTTRIQGYTKYENLCVAPSSSTVSSESSDVVNAEELSVVMVAFKILKPFNHVVIIASSHLKSGKPDRWDDLKLAQVKTLMTELASFKEIISALTNCSPSVILAGDFNSKPYVHKYINSDNIPSDIDLRSVYEFTKGEPRFTNNVPGFAETLDYMFYTHSEIISPVKLLDSPDEVDFLPNEIHPSDHLPIGVEFEINRNI

SEQ ID NO: 71596 - protein, 283 aa, Arabidopsis thaliana
  peptide (1)..(283): Ceres Seq. ID no. 4362005
  misc_feature (24)..(277): Pfam Name: Endonuclease/Exonuclease/phosphatase family Pfam Description: Endonuclease/Exonuclease/phosphatase family
  misc_feature (1)..(283): Homolog of NCBI NO: 15222370 NR Description: hypothetical protein; protein id: At1g31530.1 thaliana] >gi|12597850|gb|AAG60160.1|AC074360_25 hypothetical
  misc_feature (14)..(283): Homolog of NCBI NO: 12322536 NR Description: hypothetical protein [Arabidopsis thaliana]
  misc_feature (123)..(281): Homolog of NCBI NO: 15222367 NR Description: hypothetical protein; protein id: At1g31500.1 thaliana] >gi|12322547|gb|AAG51276.1|AC027135_17 hypothetical [Arabidopsis thaliana] >gi|12597833|gb|AAG60143.1|AC074360_8
  misc_feature (17)..(119): Homolog of NCBI NO: 15222367 NR Description: hypothetical protein; protein id: At1g31500.1 thaliana] >gi|12322547|gb|AAG51276.1|AC027135_17 hypothetical [Arabidopsis thaliana] >gi|12597833|gb|AAG60143.1|AC074360_8
  misc_feature (123)..(281): Homolog of NCBI NO: 28973671 NR Description: unknown protein [Arabidopsis thaliana]
  misc_feature (17)..(194): Homolog of NCBI NO: 28973671 NR Description: unknown protein [Arabidopsis thaliana]
  misc_feature (1)..(241): Homolog of NCBI NO: 19075401 NR Description: putative global transcriptional regulator; ccr4 subunit homologue [Schizosaccharomyces pombe]
  misc_feature (1)..(194): Homolog of NCBI NO: 22331849 NR Description: putative protein; protein id: At3g58560.1, by cDNA: gi_18087603 [Arabidopsis thaliana] AT3g58560/F14P22_150 [Arabidopsis thaliana]
  misc_feature (1)..(60): Homolog of NCBI NO: 31209447 NR Description: ENSANGP00000013019 [Anopheles gambiae]
  misc_feature (1)..(194): Homolog of NCBI NO: 11282423 NR Description: hypothetical protein F14P22.150 - Arabidopsis >gi|6735373|emb|CAB68194.1| putative protein [Arabidopsis
MASSSLMYVSPPESILWEKRSKAILDNIKNFEADFICLQEVDEYHSFFDRNMEAQGYSGIPIENKEGYECAIFFKPKFAEFITYQTTRIQGYTKYENLCVAPSSSTVSSESSDVVNAEELSVVMVAFKILKPFNHVVIIASSHLKSGKPDRWDDLKLAQVKTLMTELASFKEIISALTNCSPSVILAGDFNSKPYVHKYINSDNIPSDIDLRSVYEFTKGEPRFTNNVPGFAETLDYMFYTHSEIISPVKLLDSPDEVDFLPNEIHPSDHLPIGVEFEINRNI

SEQ ID NO: 71597 - protein, 277 aa, Arabidopsis thaliana
  peptide (1)..(277): Ceres Seq. ID no. 4362006
  misc_feature (18)..(271): Pfam Name: Endonuclease/Exonuclease/phosphatase family Pfam Description: Endonuclease/Exonuclease/phosphatase family
  misc_feature (1)..(277): Homolog of NCBI NO: 15222370 NR Description: hypothetical protein; protein id: At1g31530.1 thaliana] >gi|12597850|gb|AAG60160.1|AC074360_25 hypothetical
  misc_feature (8)..(277): Homolog of NCBI NO: 12322536 NR Description: hypothetical protein [Arabidopsis thaliana]
  misc_feature (117)..(275): Homolog of NCBI NO: 15222367 NR Description: hypothetical protein; protein id: At1g31500.1 thaliana] >gi|12322547|gb|AAG51276.1|AC027135_17 hypothetical [Arabidopsis thaliana] >gi|12597833|gb|AAG60143.1|AC074360_8
  misc_feature (11)..(113): Homolog of NCBI NO: 15222367 NR Description: hypothetical protein; protein id: At1g31500.1 thaliana] >gi|12322547|gb|AAG51276.1|AC027135_17 hypothetical [Arabidopsis thaliana] >gi|12597833|gb|AAG60143.1|AC074360_8
  misc_feature (117)..(275): Homolog of NCBI NO: 28973671 NR Description: unknown protein [Arabidopsis thaliana]
  misc_feature (11)..(188): Homolog of NCBI NO: 28973671 NR Description: unknown protein [Arabidopsis thaliana]
  misc_feature (1)..(235): Homolog of NCBI NO: 19075401 NR Description: putative global transcriptional regulator; ccr4 subunit homologue [Schizosaccharomyces pombe]
  misc_feature (1)..(188): Homolog of NCBI NO: 22331849 NR Description: putative protein; protein id: At3g58560.1, by cDNA: gi_18087603 [Arabidopsis thaliana] AT3g58560/F14P22_150 [Arabidopsis thaliana]
  misc_feature (1)..(54): Homolog of NCBI NO: 31209447 NR Description: ENSANGP00000013019 [Anopheles gambiae]
  misc_feature (1)..(188): Homolog of NCBI NO: 11282423 NR Description: hypothetical protein F14P22.150 - Arabidopsis >gi|6735373|emb|CAB68194.1| putative protein [Arabidopsis
MYVSPPESILWEKRSKAILDNIKNFEADFICLQEVDEYHSFFDRNMEAQGYSGIPIENKEGYECAIFFKPKFAEFITYQTTRIQGYTKYENLCVAPSSSTVSSESSDVVNAEELSVVMVAFKILKPFNHVVIIASSHLKSGKPDRWDDLKLAQVKTLMTELASFKEIISALTNCSPSVILAGDFNSKPYVHKYINSDNIPSDIDLRSVYEFTKGEPRFTNNVPGFAETLDYMFYTHSEIISPVKLLDSPDEVDFLPNEIHPSDHLPIGVEFEINRNI

SEQ ID NO: 71598 - DNA, 1020 bp, Arabidopsis thaliana
  misc_feature (1)..(1020): Ceres Seq. ID no. 4362265
  misc_feature: MA Experiment ID: 20000355 Result: Up-regulated in Transcription
  misc_feature: MA Experiment 20000355 PARAMETER Experiment Name: At_Siliques_Sub_P Parameter: Age (day) Value: 21
  misc_feature: MA Experiment 20000355 PARAMETER Experiment Name: At_Siliques_Sub_P Parameter: Organism Value: A. thaliana
  misc_feature: MA Experiment 20000355 PARAMETER Experiment Name: At_Siliques_Sub_P Parameter: Plant Line Value: WS
  misc_feature: MA Experiment 20000355 PARAMETER Experiment Name: At_Siliques_Sub_P Parameter: Tissue Value: Less Than 5mm Siliques vs. Whole Plant
  misc_feature: MA Experiment ID: 20000440 Result: Up-regulated in Transcription
  misc_feature: MA Experiment 20000440 PARAMETER Experiment Name: At_Closed-Flower__Sub_P Parameter: Tissue Value: Closed Flower vs. Whole Plant
  misc_feature: Pfam Name: WD40 Pfam Description: WD domain, G-beta repeat
atgactttggtgccggccattggtcgcgagctctcgaatccaccgtccgatgggatttctaatcttcgattttctaataacagcgatcatttactagtctcttcatgggataagagtgtaagattgtatgatgcgaacggcgatttgatgagaggggagtttaaacatggtggagcggtactcgattgctgcttccatgatgattcttctggattcagtgtttgcgccgatactaaagttagaagaattgacttcaatgctggcaaagaagacgttttgggtacgcatgagaagccagttcgatgtgttgagtattcttatgctgcagggcaagtgatcactggaagttgggataaaacgattaaatgttgggatccaagaggtgcaagtgggactgagcgcacacagattggaacttatatgcaacctgagcgtgttaactctctttctcttgttggaaatcgtttggtagtggcaacagcaggaaggcatgtcaacatttatgatcttagaaatatgtcccagcctgagcaaagaagagagtcctcacttaaataccagacaagatgtgtacgttgttatcccaacggaacaggatatgcccttagctctgttgaagggagggtttcaatggagttttttgatctatcagaagctgctcaggctaaaaaatatgctttcaaatgtcaccggaaatcagaggatggaagggacattgtctaccctgtaaatgcaattgctttccatccgatttatggcacttttgcttccggaggctgtgatggttttgtcaacatttgggacggtaacaataagaagaggctttatcagtactctaagtatccaacaagtattgcggcgctgtcattcagccgagatggtggattactggctgttgcttctagttacacgtttgaagagggagacaaaccgcatgaaccggacgccatctttgttagaagtgttaatgaaattgaagtgaaaccgaaacccaaagtatacccaaatcccccggtatag

SEQ ID NO: 71599 - protein, 339 aa, Arabidopsis thaliana
  peptide (1)..(339): Ceres Seq. ID no. 4362266
  misc_feature: Pfam Name: WD40 Pfam Description: WD domain, G-beta repeat
  misc_feature (1)..(339): Homolog of NCBI NO: 15222841 NR Description: mitotic checkpoint protein, putative; protein id: [Arabidopsis thaliana] >gi|12597855|gb|AAG60165.1|AC074110_3
  misc_feature (2)..(337): Homolog of NCBI NO: 18402300 NR Description: mitotic checkpoint protein, putative; protein id:
  misc_feature (1)..(250): Homolog of NCBI NO: 12323596 NR Description: mitotic checkpoint protein, 3' partial;
  misc_feature (7)..(338): Homolog of NCBI NO: 28564814 NR Description: putative mitotic checkpoint protein [Oryza sativa
  misc_feature (10)..(330): Homolog of NCBI NO: 4757880 NR Description: BUB3 budding uninhibited by benzimidazoles 3 mitotic checkpoint component; BUB3 (budding uninhibited by
  misc_feature (10)..(330): Homolog of NCBI NO: 31560618 NR Description: budding uninhibited by benzimidazoles 3 homolog musculus] >gi|3378104|gb|AAC28439.1| testis mitotic checkpoint [Homo sapiens] >gi|19264055|gb|AAH25089.1| budding uninhibited by
  misc_feature (10)..(330): Homolog of NCBI NO: 7387559 NR Description: Mitotic checkpoint protein BUB3 (WD-repeat type I protein A72.5) >gi|5020213|gb|AAD38038.1|AF149822_1 mitotic
  misc_feature (10)..(330): Homolog of NCBI NO: 3986296 NR Description: mitotic checkpoint [Xenopus laevis]
  misc_feature (10)..(330): Homolog of NCBI NO: 13122448 NR Description: WD repeat protein Bub3 [Xenopus laevis]
  misc_feature (10)..(257): Homolog of NCBI NO: 21428470 NR Description: LD23540p [Drosophila melanogaster]
MTLVPAIGRELSNPPSDGISNLRFSNNSDHLLVSSWDKSVRLYDANGDLMRGEFKHGGAVLDCCFHDDSSGFSVCADTKVRRIDFNAGKEDVLGTHEKPVRCVEYSYAAGQVITGSWDKTIKCWDPRGASGTERTQIGTYMQPERVNSLSLVGNRLVVATAGRHVNIYDLRNMSQPEQRRESSLKYQTRCVRCYPNGTGYALSSVEGRVSMEFFDLSEAAQAKKYAFKCHRKSEDGRDIVYPVNAIAFHPIYGTFASGGCDGFVNIWDGNNKKRLYQYSKYPTSIAALSFSRDGGLLAVASSYTFEEGDKPHEPDAIFVRSVNEIEVKPKPKVYPNPPV

SEQ ID NO: 71600 - protein, 290 aa, Arabidopsis thaliana
  peptide (1)..(290): Ceres Seq. ID no. 4362267
  misc_feature: Pfam Name: WD40 Pfam Description: WD domain, G-beta repeat
  misc_feature (1)..(290): Homolog of NCBI NO: 15222841 NR Description: mitotic checkpoint protein, putative; protein id: [Arabidopsis thaliana] >gi|12597855|gb|AAG60165.1|AC074110_3
  misc_feature (1)..(288): Homolog of NCBI NO: 18402300 NR Description: mitotic checkpoint protein, putative; protein id:
  misc_feature (1)..(201): Homolog of NCBI NO: 12323596 NR Description: mitotic checkpoint protein, 3' partial;
  misc_feature (1)..(289): Homolog of NCBI NO: 28564814 NR Description: putative mitotic checkpoint protein [Oryza sativa
  misc_feature (1)..(281): Homolog of NCBI NO: 4757880 NR Description: BUB3 budding uninhibited by benzimidazoles 3 mitotic checkpoint component; BUB3 (budding uninhibited by
  misc_feature (1)..(281): Homolog of NCBI NO: 31560618 NR Description: budding uninhibited by benzimidazoles 3 homolog musculus] >gi|3378104|gb|AAC28439.1| testis mitotic checkpoint [Homo sapiens] >gi|19264055|gb|AAH25089.1| budding uninhibited by
  misc_feature (1)..(281): Homolog of NCBI NO: 7387559 NR Description: Mitotic checkpoint protein BUB3 (WD-repeat type I protein A72.5) >gi|5020213|gb|AAD38038.1|AF149822_1 mitotic
  misc_feature (1)..(281): Homolog of NCBI NO: 3986296 NR Description: mitotic checkpoint [Xenopus laevis]
  misc_feature (1)..(281): Homolog of NCBI NO: 13122448 NR Description: WD repeat protein Bub3 [Xenopus laevis]
  misc_feature (1)..(208): Homolog of NCBI NO: 21428470 NR Description: LD23540p [Drosophila melanogaster]
MRGEFKHGGAVLDCCFHDDSSGFSVCADTKVRRIDFNAGKEDVLGTHEKPVRCVEYSYAAGQVITGSWDKTIKCWDPRGASGTERTQIGTYMQPERVNSLSLVGNRLVVATAGRHVNIYDLRNMSQPEQRRESSLKYQTRCVRCYPNGTGYALSSVEGRVSMEFFDLSEAAQAKKYAFKCHRKSEDGRDIVYPVNAIAFHPIYGTFASGGCDGFVNIWDGNNKKRLYQYSKYPTSIAALSFSRDGGLLAVASSYTFEEGDKPHEPDAIFVRSVNEIEVKPKPKVYPNPPV

SEQ ID NO: 71601 - protein, 199 aa, Arabidopsis thaliana
  peptide (1)..(199): Ceres Seq. ID no. 4362268
  misc_feature: Pfam Name: WD40 Pfam Description: WD domain, G-beta repeat
  misc_feature (1)..(199): Homolog of NCBI NO: 15222841 NR Description: mitotic checkpoint protein, putative; protein id: [Arabidopsis thaliana] >gi|12597855|gb|AAG60165.1|AC074110_3
  misc_feature (1)..(197): Homolog of NCBI NO: 18402300 NR Description: mitotic checkpoint protein, putative; protein id:
  misc_feature (1)..(110): Homolog of NCBI NO: 12323596 NR Description: mitotic checkpoint protein, 3' partial;
  misc_feature (1)..(198): Homolog of NCBI NO: 28564814 NR Description: putative mitotic checkpoint protein [Oryza sativa
  misc_feature (1)..(190): Homolog of NCBI NO: 4757880 NR Description: BUB3 budding uninhibited by benzimidazoles 3 mitotic checkpoint component; BUB3 (budding uninhibited by
  misc_feature (1)..(190): Homolog of NCBI NO: 31560618 NR Description: budding uninhibited by benzimidazoles 3 homolog musculus] >gi|3378104|gb|AAC28439.1| testis mitotic checkpoint [Homo sapiens] >gi|19264055|gb|AAH25089.1| budding uninhibited by
  misc_feature (1)..(190): Homolog of NCBI NO: 7387559 NR Description: Mitotic checkpoint protein BUB3 (WD-repeat type I protein A72.5) >gi|5020213|gb|AAD38038.1|AF149822_1 mitotic
  misc_feature (1)..(190): Homolog of NCBI NO: 3986296 NR Description: mitotic checkpoint [Xenopus laevis]
  misc_feature (1)..(190): Homolog of NCBI NO: 13122448 NR Description: WD repeat protein Bub3 [Xenopus laevis]
  misc_feature (1)..(117): Homolog of NCBI NO: 21428470 NR Description: LD23540p [Drosophila melanogaster]
MQPERVNSLSLVGNRLVVATAGRHVNIYDLRNMSQPEQRRESSLKYQTRCVRCYPNGTGYALSSVEGRVSMEFFDLSEAAQAKKYAFKCHRKSEDGRDIVYPVNAIAFHPIYGTFASGGCDGFVNIWDGNNKKRLYQYSKYPTSIAALSFSRDGGLLAVASSYTFEEGDKPHEPDAIFVRSVNEIEVKPKPKVYPNPPV

SEQ ID NO: 71602 - DNA, 2373 bp, Arabidopsis thaliana
  misc_feature (1)..(2373): Ceres Seq. ID no. 4370992
  misc_feature: MA Experiment ID: 20000307 Result: Down-regulated in Transcription
  misc_feature: MA Experiment 20000307 PARAMETER Experiment Name: At_Germinating_Seeds_Sub_P Parameter: Age (hr) Value: 24 vs. 0
  misc_feature: MA Experiment 20000307 PARAMETER Experiment Name: At_Germinating_Seeds_Sub_P Parameter: Organism Value: A. thaliana
  misc_feature: MA Experiment 20000307 PARAMETER Experiment Name: At_Germinating_Seeds_Sub_P Parameter: Plant Line Value: WS
  misc_feature: MA Experiment 20000307 PARAMETER Experiment Name: At_Germinating_Seeds_Sub_P Parameter: Tissue Value: Germinating Seeds
  misc_feature: MA Experiment ID: 20000355 Result: Up-regulated in Transcription
  misc_feature: MA Experiment 20000355 PARAMETER Experiment Name: At_Siliques_Sub_P Parameter: Age (day) Value: 21
  misc_feature: MA Experiment 20000355 PARAMETER Experiment Name: At_Siliques_Sub_P Parameter: Organism Value: A. thaliana
  misc_feature: MA Experiment 20000355 PARAMETER Experiment Name: At_Siliques_Sub_P Parameter: Plant Line Value: WS
  misc_feature: MA Experiment 20000355 PARAMETER Experiment Name: At_Siliques_Sub_P Parameter: Tissue Value: Less Than 5mm Siliques vs. Whole Plant
atgcaaccgaatccagaccttgtccgagccatcgccaaccgctacgccgcgaatctccgcctctgtttgccgctccgacgaacatctctgcagctcgcgcgagccgtccatggaaatatcattactttcgggtttcagccacgtgcccatatcctgaaccgtttgattgatgtttattgtaaatcgtcagagctaaattatgcacgccaactgttcgatgaaatctctgaaccagataaaattgctagaaccaccatggtctctggctattgtgcttccggtgatatcaccctcgctcgaggggtttttgagaaagctcctgtgtgtatgcgtgatactgtaatgtacaatgcgatgatcactggcttttcacataacaatgatggttactctgctattaacctcttttgtaagatgaagcatgaaggattcaaacctgacaacttcactttcgcaagtgttctcgcgggtttagcgttagttgccgatgacgagaagcaatgtgtgcaatttcatgccgcagctctgaaatctggtgctggttatattacttcggtttctaacgctctggtgtctgtgtattcgaaatgtgcgtcttctccgtctctgctacattcagctagaaaagtgtttgatgagattcttgagaaagatgagaggtcgtggacgactatgatgacgggttatgtaaagaatggttattttgatttaggggaagagttgcttgaggggatggacgacaatatgaagctggttgcttataatgctatgatttctggttatgttaatcgtggtttttatcaggaggcattggagatggtaagaaggatggtttcatctggaattgagctcgatgagtttacatatcctagcgttattagggcgtgtgccacagctggattgcttcagttgggaaagcaagttcatgcttatgtattaagaagggaggatttctcgtttcattttgacaattcgttagtttcgttatactacaaatgcggtaagtttgatgaggcgagagccatttttgagaaaatgccggcaaaagacttggtttcctggaatgcgttgttgtcagggtatgttagttctgggcacataggtgaggcgaagttgattttcaaagagatgaaagagaagaatattctatcatggatgataatgatatccgggttagctgaaaatgggtttggagaagaaggtttgaagctgttttcttgtatgaagagagaaggtttcgagccttgtgattacgctttttccggggcaatcaaatcatgtgccgtgctgggagcatattgcaatgggcaacagtaccatgcacagttgcttaaaatagggtttgactctagcctctctgctggaaacgctctgattacaatgtatgcgaaatgcggggttgtggaggaagctcgacaggtgtttcgaactatgccttgtctggattcggtttcctggaatgcgttgattgctgcattgggacagcatggccatggtgctgaagcagtagatgtgtatgaggagatgctaaagaaagggataagaccggatcggattacgttgcttacagttttgacagcatgtagccacgcgggtttagtggaccagggacggaaatattttgattctatggagactgtttaccgtatacctccaggtgcagatcattacgcaaggctgatcgatttgctttgtcgttctgggaaattctctgatgcggaaagtgtaatcgaatcattacctttcaaacctactgcagaaatctgggaagctcttctttctggttgcagagtgcatggaaacatggaactagggatcatcgctgcagacaaactcttcggtctcataccagaacatgatgggacatacatgctcttatcaaacatgcacgcagctactggccagtgggaggaagtggcaagggtacgtaaactaatgcgggatcgaggtgtaaaaaaagaagtagcttgtagttggattgaaatggagacacaagtgcatacatttctagttgatgatacatcacatccagaagcagaagctgtttacatctatcttcaagacctgggtaaagagatgaggagactcgggtatgtaccagacacgagcttcgtgttgcacgacgtagagtctgatggtcacaaggaagatatgttgacaactcatagtgagaagattgcggttgcttttgggctaatgaaacttcctccgggaacaactattaggattttcaagaacttgaggacttgtggagattgccataacttcttcaggttcttgtcgtgggtggtgcagcgagacattatcttgagagacaggaagaggtttcatcatttccggaatggcgagtgttcttgtggtaacttctggtag

SEQ ID NO: 71603 - protein, 790 aa, Arabidopsis thaliana
  peptide (1)..(790): Ceres Seq. ID no. 4370993
  misc_feature (114)..(148): Pfam Name: PPR repeat Pfam Description: PPR repeat
  misc_feature (7)..(790): Homolog of NCBI NO: 34393605 NR Description: pentatricopeptide (PPR) repeat-containing
  misc_feature (19)..(790): Homolog of NCBI NO: 15227144 NR Description: hypothetical protein; protein id: At2g22070.1
  misc_feature (5)..(790): Homolog of NCBI NO: 34896896 NR Description: hypothetical protein [Oryza sativa (japonica group)] >gi|24899461|gb|AAN65031.1| hypothetical protein [Oryza
  misc_feature (355)..(790): Homolog of NCBI NO: 15237421 NR Description: putative protein; protein id: At5g16860.1
  misc_feature (86)..(381): Homolog of NCBI NO: 15237421 NR Description: putative protein; protein id: At5g16860.1
  misc_feature (355)..(790): Homolog of NCBI NO: 34915012 NR Description: P0458A05.10 [Oryza sativa (japonica
  misc_feature (193)..(382): Homolog of NCBI NO: 34915012 NR Description: P0458A05.10 [Oryza sativa (japonica
  misc_feature (355)..(790): Homolog of NCBI NO: 15242684 NR Description: putative protein; protein id: At5g40410.1
  misc_feature (13)..(303): Homolog of NCBI NO: 15242684 NR Description: putative protein; protein id: At5g40410.1
  misc_feature (324)..(401): Homolog of NCBI NO: 15242684 NR Description: putative protein; protein id: At5g40410.1
MQPNPDLVRAIANRYAANLRLCLPLRRTSLQLARAVHGNIITFGFQPRAHILNRLIDVYCKSSELNYARQLFDEISEPDKIARTTMVSGYCASGDITLARGVFEKAPVCMRDTVMYNAMITGFSHNNDGYSAINLFCKMKHEGFKPDNFTFASVLAGLALVADDEKQCVQFHAAALKSGAGYITSVSNALVSVYSKCASSPSLLHSARKVFDEILEKDERSWTTMMTGYVKNGYFDLGEELLEGMDDNMKLVAYNAMISGYVNRGFYQEALEMVRRMVSSGIELDEFTYPSVIRACATAGLLQLGKQVHAYVLRREDFSFHFDNSLVSLYYKCGKFDEARAIFEKMPAKDLVSWNALLSGYVSSGHIGEAKLIFKEMKEKNILSWMIMISGLAENGFGEEGLKLFSCMKREGFEPCDYAFSGAIKSCAVLGAYCNGQQYHAQLLKIGFDSSLSAGNALITMYAKCGVVEEARQVFRTMPCLDSVSWNALIAALGQHGHGAEAVDVYEEMLKKGIRPDRITLLTVLTACSHAGLVDQGRKYFDSMETVYRIPPGADHYARLIDLLCRSGKFSDAESVIESLPFKPTAEIWEALLSGCRVHGNMELGIIAADKLFGLIPEHDGTYMLLSNMHAATGQWEEVARVRKLMRDRGVKKEVACSWIEMETQVHTFLVDDTSHPEAEAVYIYLQDLGKEMRRLGYVPDTSFVLHDVESDGHKEDMLTTHSEKIAVAFGLMKLPPGTTIRIFKNLRTCGDCHNFFRFLSWVVQRDIILRDRKRFHHFRNGECSCGNFW

SEQ ID NO: 71604 - protein, 705 aa, Arabidopsis thaliana
  peptide (1)..(705): Ceres Seq. ID no. 4370994
  misc_feature (29)..(63): Pfam Name: PPR repeat Pfam Description: PPR repeat
  misc_feature (1)..(705): Homolog of NCBI NO: 34393605 NR Description: pentatricopeptide (PPR) repeat-containing
  misc_feature (1)..(705): Homolog of NCBI NO: 15227144 NR Description: hypothetical protein; protein id: At2g22070.1
  misc_feature (1)..(705): Homolog of NCBI NO: 34896896 NR Description: hypothetical protein [Oryza sativa (japonica group)] >gi|24899461|gb|AAN65031.1| hypothetical protein [Oryza
  misc_feature (270)..(705): Homolog of NCBI NO: 15237421 NR Description: putative protein; protein id: At5g16860.1
  misc_feature (1)..(296): Homolog of NCBI NO: 15237421 NR Description: putative protein; protein id: At5g16860.1
  misc_feature (270)..(705): Homolog of NCBI NO: 34915012 NR Description: P0458A05.10 [Oryza sativa (japonica
  misc_feature (108)..(297): Homolog of NCBI NO: 34915012 NR Description: P0458A05.10 [Oryza sativa (japonica
  misc_feature (270)..(705): Homolog of NCBI NO: 15242684 NR Description: putative protein; protein id: At5g40410.1
  misc_feature (1)..(218): Homolog of NCBI NO: 15242684 NR Description: putative protein; protein id: At5g40410.1
  misc_feature (239)..(316): Homolog of NCBI NO: 15242684 NR Description: putative protein; protein id: At5g40410.1
MVSGYCASGDITLARGVFEKAPVCMRDTVMYNAMITGFSHNNDGYSAINLFCKMKHEGFKPDNFTFASVLAGLALVADDEKQCVQFHAAALKSGAGYITSVSNALVSVYSKCASSPSLLHSARKVFDEILEKDERSWTTMMTGYVKNGYFDLGEELLEGMDDNMKLVAYNAMISGYVNRGFYQEALEMVRRMVSSGIELDEFTYPSVIRACATAGLLQLGKQVHAYVLRREDFSFHFDNSLVSLYYKCGKFDEARAIFEKMPAKDLVSWNALLSGYVSSGHIGEAKLIFKEMKEKNILSWMIMISGLAENGFGEEGLKLFSCMKREGFEPCDYAFSGAIKSCAVLGAYCNGQQYHAQLLKIGFDSSLSAGNALITMYAKCGVVEEARQVFRTMPCLDSVSWNALIAALGQHGHGAEAVDVYEEMLKKGIRPDRITLLTVLTACSHAGLVDQGRKYFDSMETVYRIPPGADHYARLIDLLCRSGKFSDAESVIESLPFKPTAEIWEALLSGCRVHGNMELGIIAADKLFGLIPEHDGTYMLLSNMHAATGQWEEVARVRKLMRDRGVKKEVACSWIEMETQVHTFLVDDTSHPEAEAVYIYLQDLGKEMRRLGYVPDTSFVLHDVESDGHKEDMLTTHSEKIAVAFGLMKLPPGTTIRIFKNLRTCGDCHNFFRFLSWVVQRDIILRDRKRFHHFRNGECSCGNFW

SEQ ID NO: 71605 - protein, 681 aa, Arabidopsis thaliana
  peptide (1)..(681): Ceres Seq. ID no. 4370995
  misc_feature (5)..(39): Pfam Name: PPR repeat Pfam Description: PPR repeat
  misc_feature (1)..(681): Homolog of NCBI NO: 34393605 NR Description: pentatricopeptide (PPR) repeat-containing
  misc_feature (1)..(681): Homolog of NCBI NO: 15227144 NR Description: hypothetical protein; protein id: At2g22070.1
  misc_feature (1)..(681): Homolog of NCBI NO: 34896896 NR Description: hypothetical protein [Oryza sativa (japonica group)] >gi|24899461|gb|AAN65031.1| hypothetical protein [Oryza
  misc_feature (246)..(681): Homolog of NCBI NO: 15237421 NR Description: putative protein; protein id: At5g16860.1
  misc_feature (1)..(272): Homolog of NCBI NO: 15237421 NR Description: putative protein; protein id: At5g16860.1
  misc_feature (246)..(681): Homolog of NCBI NO: 34915012 NR Description: P0458A05.10 [Oryza sativa (japonica
  misc_feature (84)..(273): Homolog of NCBI NO: 34915012 NR Description: P0458A05.10 [Oryza sativa (japonica
  misc_feature (246)..(681): Homolog of NCBI NO: 15242684 NR Description: putative protein; protein id: At5g40410.1
  misc_feature (1)..(194): Homolog of NCBI NO: 15242684 NR Description: putative protein; protein id: At5g40410.1
  misc_feature (215)..(292): Homolog of NCBI NO: 15242684 NR Description: putative protein; protein id: At5g40410.1
MRDTVMYNAMITGFSHNNDGYSAINLFCKMKHEGFKPDNFTFASVLAGLALVADDEKQCVQFHAAALKSGAGYITSVSNALVSVYSKCASSPSLLHSARKVFDEILEKDERSWTTMMTGYVKNGYFDLGEELLEGMDDNMKLVAYNAMISGYVNRGFYQEALEMVRRMVSSGIELDEFTYPSVIRACATAGLLQLGKQVHAYVLRREDFSFHFDNSLVSLYYKCGKFDEARAIFEKMPAKDLVSWNALLSGYVSSGHIGEAKLIFKEMKEKNILSWMIMISGLAENGFGEEGLKLFSCMKREGFEPCDYAFSGAIKSCAVLGAYCNGQQYHAQLLKIGFDSSLSAGNALITMYAKCGVVEEARQVFRTMPCLDSVSWNALIAALGQHGHGAEAVDVYEEMLKKGIRPDRITLLTVLTACSHAGLVDQGRKYFDSMETVYRIPPGADHYARLIDLLCRSGKFSDAESVIESLPFKPTAEIWEALLSGCRVHGNMELGIIAADKLFGLIPEHDGTYMLLSNMHAATGQWEEVARVRKLMRDRGVKKEVACSWIEMETQVHTFLVDDTSHPEAEAVYIYLQDLGKEMRRLGYVPDTSFVLHDVESDGHKEDMLTTHSEKIAVAFGLMKLPPGTTIRIFKNLRTCGDCHNFFRFLSWVVQRDIILRDRKRFHHFRNGECSCGNFW

SEQ ID NO: 71606 - DNA, 1110 bp, Arabidopsis thaliana
  misc_feature (1)..(1110): Ceres Seq. ID no. 4585252
  misc_feature: MA Experiment ID: 20000179 Result: Up-regulated in Transcription
  misc_feature: MA Experiment 20000179 PARAMETER Experiment Name: At_Germinating_Seeds_P Parameter: Age (hr) Value: 6 vs. 0
  misc_feature: MA Experiment 20000179 PARAMETER Experiment Name: At_Germinating_Seeds_P Parameter: Tissue Value: Germinating Seeds
  misc_feature: MA Experiment ID: 20000180 Result: Up-regulated in Transcription
  misc_feature: MA Experiment 20000180 PARAMETER Experiment Name: At_Germinating_Seeds_P Parameter: Age (hr) Value: 24 vs. 0
  misc_feature: MA Experiment 20000180 PARAMETER Experiment Name: At_Germinating_Seeds_P Parameter: Tissue Value: Germinating Seeds
  misc_feature: MA Experiment ID: 20000439 Result: Down-regulated in Transcription
  misc_feature: MA Experiment 20000439 PARAMETER Experiment Name: At_Roots__P Parameter: Age (day) Value: 14 vs. 21
  misc_feature: MA Experiment 20000439 PARAMETER Experiment Name: At_Roots__P Parameter: Organism Value: A. thaliana
  misc_feature: MA Experiment 20000439 PARAMETER Experiment Name: At_Roots__P Parameter: Tissue Value: Roots vs. Whole Plant
  misc_feature: MA Experiment ID: 20000496 Result: Down-regulated in Transcription
  misc_feature: MA Experiment 20000496 PARAMETER Experiment Name: At_Guard_Cells_P Parameter: Harvest Date Value: 7/19/2002
  misc_feature: MA Experiment 20000496 PARAMETER Experiment Name: At_Guard_Cells_P Parameter: Organism Value: Canola
  misc_feature: MA Experiment 20000496 PARAMETER Experiment Name: At_Guard_Cells_P Parameter: Tissue Value: Guard Cells vs. Leaves
  misc_feature: MA Experiment ID: 20001905 Result: Down-regulated in Transcription
  misc_feature: MA Experiment 20001905 PARAMETER Experiment Name: At_Drought_Reproduction_P Parameter: Age (day) Value: 40
  misc_feature: MA Experiment 20001905 PARAMETER Experiment Name: At_Drought_Reproduction_P Parameter: Organism Value: A. thaliana
  misc_feature: MA Experiment 20001905 PARAMETER Experiment Name: At_Drought_Reproduction_P Parameter: Plant Line Value: WS
  misc_feature: MA Experiment 20001905 PARAMETER Experiment Name: At_Drought_Reproduction_P Parameter: Timepoint (day) Value: 10
  misc_feature: MA Experiment 20001905 PARAMETER Experiment Name: At_Drought_Reproduction_P Parameter: Tissue Value: Rosettes
  misc_feature: MA Experiment 20001905 PARAMETER Experiment Name: At_Drought_Reproduction_P Parameter: Treatment Value: Drought vs. No Drought
atggtatcagtgtcattatctcatcataatctctggccaccggaatctggatctacggcgtttcgtggtttcgcaaccgccgcttccgtacacgcctgccaccatgttagccgtcacctccgccttgatttccatcttcgctcttcccttaaggttcacctactcatcttcgctcgcgcttctgatttctgggttaatctcattttatttgactatgctctgcttctacagaaactgcagcatttttctgatgatgcaagaatgaagtttgcaagataccaaagagtatttgtattcaatggggctaattttctcaagtctagagttgatatccggttgtcccaatcttcgccatttgtatgtttctttaatggtggagagagtagattaaaccctagaggtggtgaggaaggatcatcgaacccggagacttccaagagaaacacagttaacggacggagatggaccaatgtccttcttgccattaacgttataatgtatattgcacaaattgcatccgatgggaaggtcctgacatggggagccaagataaacagtttaatcgaaagaggtcagctatggagactggctacagcttctgttcttcatgcgaatcctatgcatctcatgataaattgctattctttgaattctattggaccaactgctgagagtttaggtggcccaaagagatttcttgctgtttacttgacatccgcagttgcaaaacccatcttaagagttctaggttcagcaatgagctactggttcaacaaagcgccatcagttggtgcttcaggtgcaatattcggattggttggctcggtagctgtatttgttataagacacaaacagatggtcagaggtggcaatgaggatctaatgcagatagctcaaattattgccctaaacatggcaatgggtctaatgtccagacgtatagataactggggacatattggtggcttacttggtggaaccgcaatgacatggcttcttggaccacagtggaagtatgaatatacaacaagagacggtcggagagtcttcatggacagtgctcctattcctctccttttgcggtggagaaatgaacagcgacggctttga

SEQ ID NO: 71607 - protein, 369 aa, Arabidopsis thaliana
  peptide (1)..(369): Ceres Seq. ID no. 4585253
  misc_feature (1)..(369): Homolog of NCBI NO: 11761473 NR Description: unknown protein [Arabidopsis thaliana]
  misc_feature (1)..(352): Homolog of NCBI NO: 25518651 NR Description: hypothetical protein F4F7.14 - Arabidopsis
  misc_feature (76)..(369): Homolog of NCBI NO: 30689150 NR Description: membrane protein, Rhomboid family [Arabidopsis
  misc_feature (1)..(51): Homolog of NCBI NO: 30689150 NR Description: membrane protein, Rhomboid family [Arabidopsis
  misc_feature (92)..(333): Homolog of NCBI NO: 28210270 NR Description: conserved membrane protein (rhomboid family) tetani E88] >gi|28202706|gb|AAO35151.1| conserved membrane
  misc_feature (181)..(336): Homolog of NCBI NO: 22972591 NR Description: hypothetical protein [Chloroflexus aurantiacus]
  misc_feature (136)..(358): Homolog of NCBI NO: 23020903 NR Description: hypothetical protein [Clostridium thermocellum
  misc_feature (136)..(333): Homolog of NCBI NO: 23121840 NR Description: hypothetical protein [Desulfitobacterium
  misc_feature (151)..(334): Homolog of NCBI NO: 16079543 NR Description: similar to hypothetical proteins [Bacillus
  misc_feature (154)..(334): Homolog of NCBI NO: 15894241 NR Description: Uncharacterized membrane protein [Clostridium
MVSVSLSHHNLWPPESGSTAFRGFATAASVHACHHVSRHLRLDFHLRSSLKVHLLIFARASDFWVNLILFDYALLLQKLQHFSDDARMKFARYQRVFVFNGANFLKSRVDIRLSQSSPFVCFFNGGESRLNPRGGEEGSSNPETSKRNTVNGRRWTNVLLAINVIMYIAQIASDGKVLTWGAKINSLIERGQLWRLATASVLHANPMHLMINCYSLNSIGPTAESLGGPKRFLAVYLTSAVAKPILRVLGSAMSYWFNKAPSVGASGAIFGLVGSVAVFVIRHKQMVRGGNEDLMQIAQIIALNMAMGLMSRRIDNWGHIGGLLGGTAMTWLLGPQWKYEYTTRDGRRVFMDSAPIPLLLRWRNEQRRL

SEQ ID NO: 71608 - protein, 282 aa, Arabidopsis thaliana
  peptide (1)..(282): Ceres Seq. ID no. 4585254
  misc_feature (1)..(282): Homolog of NCBI NO: 11761473 NR Description: unknown protein [Arabidopsis thaliana]
  misc_feature (1)..(265): Homolog of NCBI NO: 25518651 NR Description: hypothetical protein F4F7.14 - Arabidopsis
  misc_feature (1)..(282): Homolog of NCBI NO: 30689150 NR Description: membrane protein, Rhomboid family [Arabidopsis
  misc_feature (5)..(246): Homolog of NCBI NO: 28210270 NR Description: conserved membrane protein (rhomboid family) tetani E88] >gi|28202706|gb|AAO35151.1| conserved membrane
  misc_feature (94)..(249): Homolog of NCBI NO: 22972591 NR Description: hypothetical protein [Chloroflexus aurantiacus]
  misc_feature (49)..(271): Homolog of NCBI NO: 23020903 NR Description: hypothetical protein [Clostridium thermocellum
  misc_feature (49)..(246): Homolog of NCBI NO: 23121840 NR Description: hypothetical protein [Desulfitobacterium
  misc_feature (64)..(247): Homolog of NCBI NO: 16079543 NR Description: similar to hypothetical proteins [Bacillus
  misc_feature (67)..(247): Homolog of NCBI NO: 15894241 NR Description: Uncharacterized membrane protein [Clostridium
  misc_feature (54)..(239): Homolog of NCBI NO: 23099378 NR Description: hypothetical protein [Oceanobacillus iheyensis >gi|22777607|dbj|BAC13879.1| hypothetical conserved protein
MKFARYQRVFVFNGANFLKSRVDIRLSQSSPFVCFFNGGESRLNPRGGEEGSSNPETSKRNTVNGRRWTNVLLAINVIMYIAQIASDGKVLTWGAKINSLIERGQLWRLATASVLHANPMHLMINCYSLNSIGPTAESLGGPKRFLAVYLTSAVAKPILRVLGSAMSYWFNKAPSVGASGAIFGLVGSVAVFVIRHKQMVRGGNEDLMQIAQIIALNMAMGLMSRRIDNWGHIGGLLGGTAMTWLLGPQWKYEYTTRDGRRVFMDSAPIPLLLRWRNEQRRL

SEQ ID NO: 71609 - protein, 204 aa, Arabidopsis thaliana
  peptide (1)..(204): Ceres Seq. ID no. 4585255
  misc_feature (1)..(168): Homolog of NCBI NO: 23121840 NR Description: hypothetical protein [Desulfitobacterium
  misc_feature (1)..(169): Homolog of NCBI NO: 16079543 NR Description: similar to hypothetical proteins [Bacillus
  misc_feature (1)..(169): Homolog of NCBI NO: 15894241 NR Description: Uncharacterized membrane protein [Clostridium
  misc_feature (1)..(161): Homolog of NCBI NO: 23099378 NR Description: hypothetical protein [Oceanobacillus iheyensis >gi|22777607|dbj|BAC13879.1| hypothetical conserved protein
  misc_feature (1)..(204): Homolog of NCBI NO: 11761473 NR Description: unknown protein [Arabidopsis thaliana]
  misc_feature (1)..(187): Homolog of NCBI NO: 25518651 NR Description: hypothetical protein F4F7.14 - Arabidopsis
  misc_feature (1)..(204): Homolog of NCBI NO: 30689150 NR Description: membrane protein, Rhomboid family [Arabidopsis
  misc_feature (1)..(168): Homolog of NCBI NO: 28210270 NR Description: conserved membrane protein (rhomboid family) tetani E88] >gi|28202706|gb|AAO35151.1| conserved membrane
  misc_feature (16)..(171): Homolog of NCBI NO: 22972591 NR Description: hypothetical protein [Chloroflexus aurantiacus]
  misc_feature (1)..(193): Homolog of NCBI NO: 23020903 NR Description: hypothetical protein [Clostridium thermocellum
MYIAQIASDGKVLTWGAKINSLIERGQLWRLATASVLHANPMHLMINCYSLNSIGPTAESLGGPKRFLAVYLTSAVAKPILRVLGSAMSYWFNKAPSVGASGAIFGLVGSVAVFVIRHKQMVRGGNEDLMQIAQIIALNMAMGLMSRRIDNWGHIGGLLGGTAMTWLLGPQWKYEYTTRDGRRVFMDSAPIPLLLRWRNEQRRL

SEQ ID NO: 71610 - DNA, 1098 bp, Arabidopsis thaliana
  misc_feature (1)..(1098): Ceres Seq. ID no. 4607554
  misc_feature: MA Experiment ID: 20000173 Result: Up-regulated in Transcription
  misc_feature: MA Experiment 20000173 PARAMETER Experiment Name: At_42deg_Heat_P Parameter: Age (day) Value: 14
  misc_feature: MA Experiment 20000173 PARAMETER Experiment Name: At_42deg_Heat_P Parameter: Organism Value: A. thaliana
  misc_feature: MA Experiment 20000173 PARAMETER Experiment Name: At_42deg_Heat_P Parameter: Plant Line Value: WS
  misc_feature: MA Experiment 20000173 PARAMETER Experiment Name: At_42deg_Heat_P Parameter: Temperature (deg C) Value: 42 vs. 22
  misc_feature: MA Experiment 20000173 PARAMETER Experiment Name: At_42deg_Heat_P Parameter: Timepoint (hr) Value: 6
  misc_feature: MA Experiment 20000173 PARAMETER Experiment Name: At_42deg_Heat_P Parameter: Tissue Value: Aerial
  misc_feature: MA Experiment ID: 20000180 Result: Up-regulated in Transcription
  misc_feature: MA Experiment 20000180 PARAMETER Experiment Name: At_Germinating_Seeds_P Parameter: Age (hr) Value: 24 vs. 0
  misc_feature: MA Experiment 20000180 PARAMETER Experiment Name: At_Germinating_Seeds_P Parameter: Tissue Value: Germinating Seeds
  misc_feature: MA Experiment ID: 20000453 Result: Up-regulated in Transcription
  misc_feature: MA Experiment 20000453 PARAMETER Experiment Name: At_100uM_ABA_P Parameter: Age (day) Value: 15
  misc_feature: MA Experiment 20000453 PARAMETER Experiment Name: At_100uM_ABA_P Parameter: Organism Value: A. thaliana
  misc_feature: MA Experiment 20000453 PARAMETER Experiment Name: At_100uM_ABA_P Parameter: Plant Line Value: WS
  misc_feature: MA Experiment 20000453 PARAMETER Experiment Name: At_100uM_ABA_P Parameter: Timepoint (hr) Value: 24
  misc_feature: MA Experiment 20000453 PARAMETER Experiment Name: At_100uM_ABA_P Parameter: Tissue Value: Aerial
  misc_feature: MA Experiment 20000453 PARAMETER Experiment Name: At_100uM_ABA_P Parameter: Treatment Value: 100uM ABA vs. No Treatment
atgctcagattagcgattcctttgtttctttttgcattatgctctttcacattattttcttctgcaagatccttcatcaccacaaaacctcttccgattgattcatttattcctaaaccaaagctagagaatgcggctgcgtgttcttacacggtgatcattaagacaagctgttcctctgtgtcttacactagagataagatcagtatatcgtttggtgatgtctacggcaacgaggtgtatgtgaagagactagacgatccatcgtcgaggacgttcgaaaagtgttcatcagacacatacaagatatcgggaccgtgtatgcgcgacgtttgttatctctacctcctcaggcaaggatccgacggctggaaaccagagaatgttaagatctacggctcatccatcagatcagtcactttctactacaaccttttcttgcctaactctgtttggtacggctttaatgtctgcaatggcattggcaataccaagtcttctcaacccattagtactacctcttccgttgcagctataaatctaagaagattccataattcttatcagcggaagagcatgccggagaccagctctttcaatatacacaagcggtgggacaaaaaaaaacatatatatagccatatagggttcattgaagaattggcgaacagatttgaggaagaagatgtgcaactactgcgagttctccagcaacagctgcgggaaaaggtggagagattacggtttttgatcaagagaatgactggaaaagacgacgatgctcatttcaccgagctgcaagcacttgaaagtcgtcttaaggatgttagtcgcactgtgttggaccaaaaggagaagatgataaagctagaagaagacgaaaggaagaaggaagctcagaatgagagtgatggtacgaggagaggggttttggtcccatgcaacaggagaatgaacggtagagagctcgagggtatgtcatctcgtgacctgctctcacttgacaatcagatattaaatgctttgttgggtttgcttgtccaaatgaatagaccaagggaggaacaagttgctgcaaggcagcgcgagaaggtatag

SEQ ID NO: 71611 - protein, 365 aa, Arabidopsis thaliana
  peptide (1)..(365): Ceres Seq. ID no. 4607555
  misc_feature (31)..(158): Pfam Name: Embryo-specific protein 3, (ATS3) Pfam Description: Embryo-specific protein 3, (ATS3)
  misc_feature (1)..(365): Homolog of NCBI NO: 15227355 NR Description: unknown protein; protein id: At2g41470.1
  misc_feature (5)..(183): Homolog of NCBI NO: 8809633 NR Description: contains similarity to embryo-specific protein
  misc_feature (5)..(183): Homolog of NCBI NO: 15241727 NR Description: putative protein; protein id: At5g62200.1
  misc_feature (8)..(168): Homolog of NCBI NO: 34910236 NR Description: OSJNBa0089K24.2 [Oryza sativa (japonica
  misc_feature (28)..(159): Homolog of NCBI NO: 15241758 NR Description: embryo-specific protein - like; protein id: supported by cDNA: 28168. [Arabidopsis thaliana]
  misc_feature (28)..(159): Homolog of NCBI NO: 26450767 NR Description: embryo-specific protein like [Arabidopsis
  misc_feature (190)..(314): Homolog of NCBI NO: 15227352 NR Description: unknown protein; protein id: At2g41440.1
  misc_feature (48)..(166): Homolog of NCBI NO: 3335171 NR Description: embryo-specific protein 3 [Arabidopsis thaliana]
  misc_feature (48)..(166): Homolog of NCBI NO: 13877521 NR Description: embryo-specific protein 3; ATS3 [Arabidopsis
  misc_feature (48)..(166): Homolog of NCBI NO: 15240721 NR Description: embryo-specific protein 3 (ATS3); protein id: supported by cDNA: gi_13877520, supported by cDNA: gi_17978804
MLRLAIPLFLFALCSFTLFSSARSFITTKPLPIDSFIPKPKLENAAACSYTVIIKTSCSSVSYTRDKISISFGDVYGNEVYVKRLDDPSSRTFEKCSSDTYKISGPCMRDVCYLYLLRQGSDGWKPENVKIYGSSIRSVTFYYNLFLPNSVWYGFNVCNGIGNTKSSQPISTTSSVAAINLRRFHNSYQRKSMPETSSFNIHKRWDKKKHIYSHIGFIEELANRFEEEDVQLLRVLQQQLREKVERLRFLIKRMTGKDDDAHFTELQALESRLKDVSRTVLDQKEKMIKLEEDERKKEAQNESDGTRRGVLVPCNRRMNGRELEGMSSRDLLSLDNQILNALLGLLVQMNRPREEQVAARQREKV

SEQ ID NO: 71612 - protein, 258 aa, Arabidopsis thaliana
  peptide (1)..(258): Ceres Seq. ID no. 4607556
  misc_feature (1)..(51): Pfam Name: Embryo-specific protein 3, (ATS3) Pfam Description: Embryo-specific protein 3, (ATS3)
  misc_feature (1)..(258): Homolog of NCBI NO: 15227355 NR Description: unknown protein; protein id: At2g41470.1
  misc_feature (1)..(76): Homolog of NCBI NO: 8809633 NR Description: contains similarity to embryo-specific protein
  misc_feature (1)..(76): Homolog of NCBI NO: 15241727 NR Description: putative protein; protein id: At5g62200.1
  misc_feature (1)..(61): Homolog of NCBI NO: 34910236 NR Description: OSJNBa0089K24.2 [Oryza sativa (japonica
  misc_feature (1)..(52): Homolog of NCBI NO: 15241758 NR Description: embryo-specific protein - like; protein id: supported by cDNA: 28168. [Arabidopsis thaliana]
  misc_feature (1)..(52): Homolog of NCBI NO: 26450767 NR Description: embryo-specific protein like [Arabidopsis
  misc_feature (83)..(207): Homolog of NCBI NO: 15227352 NR Description: unknown protein; protein id: At2g41440.1
  misc_feature (1)..(59): Homolog of NCBI NO: 3335171 NR Description: embryo-specific protein 3 [Arabidopsis thaliana]
  misc_feature (1)..(59): Homolog of NCBI NO: 13877521 NR Description: embryo-specific protein 3; ATS3 [Arabidopsis
  misc_feature (1)..(59): Homolog of NCBI NO: 15240721 NR Description: embryo-specific protein 3 (ATS3); protein id: supported by cDNA: gi_13877520, supported by cDNA: gi_17978804
MRDVCYLYLLRQGSDGWKPENVKIYGSSIRSVTFYYNLFLPNSVWYGFNVCNGIGNTKSSQPISTTSSVAAINLRRFHNSYQRKSMPETSSFNIHKRWDKKKHIYSHIGFIEELANRFEEEDVQLLRVLQQQLREKVERLRFLIKRMTGKDDDAHFTELQALESRLKDVSRTVLDQKEKMIKLEEDERKKEAQNESDGTRRGVLVPCNRRMNGRELEGMSSRDLLSLDNQILNALLGLLVQMNRPREEQVAARQREKV

SEQ ID NO: 71613 - DNA, 2646 bp, Arabidopsis thaliana
  misc_feature (1)..(2646): Ceres Seq. ID no. 4630411
  misc_feature: MA Experiment ID: 20000348 Result: Up-regulated in Transcription
  misc_feature: MA Experiment 20000348 PARAMETER Experiment Name: At_100uM_ABA_Sub_P Parameter: Age (day) Value: 14
  misc_feature: MA Experiment 20000348 PARAMETER Experiment Name: At_100uM_ABA_Sub_P Parameter: Organism Value: A. thaliana
  misc_feature: MA Experiment 20000348 PARAMETER Experiment Name: At_100uM_ABA_Sub_P Parameter: Plant Line Value: WS
  misc_feature: MA Experiment 20000348 PARAMETER Experiment Name: At_100uM_ABA_Sub_P Parameter: Timepoint (hr) Value: 1
  misc_feature: MA Experiment 20000348 PARAMETER Experiment Name: At_100uM_ABA_Sub_P Parameter: Tissue Value: Aerial
  misc_feature: MA Experiment 20000348 PARAMETER Experiment Name: At_100uM_ABA_Sub_P Parameter: Treatment Value: 100uM ABA vs. No Treatment
  misc_feature: MA Experiment ID: 20000440 Result: Up-regulated in Transcription
  misc_feature: MA Experiment 20000440 PARAMETER Experiment Name: At_Closed-Flower__Sub_P Parameter: Tissue Value: Closed Flower vs. Whole Plant
  misc_feature: MA Experiment ID: 20001807 Result: Down-regulated in Transcription
  misc_feature: MA Experiment 20001807 PARAMETER Experiment Name: At_50mM_NH4NO3_L-to-H_Sub_P Parameter: Timepoint (hr) Value: 6
  misc_feature: MA Experiment 20001807 PARAMETER Experiment Name: At_50mM_NH4NO3_L-to-H_Sub_P Parameter: Tissue Value: Leaf
  misc_feature: MA Experiment 20001807 PARAMETER Experiment Name: At_50mM_NH4NO3_L-to-H_Sub_P Parameter: Treatment Value: 50mM NH4NO3 vs 100mM Mannitol
atggcggctgtcgattcaactgatcggcgggacttcatagtgaacatcaacggccaagagagtggagccgtcggtgctacagggtcaagcagcaatgctgagggaggtaatatttggaaagagtcaagctatgacttttgggatggtgaaaagggtaagaatgataagaaaggagacgacgaagacgaagacggcggcagtttccatttcaggcagcggggagagcggaggcattcgtcagctgagttatctgatccgccgtcgaagctaattggtcagtttcttcacaagcagagagcttcaggagatgagatctctttagatgttgagcttaacatggcagagctacagagcaacacgccgccacgtcctgcaactgctagcaacacgccgcgacgtggcttaacgacgatttctgaatcttcttctccggttaagactaaagttaaagcagacgcagtaagacggaggcagaacagaacatcgctaggtggaagtagcgacgaggaaggtcgaaacagagacgaagcagaggttttgaagtgtggttcgaagaaaccgatgttgagtaggaacaagaccaaatcaagattgcaggatcctccaacaccgacacatccagcgattgacaagacagagatgaagtctggtcggagatccgggatttttaaatctgggtttcttgggaaaagccctaaagcgggtactccgggtcggaatgggtttgaggaagaagaagaggaggatccgtttctagacgaggatttaccggaggaattcaaaagggacaaacttagcttctgggttttccttgaatggataagtctagttctgatagtcacaagtttggtctgtagcttaaccatacataacttgcaacgcaagacatggtggaagctggatttgtggaaatgggaagtgactgttttggtgttgatatgtgggagattagtctcgagttggatagtgagaatcattgtcttcttggtcgagaaaaacttcacttggaggaaaagggttttgtatttcgtctacggagtgagaaaatctgttcaaaactgcttgtggttagggctagtgttgctcgcgtggcatttcttgttcgataagaaagtcgaaagagagactcggagcactgctcttcggtatgtgacgagagtgttggtatgtttgcttgtggctcttatcatttggttggttaaaacaattctggttaaagttttggcttcatcgttccacatgagcacttactttgatcggattcaggagtcgttgttcactcaatacgtgattgaaactctctccggtcctcctttgatggagattcagagaatggaggaagaagagcaacaagtagcagaagatgttaagagcttagagaaattagccggagctaagctgcctccagctctaaaagcgaccgtcaagagttttatgaaagtcgggaaaagtccgggactgaatcggattggttctaagagaggagaagatggcgaagggattaggattgatcagttgaagagaatgaacacaaagaatgtgtctgcttggaacatgaagagattgatgaatataatactaaaaggcgctatttctactttggatcaaaatatgcaggacactactcaggaggatgaggacgctacgcatataagaagcgagtacgaagctaaatgcgcagctaggaagatttttcacaacgtcaccgagccaggttctaggtacatatatttggaagacttcttgcgttttctatgtgaagaggaggctgaaagagccatggctctctttgaaggagcttcagagagcgataagatcagcaagtcttgcctcaagaattgggtggttaaggcgtttagagaaaggagagctctggctttgaccttaaacgatacaaaaacagcagtggacagacttcaccgtataatcaacgtggtaattggcattataatcataatcatctggcttcttatactaggaatcgccacaaccagattcttgctagtcttaagctctcagctccttctagtagcctttgtatttggaaactcctgcaaaaccatcttcgaagccatcattttcctttttgttatgcacccatttgatgtcggtgaccgatgtgaaatcgacggtgttcagttggtagtggaggagatgaacatattgacgactgttttcttgcgatatgataatcaaaagatcatatatccgaatagtgtcctcggcacaaaacctatagctaactattaccgaagtcccgatatgggagacgcggttgaattctgtgttcatatagcaactcctcctgaaaagatcactgccattaaacagagaatactaagttacgtagacaacaagaaggattattggtatcctgcacctatgattgtgttcctaagcatggatgacttgaatagtgtgaagatagcggtgtggttgacacatagaatgaatcatcaagacatgggagagaggtatataagaagaggtctattactagaggaagtgggaaaaacttgtagagagctagatatcgagtatcgcttatatcctcttaacattaatgttcgaagtctccctcctacggctaatccaacttcttcagaccgcattcctccttcatggatgcaacaacgcggtccttga

SEQ ID NO: 71614 - protein, 881 aa, Arabidopsis thaliana
  peptide (1)..(881): Ceres Seq. ID no. 4630412
  misc_feature (640)..(848): Pfam Name: Mechanosensitive ion channel Pfam Description: Mechanosensitive ion channel
  misc_feature (3)..(879): Homolog of NCBI NO: 15220793 NR Description: hypothetical protein; protein id: At1g53470.1
  misc_feature (133)..(875): Homolog of NCBI NO: 15218429 NR Description: hypothetical protein; protein id: At1g78610.1
  misc_feature (103)..(877): Homolog of NCBI NO: 15227342 NR Description: hypothetical protein; protein id: At2g17000.1
  misc_feature (14)..(876): Homolog of NCBI NO: 38345847 NR Description: OSJNBa0084K11.11 [Oryza sativa (japonica
  misc_feature (30)..(419): Homolog of NCBI NO: 30679840 NR Description: expressed protein [Arabidopsis thaliana]
  misc_feature (579)..(879): Homolog of NCBI NO: 30679840 NR Description: expressed protein [Arabidopsis thaliana]
  misc_feature (459)..(865): Homolog of NCBI NO: 18390104 NR Description: putative protein T30F21.6 [Sorghum bicolor]
  misc_feature (193)..(442): Homolog of NCBI NO: 18390104 NR Description: putative protein T30F21.6 [Sorghum bicolor]
  misc_feature (554)..(879): Homolog of NCBI NO: 12324039 NR Description: unknown protein, 5' partial; 111936-110607
  misc_feature (459)..(856): Homolog of NCBI NO: 15239769 NR Description: putative protein; protein id: At5g19520.1
MAAVDSTDRRDFIVNINGQESGAVGATGSSSNAEGGNIWKESSYDFWDGEKGKNDKKGDDEDEDGGSFHFRQRGERRHSSAELSDPPSKLIGQFLHKQRASGDEISLDVELNMAELQSNTPPRPATASNTPRRGLTTISESSSPVKTKVKADAVRRRQNRTSLGGSSDEEGRNRDEAEVLKCGSKKPMLSRNKTKSRLQDPPTPTHPAIDKTEMKSGRRSGIFKSGFLGKSPKAGTPGRNGFEEEEEEDPFLDEDLPEEFKRDKLSFWVFLEWISLVLIVTSLVCSLTIHNLQRKTWWKLDLWKWEVTVLVLICGRLVSSWIVRIIVFLVEKNFTWRKRVLYFVYGVRKSVQNCLWLGLVLLAWHFLFDKKVERETRSTALRYVTRVLVCLLVALIIWLVKTILVKVLASSFHMSTYFDRIQESLFTQYVIETLSGPPLMEIQRMEEEEQQVAEDVKSLEKLAGAKLPPALKATVKSFMKVGKSPGLNRIGSKRGEDGEGIRIDQLKRMNTKNVSAWNMKRLMNIILKGAISTLDQNMQDTTQEDEDATHIRSEYEAKCAARKIFHNVTEPGSRYIYLEDFLRFLCEEEAERAMALFEGASESDKISKSCLKNWVVKAFRERRALALTLNDTKTAVDRLHRIINVVIGIIIIIIWLLILGIATTRFLLVLSSQLLLVAFVFGNSCKTIFEAIIFLFVMHPFDVGDRCEIDGVQLVVEEMNILTTVFLRYDNQKIIYPNSVLGTKPIANYYRSPDMGDAVEFCVHIATPPEKITAIKQRILSYVDNKKDYWYPAPMIVFLSMDDLNSVKIAVWLTHRMNHQDMGERYIRRGLLLEEVGKTCRELDIEYRLYPLNINVRSLPPTANPTSSDRIPPSWMQQRGP

SEQ ID NO: 71615 - protein, 769 aa, Arabidopsis thaliana
  peptide (1)..(769): Ceres Seq. ID no. 4630413
  misc_feature (528)..(736): Pfam Name: Mechanosensitive ion channel Pfam Description: Mechanosensitive ion channel
  misc_feature (1)..(767): Homolog of NCBI NO: 15220793 NR Description: hypothetical protein; protein id: At1g53470.1
  misc_feature (21)..(763): Homolog of NCBI NO: 15218429 NR Description: hypothetical protein; protein id: At1g78610.1
  misc_feature (1)..(765): Homolog of NCBI NO: 15227342 NR Description: hypothetical protein; protein id: At2g17000.1
  misc_feature (1)..(764): Homolog of NCBI NO: 38345847 NR Description: OSJNBa0084K11.11 [Oryza sativa (japonica
  misc_feature (1)..(307): Homolog of NCBI NO: 30679840 NR Description: expressed protein [Arabidopsis thaliana]
  misc_feature (467)..(767): Homolog of NCBI NO: 30679840 NR Description: expressed protein [Arabidopsis thaliana]
  misc_feature (347)..(753): Homolog of NCBI NO: 18390104 NR Description: putative protein T30F21.6 [Sorghum bicolor]
  misc_feature (81)..(330): Homolog of NCBI NO: 18390104 NR Description: putative protein T30F21.6 [Sorghum bicolor]
  misc_feature (442)..(767): Homolog of NCBI NO: 12324039 NR Description: unknown protein, 5' partial; 111936-110607
  misc_feature (347)..(744): Homolog of NCBI NO: 15239769 NR Description: putative protein; protein id: At5g19520.1
MAELQSNTPPRPATASNTPRRGLTTISESSSPVKTKVKADAVRRRQNRTSLGGSSDEEGRNRDEAEVLKCGSKKPMLSRNKTKSRLQDPPTPTHPAIDKTEMKSGRRSGIFKSGFLGKSPKAGTPGRNGFEEEEEEDPFLDEDLPEEFKRDKLSFWVFLEWISLVLIVTSLVCSLTIHNLQRKTWWKLDLWKWEVTVLVLICGRLVSSWIVRIIVFLVEKNFTWRKRVLYFVYGVRKSVQNCLWLGLVLLAWHFLFDKKVERETRSTALRYVTRVLVCLLVALIIWLVKTILVKVLASSFHMSTYFDRIQESLFTQYVIETLSGPPLMEIQRMEEEEQQVAEDVKSLEKLAGAKLPPALKATVKSFMKVGKSPGLNRIGSKRGEDGEGIRIDQLKRMNTKNVSAWNMKRLMNIILKGAISTLDQNMQDTTQEDEDATHIRSEYEAKCAARKIFHNVTEPGSRYIYLEDFLRFLCEEEAERAMALFEGASESDKISKSCLKNWVVKAFRERRALALTLNDTKTAVDRLHRIINVVIGIIIIIIWLLILGIATTRFLLVLSSQLLLVAFVFGNSCKTIFEAIIFLFVMHPFDVGDRCEIDGVQLVVEEMNILTTVFLRYDNQKIIYPNSVLGTKPIANYYRSPDMGDAVEFCVHIATPPEKITAIKQRILSYVDNKKDYWYPAPMIVFLSMDDLNSVKIAVWLTHRMNHQDMGERYIRRGLLLEEVGKTCRELDIEYRLYPLNINVRSLPPTANPTSSDRIPPSWMQQRGP

SEQ ID NO: 71616 - protein, 694 aa, Arabidopsis thaliana
  peptide (1)..(694): Ceres Seq. ID no. 4630414
  misc_feature (453)..(661): Pfam Name: Mechanosensitive ion channel Pfam Description: Mechanosensitive ion channel
  misc_feature (1)..(692): Homolog of NCBI NO: 15220793 NR Description: hypothetical protein; protein id: At1g53470.1
  misc_feature (1)..(688): Homolog of NCBI NO: 15218429 NR Description: hypothetical protein; protein id: At1g78610.1
  misc_feature (1)..(690): Homolog of NCBI NO: 15227342 NR Description: hypothetical protein; protein id: At2g17000.1
  misc_feature (1)..(689): Homolog of NCBI NO: 38345847 NR Description: OSJNBa0084K11.11 [Oryza sativa (japonica
  misc_feature (1)..(232): Homolog of NCBI NO: 30679840 NR Description: expressed protein [Arabidopsis thaliana]
  misc_feature (392)..(692): Homolog of NCBI NO: 30679840 NR Description: expressed protein [Arabidopsis thaliana]
  misc_feature (272)..(678): Homolog of NCBI NO: 18390104 NR Description: putative protein T30F21.6 [Sorghum bicolor]
  misc_feature (6)..(255): Homolog of NCBI NO: 18390104 NR Description: putative protein T30F21.6 [Sorghum bicolor]
  misc_feature (367)..(692): Homolog of NCBI NO: 12324039 NR Description: unknown protein, 5' partial; 111936-110607
  misc_feature (272)..(669): Homolog of NCBI NO: 15239769 NR Description: putative protein; protein id: At5g19520.1
MLSRNKTKSRLQDPPTPTHPAIDKTEMKSGRRSGIFKSGFLGKSPKAGTPGRNGFEEEEEEDPFLDEDLPEEFKRDKLSFWVFLEWISLVLIVTSLVCSLTIHNLQRKTWWKLDLWKWEVTVLVLICGRLVSSWIVRIIVFLVEKNFTWRKRVLYFVYGVRKSVQNCLWLGLVLLAWHFLFDKKVERETRSTALRYVTRVLVCLLVALIIWLVKTILVKVLASSFHMSTYFDRIQESLFTQYVIETLSGPPLMEIQRMEEEEQQVAEDVKSLEKLAGAKLPPALKATVKSFMKVGKSPGLNRIGSKRGEDGEGIRIDQLKRMNTKNVSAWNMKRLMNIILKGAISTLDQNMQDTTQEDEDATHIRSEYEAKCAARKIFHNVTEPGSRYIYLEDFLRFLCEEEAERAMALFEGASESDKISKSCLKNWVVKAFRERRALALTLNDTKTAVDRLHRIINVVIGIIIIIIWLLILGIATTRFLLVLSSQLLLVAFVFGNSCKTIFEAIIFLFVMHPFDVGDRCEIDGVQLVVEEMNILTTVFLRYDNQKIIYPNSVLGTKPIANYYRSPDMGDAVEFCVHIATPPEKITAIKQRILSYVDNKKDYWYPAPMIVFLSMDDLNSVKIAVWLTHRMNHQDMGERYIRRGLLLEEVGKTCRELDIEYRLYPLNINVRSLPPTANPTSSDRIPPSWMQQRGP

SEQ ID NO: 71617 - DNA, 1515 bp, Arabidopsis thaliana
  misc_feature (1)..(1515): Ceres Seq. ID no. 4774563
  misc_feature: MA Experiment ID: 20000173 Result: Up-regulated in Transcription
  misc_feature: MA Experiment 20000173 PARAMETER Experiment Name: At_42deg_Heat_P Parameter: Age (day) Value: 14
  misc_feature: MA Experiment 20000173 PARAMETER Experiment Name: At_42deg_Heat_P Parameter: Organism Value: A. thaliana
  misc_feature: MA Experiment 20000173 PARAMETER Experiment Name: At_42deg_Heat_P Parameter: Plant Line Value: WS
  misc_feature: MA Experiment 20000173 PARAMETER Experiment Name: At_42deg_Heat_P Parameter: Temperature (deg C) Value: 42 vs. 22
  misc_feature: MA Experiment 20000173 PARAMETER Experiment Name: At_42deg_Heat_P Parameter: Timepoint (hr) Value: 6
  misc_feature: MA Experiment 20000173 PARAMETER Experiment Name: At_42deg_Heat_P Parameter: Tissue Value: Aerial
  misc_feature: MA Experiment ID: 20000184 Result: Down-regulated in Transcription
  misc_feature: MA Experiment 20000184 PARAMETER Experiment Name: At_Shoots__P Parameter: Age (day) Value: 7
  misc_feature: MA Experiment 20000184 PARAMETER Experiment Name: At_Shoots__P Parameter: Tissue Value: Shoots vs. Whole Plant
atgtcgacggtgtacgtgctagagccgccgacaaagggaaaggtcattgtaaatactactcatggtccaatcgacgtcgagctttggcctaaggaagcgcccaaatccgtacggaacttcgttcaactatgcctcgagggttactttgacaacaccatcttccatcgtgtcattcccggttttctcgttcaaggcggcgatcccaccggctccggaaccggtggagatagtatatatggaggtgtctttgccgatgagttccattcaaggctgagatttagccaccgtgggattgttgccatggctaatgcgagctcacctaattctaatggaagtcagttctttttcactttggataagtgtgattggcttgataagaagcacactatctttggcaaggtaacgggcgattcaatctacaatcttttaagactaggagaggttgacacgagtaaggatgatcgacctctggatcctgctccgaaaatattatctgtcgaggttttgtggaacccttttgaagatattgttcctagagtgttagcaaagacatcagaagaatctgctgctgaaatcaaggaacccccaacaaagcccgtgaagaaattgaatttactgtcattcggagaagaagctgaagaagaggaaaaggaactggctgttgtaaagcaaaagattaagagcagtcatgacgtattgaatgatcctcgacttttgaaggcagaagcttcagataaagagaggaacgcatctgagtccaaggaggtactatctgtgcgagaagctctgaatgctaagaaagaagcggctcaaaaagataaaagcttttctgtatctgatacagttggaaatagtgatgatgacgatgatggtgaagatgagactaaatttgatgcaaagatgaggaatcaagtgctcagcagaaggaaggagattggagatacgccttcaaagccgactcagaaaaaaaagagctctagcctgaaaggccgtgaagagtctacgcaaaggtctgatgctgtaagtagtgaagatgagaaaccaaggatggaaaagttgtccttgaagaaaaaaggaataggctcagaagccaaagccgaacatatggagaaaggagacactgatttacagctttacaacgcttctgaacgcgcccggcagttgcataagttgaaaaagcgcagactgcaaggaaatgaggattctgtgttagcaaaactcgagaagtttaagcagtctatctctgcaaaaccgtttacctcgagtaatgaaccagtagtgttgacctcgagtagtgaaccagttgacaataaagaagaagatctctctgattggaagaatgtaaagctcaagtttgctcctgagcgtggcaaggataaaatgtcacgcagggatgatccagatgcgtatatggtggttgaccctcttcttgaaaagggaaaagagaagttcaacagaatgcaagccaaacaaaaacgaagggagcgagaatggtctggaaaatctcttgcctga

SEQ ID NO: 71618 - protein, 504 aa, Arabidopsis thaliana
  peptide (1)..(504): Ceres Seq. ID no. 4774564
  misc_feature (210)..(497): Pfam Name: Caldesmon Pfam Description: Caldesmon
  misc_feature (1)..(504): Homolog of NCBI NO: 30689591 NR Description: expressed protein [Arabidopsis thaliana]
  misc_feature (1)..(403): Homolog of NCBI NO: 7486212 NR Description: hypothetical protein F26P21.180 - Arabidopsis >gi|3688187|emb|CAA21215.1| putative protein [Arabidopsis >gi|7270253|emb|CAB80023.1| putative protein [Arabidopsis
  misc_feature (1)..(503): Homolog of NCBI NO: 21902020 NR Description: B1097D05.21 [Oryza sativa (japonica
  misc_feature (1)..(365): Homolog of NCBI NO: 29436797 NR Description: Unknown (protein for MGC:56702) [Danio rerio]
  misc_feature (1)..(495): Homolog of NCBI NO: 21357249 NR Description: CG10907-PA [Drosophila melanogaster]
  misc_feature (1)..(492): Homolog of NCBI NO: 31198449 NR Description: ENSANGP00000020743 [Anopheles gambiae]
  misc_feature (1)..(483): Homolog of NCBI NO: 39591493 NR Description: Hypothetical protein CBG21016 [Caenorhabditis
  misc_feature (1)..(221): Homolog of NCBI NO: 27516689 NR Description: cyclophilin-16; OvCYP-16 [Onchocerca volvulus]
  misc_feature (1)..(221): Homolog of NCBI NO: 7509444 NR Description: peptidylprolyl isomerase (EC 5.2.1.8) Y17G7B.9
  misc_feature (79)..(498): Homolog of NCBI NO: 32418162 NR Description: hypothetical protein [Neurospora crassa]
MSTVYVLEPPTKGKVIVNTTHGPIDVELWPKEAPKSVRNFVQLCLEGYFDNTIFHRVIPGFLVQGGDPTGSGTGGDSIYGGVFADEFHSRLRFSHRGIVAMANASSPNSNGSQFFFTLDKCDWLDKKHTIFGKVTGDSIYNLLRLGEVDTSKDDRPLDPAPKILSVEVLWNPFEDIVPRVLAKTSEESAAEIKEPPTKPVKKLNLLSFGEEAEEEEKELAVVKQKIKSSHDVLNDPRLLKAEASDKERNASESKEVLSVREALNAKKEAAQKDKSFSVSDTVGNSDDDDDGEDETKFDAKMRNQVLSRRKEIGDTPSKPTQKKKSSSLKGREESTQRSDAVSSEDEKPRMEKLSLKKKGIGSEAKAEHMEKGDTDLQLYNASERARQLHKLKKRRLQGNEDSVLAKLEKFKQSISAKPFTSSNEPVVLTSSSEPVDNKEEDLSDWKNVKLKFAPERGKDKMSRRDDPDAYMVVDPLLEKGKEKFNRMQAKQKRREREWSGKSLA

SEQ ID NO: 71619 - protein, 404 aa, Arabidopsis thaliana
  peptide (1)..(404): Ceres Seq. ID no. 4774565
  misc_feature (110)..(397): Pfam Name: Caldesmon Pfam Description: Caldesmon
  misc_feature (1)..(404): Homolog of NCBI NO: 30689591 NR Description: expressed protein [Arabidopsis thaliana]
  misc_feature (1)..(303): Homolog of NCBI NO: 7486212 NR Description: hypothetical protein F26P21.180 - Arabidopsis >gi|3688187|emb|CAA21215.1| putative protein [Arabidopsis >gi|7270253|emb|CAB80023.1| putative protein [Arabidopsis
  misc_feature (1)..(403): Homolog of NCBI NO: 21902020 NR Description: B1097D05.21 [Oryza sativa (japonica
  misc_feature (1)..(265): Homolog of NCBI NO: 29436797 NR Description: Unknown (protein for MGC:56702) [Danio rerio]
  misc_feature (1)..(395): Homolog of NCBI NO: 21357249 NR Description: CG10907-PA [Drosophila melanogaster]
  misc_feature (1)..(392): Homolog of NCBI NO: 31198449 NR Description: ENSANGP00000020743 [Anopheles gambiae]
  misc_feature (1)..(383): Homolog of NCBI NO: 39591493 NR Description: Hypothetical protein CBG21016 [Caenorhabditis
  misc_feature (1)..(121): Homolog of NCBI NO: 27516689 NR Description: cyclophilin-16; OvCYP-16 [Onchocerca volvulus]
  misc_feature (1)..(121): Homolog of NCBI NO: 7509444 NR Description: peptidylprolyl isomerase (EC 5.2.1.8) Y17G7B.9
  misc_feature (1)..(398): Homolog of NCBI NO: 32418162 NR Description: hypothetical protein [Neurospora crassa]
MANASSPNSNGSQFFFTLDKCDWLDKKHTIFGKVTGDSIYNLLRLGEVDTSKDDRPLDPAPKILSVEVLWNPFEDIVPRVLAKTSEESAAEIKEPPTKPVKKLNLLSFGEEAEEEEKELAVVKQKIKSSHDVLNDPRLLKAEASDKERNASESKEVLSVREALNAKKEAAQKDKSFSVSDTVGNSDDDDDGEDETKFDAKMRNQVLSRRKEIGDTPSKPTQKKKSSSLKGREESTQRSDAVSSEDEKPRMEKLSLKKKGIGSEAKAEHMEKGDTDLQLYNASERARQLHKLKKRRLQGNEDSVLAKLEKFKQSISAKPFTSSNEPVVLTSSSEPVDNKEEDLSDWKNVKLKFAPERGKDKMSRRDDPDAYMVVDPLLEKGKEKFNRMQAKQKRREREWSGKSLA

SEQ ID NO: 71620 - DNA, 1686 bp, Arabidopsis thaliana
  misc_feature (1)..(1686): Ceres Seq. ID no. 4802897
  misc_feature: MA Experiment ID: 20000227 Result: Up-regulated in Transcription
  misc_feature: MA Experiment 20000227 PARAMETER Experiment Name: At_Root-Tips-vs-Tops_P Parameter: Tissue Value: Root Tips vs. Root Tops
atgaaactggaagacttacttgtggaagacgaaaccaaagatcaacctggcgctagcgttgcgtctcttcttgatcatcatcgtcgtcacccccagccttcccttcaacaacaaccatcaaaagtgaatgagcataagagcgaagaagagaagaatgatttgatcaagaagaagcaaaagcgaagtcttcaaagagaagtgatgaaaatgcaaggagagctagaggacgaacaagccttaaacaaggctctacgtgatatgcatcgtggtcccgtcatgtctcagcctcgtctctctttattgcttcttcctcctcaggttcaagagctaatagaggagcttgcgacggttgaggcagagatactctgtcttgagaaacgaatccaagacttgaaacttgatgtgtatagtgagaaaaaagagaacaaagaacttgaagacagtattgatgaaggagaagaagagaggatgatgaaccctaagagactactacaaaggcagaatcatcttccttgcgacgctgacaatgaccttataaagatgagatctgaggatctaaaacagagatcaaagtcccagagttatggagatcatcatgttgtcaaggatattcaaatgaacagtccacgtactcatgcgtcaattggatcaaccatggagttctcatcaagaatccattcttcgactttttctgatggaatgtcaagaacacaagagaagaataatgtgcaagagacgacaccaaatggagtatcggaagatctggtgaagtgcttgatgggaatctatctggaactcaacaggtcatcgcgtgagcgagaagggtcaaaaactgtttcaaagctgagcctcacacacctcaagaacgcttctttcaaacgcaaatcggtgtatgaccataacgcatctaatcttgatccatatggagctgtcatggggacttctcttagagacataggagaatacaagaacttcatccatatcactcgaacctccattgatgttagccgtttatccgattgctccacttctcttgtcaatttgagggttttgaaggagaagttgagcaaagtggatttgagtttcttgaaccacaagaaaaagatggcattctggatcaatacctacaacgcctgcgttatgaatggatttttggaacacggactaccttcatcaaaggaaaaactgctgaccattctcaaaatggcaacaattgacgtgggaggtacacaactgtctgctctagatatcgaaggatccatcttgcagagtccatgcgaacctagggaatctcgaagtgagaatacagacacgctacggattcagatgcgtagagccaaacctaatgttcgtgctttgtcgtggagattggtcttcacctgcacagaagatgtggtgaacgaactaatcaaagcaagaacagagtatctagaagcttccatcggtgtctcgggaaggaaaaagattgtgattccgcgattcttgcataaacgtctacgggatttcgctgaggatgaaggctcgttaattgaatggatatgcagccaattaccaccagcccaacgttgctttcagctcaaggaaacagcgatggaggggttgaacaagaaaagtgaatctcaattgaaaaaactgatagaagtgaggtctcacgaatacgagtttcgttatctcttggcattgtaa

SEQ ID NO: 71621 - protein, 561 aa, Arabidopsis thaliana
  peptide (1)..(561): Ceres Seq. ID no. 4802898
  misc_feature (349)..(477): Pfam Name: Protein of unknown function, DUF547 Pfam Description: Protein of unknown function, DUF547
  misc_feature (1)..(561): Homolog of NCBI NO: 15230524 NR Description: hypothetical protein; protein id: At3g12540.1
  misc_feature (1)..(561): Homolog of NCBI NO: 9294368 NR Description: gb|AAB97123.1~gene_id:T16H11.2~similar to unknown
  misc_feature (109)..(561): Homolog of NCBI NO: 15225527 NR Description: hypothetical protein; protein id: At2g39690.1
  misc_feature (53)..(561): Homolog of NCBI NO: 34895788 NR Description: P0434B04.9 [Oryza sativa (japonica
  misc_feature (282)..(561): Homolog of NCBI NO: 15239037 NR Description: putative protein; protein id: At5g42690.1 thaliana] >gi|10177272|dbj|BAB10625.1|
  misc_feature (62)..(271): Homolog of NCBI NO: 15239037 NR Description: putative protein; protein id: At5g42690.1 thaliana] >gi|10177272|dbj|BAB10625.1|
  misc_feature (293)..(561): Homolog of NCBI NO: 31193902 NR Description: unknown protein [Oryza sativa (japonica
  misc_feature (16)..(271): Homolog of NCBI NO: 31193902 NR Description: unknown protein [Oryza sativa (japonica
  misc_feature (305)..(559): Homolog of NCBI NO: 25407787 NR Description: hypothetical protein AT4g37080 [imported] - thaliana >gi|4006868|emb|CAB16786.1| putative protein thaliana] >gi|7270657|emb|CAB80374.1| putative protein
  misc_feature (305)..(559): Homolog of NCBI NO: 30690854 NR Description: expressed protein [Arabidopsis thaliana] AT4g37080/C7A10_280 [Arabidopsis thaliana]
MKLEDLLVEDETKDQPGASVASLLDHHRRHPQPSLQQQPSKVNEHKSEEEKNDLIKKKQKRSLQREVMKMQGELEDEQALNKALRDMHRGPVMSQPRLSLLLLPPQVQELIEELATVEAEILCLEKRIQDLKLDVYSEKKENKELEDSIDEGEEERMMNPKRLLQRQNHLPCDADNDLIKMRSEDLKQRSKSQSYGDHHVVKDIQMNSPRTHASIGSTMEFSSRIHSSTFSDGMSRTQEKNNVQETTPNGVSEDLVKCLMGIYLELNRSSREREGSKTVSKLSLTHLKNASFKRKSVYDHNASNLDPYGAVMGTSLRDIGEYKNFIHITRTSIDVSRLSDCSTSLVNLRVLKEKLSKVDLSFLNHKKKMAFWINTYNACVMNGFLEHGLPSSKEKLLTILKMATIDVGGTQLSALDIEGSILQSPCEPRESRSENTDTLRIQMRRAKPNVRALSWRLVFTCTEDVVNELIKARTEYLEASIGVSGRKKIVIPRFLHKRLRDFAEDEGSLIEWICSQLPPAQRCFQLKETAMEGLNKKSESQLKKLIEVRSHEYEFRYLLAL

SEQ ID NO: 71622 - protein, 494 aa, Arabidopsis thaliana
  peptide (1)..(494): Ceres Seq. ID no. 4802899
  misc_feature (282)..(410): Pfam Name: Protein of unknown function, DUF547 Pfam Description: Protein of unknown function, DUF547
  misc_feature (1)..(494): Homolog of NCBI NO: 15230524 NR Description: hypothetical protein; protein id: At3g12540.1
  misc_feature (1)..(494): Homolog of NCBI NO: 9294368 NR Description: gb|AAB97123.1~gene_id:T16H11.2~similar to unknown
  misc_feature (42)..(494): Homolog of NCBI NO: 15225527 NR Description: hypothetical protein; protein id: At2g39690.1
  misc_feature (1)..(494): Homolog of NCBI NO: 34895788 NR Description: P0434B04.9 [Oryza sativa (japonica
  misc_feature (215)..(494): Homolog of NCBI NO: 15239037 NR Description: putative protein; protein id: At5g42690.1 thaliana] >gi|10177272|dbj|BAB10625.1|
  misc_feature (1)..(204): Homolog of NCBI NO: 15239037 NR Description: putative protein; protein id: At5g42690.1 thaliana] >gi|10177272|dbj|BAB10625.1|
  misc_feature (226)..(494): Homolog of NCBI NO: 31193902 NR Description: unknown protein [Oryza sativa (japonica
  misc_feature (1)..(204): Homolog of NCBI NO: 31193902 NR Description: unknown protein [Oryza sativa (japonica
  misc_feature (238)..(492): Homolog of NCBI NO: 25407787 NR Description: hypothetical protein AT4g37080 [imported] - thaliana >gi|4006868|emb|CAB16786.1| putative protein thaliana] >gi|7270657|emb|CAB80374.1| putative protein
  misc_feature (238)..(492): Homolog of NCBI NO: 30690854 NR Description: expressed protein [Arabidopsis thaliana] AT4g37080/C7A10_280 [Arabidopsis thaliana]
MKMQGELEDEQALNKALRDMHRGPVMSQPRLSLLLLPPQVQELIEELATVEAEILCLEKRIQDLKLDVYSEKKENKELEDSIDEGEEERMMNPKRLLQRQNHLPCDADNDLIKMRSEDLKQRSKSQSYGDHHVVKDIQMNSPRTHASIGSTMEFSSRIHSSTFSDGMSRTQEKNNVQETTPNGVSEDLVKCLMGIYLELNRSSREREGSKTVSKLSLTHLKNASFKRKSVYDHNASNLDPYGAVMGTSLRDIGEYKNFIHITRTSIDVSRLSDCSTSLVNLRVLKEKLSKVDLSFLNHKKKMAFWINTYNACVMNGFLEHGLPSSKEKLLTILKMATIDVGGTQLSALDIEGSILQSPCEPRESRSENTDTLRIQMRRAKPNVRALSWRLVFTCTEDVVNELIKARTEYLEASIGVSGRKKIVIPRFLHKRLRDFAEDEGSLIEWICSQLPPAQRCFQLKETAMEGLNKKSESQLKKLIEVRSHEYEFRYLLAL

SEQ ID NO: 71623 - protein, 492 aa, Arabidopsis thaliana
  peptide (1)..(492): Ceres Seq. ID no. 4802900
  misc_feature (280)..(408): Pfam Name: Protein of unknown function, DUF547 Pfam Description: Protein of unknown function, DUF547
  misc_feature (1)..(492): Homolog of NCBI NO: 15230524 NR Description: hypothetical protein; protein id: At3g12540.1
  misc_feature (1)..(492): Homolog of NCBI NO: 9294368 NR Description: gb|AAB97123.1~gene_id:T16H11.2~similar to unknown
  misc_feature (40)..(492): Homolog of NCBI NO: 15225527 NR Description: hypothetical protein; protein id: At2g39690.1
  misc_feature (1)..(492): Homolog of NCBI NO: 34895788 NR Description: P0434B04.9 [Oryza sativa (japonica
  misc_feature (213)..(492): Homolog of NCBI NO: 15239037 NR Description: putative protein; protein id: At5g42690.1 thaliana] >gi|10177272|dbj|BAB10625.1|
  misc_feature (1)..(202): Homolog of NCBI NO: 15239037 NR Description: putative protein; protein id: At5g42690.1 thaliana] >gi|10177272|dbj|BAB10625.1|
  misc_feature (224)..(492): Homolog of NCBI NO: 31193902 NR Description: unknown protein [Oryza sativa (japonica
  misc_feature (1)..(202): Homolog of NCBI NO: 31193902 NR Description: unknown protein [Oryza sativa (japonica
  misc_feature (236)..(490): Homolog of NCBI NO: 25407787 NR Description: hypothetical protein AT4g37080 [imported] - thaliana >gi|4006868|emb|CAB16786.1| putative protein thaliana] >gi|7270657|emb|CAB80374.1| putative protein
  misc_feature (236)..(490): Homolog of NCBI NO: 30690854 NR Description: expressed protein [Arabidopsis thaliana] AT4g37080/C7A10_280 [Arabidopsis thaliana]
MQGELEDEQALNKALRDMHRGPVMSQPRLSLLLLPPQVQELIEELATVEAEILCLEKRIQDLKLDVYSEKKENKELEDSIDEGEEERMMNPKRLLQRQNHLPCDADNDLIKMRSEDLKQRSKSQSYGDHHVVKDIQMNSPRTHASIGSTMEFSSRIHSSTFSDGMSRTQEKNNVQETTPNGVSEDLVKCLMGIYLELNRSSREREGSKTVSKLSLTHLKNASFKRKSVYDHNASNLDPYGAVMGTSLRDIGEYKNFIHITRTSIDVSRLSDCSTSLVNLRVLKEKLSKVDLSFLNHKKKMAFWINTYNACVMNGFLEHGLPSSKEKLLTILKMATIDVGGTQLSALDIEGSILQSPCEPRESRSENTDTLRIQMRRAKPNVRALSWRLVFTCTEDVVNELIKARTEYLEASIGVSGRKKIVIPRFLHKRLRDFAEDEGSLIEWICSQLPPAQRCFQLKETAMEGLNKKSESQLKKLIEVRSHEYEFRYLLAL

SEQ ID NO: 71624 - DNA, 1110 bp, Arabidopsis thaliana
  misc_feature (1)..(1110): Ceres Seq. ID no. 4803117
  misc_feature: MA Experiment ID: 20000173 Result: Down-regulated in Transcription
  misc_feature: MA Experiment 20000173 PARAMETER Experiment Name: At_42deg_Heat_P Parameter: Age (day) Value: 14
  misc_feature: MA Experiment 20000173 PARAMETER Experiment Name: At_42deg_Heat_P Parameter: Organism Value: A. thaliana
  misc_feature: MA Experiment 20000173 PARAMETER Experiment Name: At_42deg_Heat_P Parameter: Plant Line Value: WS
  misc_feature: MA Experiment 20000173 PARAMETER Experiment Name: At_42deg_Heat_P Parameter: Temperature (deg C) Value: 42 vs. 22
  misc_feature: MA Experiment 20000173 PARAMETER Experiment Name: At_42deg_Heat_P Parameter: Timepoint (hr) Value: 6
  misc_feature: MA Experiment 20000173 PARAMETER Experiment Name: At_42deg_Heat_P Parameter: Tissue Value: Aerial
  misc_feature: MA Experiment ID: 20000227 Result: Up-regulated in Transcription
  misc_feature: MA Experiment 20000227 PARAMETER Experiment Name: At_Root-Tips-vs-Tops_P Parameter: Tissue Value: Root Tips vs. Root Tops
  misc_feature: MA Experiment ID: 20000436 Result: Down-regulated in Transcription
  misc_feature: MA Experiment 20000436 PARAMETER Experiment Name: At_Drought_P Parameter: Age (day) Value: 7
  misc_feature: MA Experiment 20000436 PARAMETER Experiment Name: At_Drought_P Parameter: Organism Value: A. thaliana
  misc_feature: MA Experiment 20000436 PARAMETER Experiment Name: At_Drought_P Parameter: Plant Line Value: WS
  misc_feature: MA Experiment 20000436 PARAMETER Experiment Name: At_Drought_P Parameter: Timepoint (hr) Value: 12
  misc_feature: MA Experiment 20000436 PARAMETER Experiment Name: At_Drought_P Parameter: Tissue Value: Whole Plant
  misc_feature: MA Experiment 20000436 PARAMETER Experiment Name: At_Drought_P Parameter: Treatment Value: Drought vs. No Drought
  misc_feature: MA Experiment ID: 20000437 Result: Down-regulated in Transcription
  misc_feature: MA Experiment 20000437 PARAMETER Experiment Name: At_Drought_P Parameter: Age (day) Value: 8
  misc_feature: MA Experiment 20000437 PARAMETER Experiment Name: At_Drought_P Parameter: Organism Value: A. thaliana
  misc_feature: MA Experiment 20000437 PARAMETER Experiment Name: At_Drought_P Parameter: Plant Line Value: WS
  misc_feature: MA Experiment 20000437 PARAMETER Experiment Name: At_Drought_P Parameter: Timepoint (hr) Value: 24
  misc_feature: MA Experiment 20000437 PARAMETER Experiment Name: At_Drought_P Parameter: Tissue Value: Whole Plant
  misc_feature: MA Experiment 20000437 PARAMETER Experiment Name: At_Drought_P Parameter: Treatment Value: Drought vs. No Drought
  misc_feature: MA Experiment ID: 20000438 Result: Up-regulated in Transcription
  misc_feature: MA Experiment 20000438 PARAMETER Experiment Name: At_Shoots__P Parameter: Age (day) Value: 14
  misc_feature: MA Experiment 20000438 PARAMETER Experiment Name: At_Shoots__P Parameter: Tissue Value: Shoots vs. Whole Plant
  misc_feature: MA Experiment ID: 20000573 Result: Down-regulated in Transcription
  misc_feature: MA Experiment 20000573 PARAMETER Experiment Name: At_100uM_ABA_Mutants__P Parameter: Organism Value: A. thaliana
  misc_feature: MA Experiment 20000573 PARAMETER Experiment Name: At_100uM_ABA_Mutants__P Parameter: Plant Line Value: CS22 vs. Ler wt
  misc_feature: MA Experiment 20000573 PARAMETER Experiment Name: At_100uM_ABA_Mutants__P Parameter: Timepoint (hr) Value: N/A
  misc_feature: MA Experiment 20000573 PARAMETER Experiment Name: At_100uM_ABA_Mutants__P Parameter: Tissue Value: Whole Plant
  misc_feature: MA Experiment 20000573 PARAMETER Experiment Name: At_100uM_ABA_Mutants__P Parameter: Treatment Value: None
  misc_feature: MA Experiment ID: 20001248 Result: Down-regulated in Transcription
  misc_feature: MA Experiment 20001248 PARAMETER Experiment Name: At_Far-red-induction_P Parameter: Age (day) Value: 7
  misc_feature: MA Experiment 20001248 PARAMETER Experiment Name: At_Far-red-induction_P Parameter: Light Value: Far-red vs. White
  misc_feature: MA Experiment 20001248 PARAMETER Experiment Name: At_Far-red-induction_P Parameter: Organism Value: A. thaliana
  misc_feature: MA Experiment 20001248 PARAMETER Experiment Name: At_Far-red-induction_P Parameter: Plant Line Value: Columbia
  misc_feature: MA Experiment 20001248 PARAMETER Experiment Name: At_Far-red-induction_P Parameter: Timepoint (hr) Value: 4
  misc_feature: MA Experiment 20001248 PARAMETER Experiment Name: At_Far-red-induction_P Parameter: Tissue Value: Whole Plant
  misc_feature: MA Experiment ID: 20001554 Result: Down-regulated in Transcription
  misc_feature: MA Experiment 20001554 PARAMETER Experiment Name: At_Drought_Soil_Dry_P Parameter: Age (day) Value: 21
  misc_feature: MA Experiment 20001554 PARAMETER Experiment Name: At_Drought_Soil_Dry_P Parameter: Organism Value: A. thaliana
  misc_feature: MA Experiment 20001554 PARAMETER Experiment Name: At_Drought_Soil_Dry_P Parameter: Plant Line Value: WS
  misc_feature: MA Experiment 20001554 PARAMETER Experiment Name: At_Drought_Soil_Dry_P Parameter: Post Timepoint (hr) Value: None
  misc_feature: MA Experiment 20001554 PARAMETER Experiment Name: At_Drought_Soil_Dry_P Parameter: Post-Treatment Value: None
  misc_feature: MA Experiment 20001554 PARAMETER Experiment Name: At_Drought_Soil_Dry_P Parameter: Timepoint (day) Value: 7
  misc_feature: MA Experiment 20001554 PARAMETER Experiment Name: At_Drought_Soil_Dry_P Parameter: Treatment Value: Drought vs. No Drought
  misc_feature: MA Experiment ID: 20001555 Result: Down-regulated in Transcription
  misc_feature: MA Experiment 20001555 PARAMETER Experiment Name: At_Drought_Soil_Dry_P Parameter: Age (day) Value: 24
  misc_feature: MA Experiment 20001555 PARAMETER Experiment Name: At_Drought_Soil_Dry_P Parameter: Organism Value: A. thaliana
  misc_feature: MA Experiment 20001555 PARAMETER Experiment Name: At_Drought_Soil_Dry_P Parameter: Plant Line Value: WS
  misc_feature: MA Experiment 20001555 PARAMETER Experiment Name: At_Drought_Soil_Dry_P Parameter: Post Timepoint (hr) Value: None
  misc_feature: MA Experiment 20001555 PARAMETER Experiment Name: At_Drought_Soil_Dry_P Parameter: Post-Treatment Value: None
  misc_feature: MA Experiment 20001555 PARAMETER Experiment Name: At_Drought_Soil_Dry_P Parameter: Timepoint (day) Value: 10
  misc_feature: MA Experiment 20001555 PARAMETER Experiment Name: At_Drought_Soil_Dry_P Parameter: Treatment Value: Drought vs. No Drought
  misc_feature: MA Experiment ID: 20001558 Result: Up-regulated in Transcription
  misc_feature: MA Experiment 20001558 PARAMETER Experiment Name: At_Drought_Soil_Dry_P Parameter: Age (day) Value: 27
  misc_feature: MA Experiment 20001558 PARAMETER Experiment Name: At_Drought_Soil_Dry_P Parameter: Organism Value: A. thaliana
  misc_feature: MA Experiment 20001558 PARAMETER Experiment Name: At_Drought_Soil_Dry_P Parameter: Plant Line Value: WS
  misc_feature: MA Experiment 20001558 PARAMETER Experiment Name: At_Drought_Soil_Dry_P Parameter: Post Timepoint (hr) Value: 6
  misc_feature: MA Experiment 20001558 PARAMETER Experiment Name: At_Drought_Soil_Dry_P Parameter: Post-Treatment Value: Re-Water vs. No Drought
  misc_feature: MA Experiment 20001558 PARAMETER Experiment Name: At_Drought_Soil_Dry_P Parameter: Timepoint (day) Value: 13
  misc_feature: MA Experiment 20001558 PARAMETER Experiment Name: At_Drought_Soil_Dry_P Parameter: Treatment Value: Drought vs. No Drought
  misc_feature: MA Experiment ID: 20001911 Result: Down-regulated in Transcription
  misc_feature: MA Experiment 20001911 PARAMETER Experiment Name: At_Drought_Reproduction_P Parameter: Age (day) Value: 40
  misc_feature: MA Experiment 20001911 PARAMETER Experiment Name: At_Drought_Reproduction_P Parameter: Organism Value: A. thaliana
  misc_feature: MA Experiment 20001911 PARAMETER Experiment Name: At_Drought_Reproduction_P Parameter: Plant Line Value: WS
  misc_feature: MA Experiment 20001911 PARAMETER Experiment Name: At_Drought_Reproduction_P Parameter: Timepoint (day) Value: 10
  misc_feature: MA Experiment 20001911 PARAMETER Experiment Name: At_Drought_Reproduction_P Parameter: Tissue Value: Flowers
  misc_feature: MA Experiment 20001911 PARAMETER Experiment Name: At_Drought_Reproduction_P Parameter: Treatment Value: Drought vs. No Drought
atggtggagctcaaagatcaacaagacatgggagaaggtatgcaatgcattacacatccttacacaaagaacccaggtgggatctgtgctttatgtctccaggaaaagcttggtaagctcgtcacttcctctttccctgttcctaaacccaaccatctctcttcttcttctcctaaatccttcactccttccacgacctctctcgctctgtctctctcatcggcaagcaatggcagagactccactaacaacaacaatctcccgtttcttctggctaagaagaagaagaacatgctcgcagcttcttcttcatcttcttcttcttcctcttcgtcttcttctgcgaatcttatctacaagagaagcaaatcgactgctgctgcttacggtgagagtttcagccaaaggaaacgaagtgggttttggtcttttttccatctctactcttcaaaacatcagatcagcaacaccaccaaaaaagtcgataactttagccatttaaggaggaaccagagaacagagtcaaaaacagagacttcttccatgagggtcggtggtggtggaggcattgatgtgatagttgaggaagaagatgagagtcctaacaaagtggtttcagaaacgccaacgaatggtataggtggtggtggtggttcgtcgtttgggaggaaagtgttgagatctagatctgttggttgtggtagtagaagcttctctggtgatttctttgagaggatctctaatgggtttggtgattgtgccttgagaaggattgagtcacagagagaagccactaaggtcattagtaatggtggtggtggtgaagcagcagatgcaatgagtgaaatggtcaaatgtggtggcatctttggtgggtttatgatcatgacatcatcatctacaacatcatcaacaacatcatcaacggttgatcatcatcataatcataagatggggaacagaaactggggatgggctttcgcaagtccaatgagagccaaagctactgctactcatagaggtcgtaccattacagagtccacagctgacaacaagaacacatcttcaaatttggactcaatcccttcattgttggctttgaaaagctaa

SEQ ID NO: 71625 - protein, 369 aa, Arabidopsis thaliana
  peptide (1)..(369): Ceres Seq. ID no. 4803118
  misc_feature (1)..(369): Homolog of NCBI NO: 18422990 NR Description: expressed protein; protein id: At5g49100.1, by cDNA: 116332., supported by cDNA: gi_18377645 [Arabidopsis >gi|10176943|dbj|BAB10092.1| gene_id:K20J1.7~unknown protein
  misc_feature (10)..(369): Homolog of NCBI NO: 21536969 NR Description: unknown [Arabidopsis thaliana]
  misc_feature (16)..(311): Homolog of NCBI NO: 32490296 NR Description: OSJNBa0042I15.1 [Oryza sativa (japonica
  misc_feature (16)..(311): Homolog of NCBI NO: 32487915 NR Description: OJ000315_02.19 [Oryza sativa (japonica
  misc_feature (36)..(357): Homolog of NCBI NO: 28828184 NR Description: similar to Leishmania major. Ppg3 [Dictyostelium
  misc_feature (37)..(351): Homolog of NCBI NO: 28828184 NR Description: similar to Leishmania major. Ppg3 [Dictyostelium
MVELKDQQDMGEGMQCITHPYTKNPGGICALCLQEKLGKLVTSSFPVPKPNHLSSSSPKSFTPSTTSLALSLSSASNGRDSTNNNNLPFLLAKKKKNMLAASSSSSSSSSSSSSANLIYKRSKSTAAAYGESFSQRKRSGFWSFFHLYSSKHQISNTTKKVDNFSHLRRNQRTESKTETSSMRVGGGGGIDVIVEEEDESPNKVVSETPTNGIGGGGGSSFGRKVLRSRSVGCGSRSFSGDFFERISNGFGDCALRRIESQREATKVISNGGGGEAADAMSEMVKCGGIFGGFMIMTSSSTTSSTTSSTVDHHHNHKMGNRNWGWAFASPMRAKATATHRGRTITESTADNKNTSSNLDSIPSLLALKS

SEQ ID NO: 71626 - protein, 360 aa, Arabidopsis thaliana
  peptide (1)..(360): Ceres Seq. ID no. 4803119
  misc_feature (1)..(360): Homolog of NCBI NO: 18422990 NR Description: expressed protein; protein id: At5g49100.1, by cDNA: 116332., supported by cDNA: gi_18377645 [Arabidopsis >gi|10176943|dbj|BAB10092.1| gene_id:K20J1.7~unknown protein
  misc_feature (1)..(360): Homolog of NCBI NO: 21536969 NR Description: unknown [Arabidopsis thaliana]
  misc_feature (7)..(302): Homolog of NCBI NO: 32490296 NR Description: OSJNBa0042I15.1 [Oryza sativa (japonica
  misc_feature (7)..(302): Homolog of NCBI NO: 32487915 NR Description: OJ000315_02.19 [Oryza sativa (japonica
  misc_feature (27)..(348): Homolog of NCBI NO: 28828184 NR Description: similar to Leishmania major. Ppg3 [Dictyostelium
  misc_feature (28)..(342): Homolog of NCBI NO: 28828184 NR Description: similar to Leishmania major. Ppg3 [Dictyostelium
MGEGMQCITHPYTKNPGGICALCLQEKLGKLVTSSFPVPKPNHLSSSSPKSFTPSTTSLALSLSSASNGRDSTNNNNLPFLLAKKKKNMLAASSSSSSSSSSSSSANLIYKRSKSTAAAYGESFSQRKRSGFWSFFHLYSSKHQISNTTKKVDNFSHLRRNQRTESKTETSSMRVGGGGGIDVIVEEEDESPNKVVSETPTNGIGGGGGSSFGRKVLRSRSVGCGSRSFSGDFFERISNGFGDCALRRIESQREATKVISNGGGGEAADAMSEMVKCGGIFGGFMIMTSSSTTSSTTSSTVDHHHNHKMGNRNWGWAFASPMRAKATATHRGRTITESTADNKNTSSNLDSIPSLLALKS

SEQ ID NO: 71627 - protein, 356 aa, Arabidopsis thaliana
  peptide (1)..(356): Ceres Seq. ID no. 4803120
  misc_feature (1)..(356): Homolog of NCBI NO: 18422990 NR Description: expressed protein; protein id: At5g49100.1, by cDNA: 116332., supported by cDNA: gi_18377645 [Arabidopsis >gi|10176943|dbj|BAB10092.1| gene_id:K20J1.7~unknown protein
  misc_feature (1)..(356): Homolog of NCBI NO: 21536969 NR Description: unknown [Arabidopsis thaliana]
  misc_feature (3)..(298): Homolog of NCBI NO: 32490296 NR Description: OSJNBa0042I15.1 [Oryza sativa (japonica
  misc_feature (3)..(298): Homolog of NCBI NO: 32487915 NR Description: OJ000315_02.19 [Oryza sativa (japonica
  misc_feature (23)..(344): Homolog of NCBI NO: 28828184 NR Description: similar to Leishmania major. Ppg3 [Dictyostelium
  misc_feature (24)..(338): Homolog of NCBI NO: 28828184 NR Description: similar to Leishmania major. Ppg3 [Dictyostelium
MQCITHPYTKNPGGICALCLQEKLGKLVTSSFPVPKPNHLSSSSPKSFTPSTTSLALSLSSASNGRDSTNNNNLPFLLAKKKKNMLAASSSSSSSSSSSSSANLIYKRSKSTAAAYGESFSQRKRSGFWSFFHLYSSKHQISNTTKKVDNFSHLRRNQRTESKTETSSMRVGGGGGIDVIVEEEDESPNKVVSETPTNGIGGGGGSSFGRKVLRSRSVGCGSRSFSGDFFERISNGFGDCALRRIESQREATKVISNGGGGEAADAMSEMVKCGGIFGGFMIMTSSSTTSSTTSSTVDHHHNHKMGNRNWGWAFASPMRAKATATHRGRTITESTADNKNTSSNLDSIPSLLALKS

SEQ ID NO: 71628 - DNA, 2520 bp, Arabidopsis thaliana
  misc_feature (1)..(2520): Ceres Seq. ID no. 4803127
  misc_feature: MA Experiment ID: 20000307 Result: Down-regulated in Transcription
  misc_feature: MA Experiment 20000307 PARAMETER Experiment Name: At_Germinating_Seeds_Sub_P Parameter: Age (hr) Value: 24 vs. 0
  misc_feature: MA Experiment 20000307 PARAMETER Experiment Name: At_Germinating_Seeds_Sub_P Parameter: Organism Value: A. thaliana
  misc_feature: MA Experiment 20000307 PARAMETER Experiment Name: At_Germinating_Seeds_Sub_P Parameter: Plant Line Value: WS
  misc_feature: MA Experiment 20000307 PARAMETER Experiment Name: At_Germinating_Seeds_Sub_P Parameter: Tissue Value: Germinating Seeds
atggcgaaaatcatgagaaaccatatacatttgaggactggtccatggggaccttcagctgagaatactctatctgctctaagttttaaaccacaaccagaatttgtcattggggttttacggaggctgaaagatgttaatcgggctattgagtatttccgttggtatgagagaagaaccgagctgcctcattgtcctgaatcatacaactccttgcttttggtgatggctcgttgtagaaattttgatgctttggaccagattcttggagaaatgagtgttgcaggatttggcccttctgttaacacttgtattgagatggttttgggctgcgttaaggctaataagcttagggaaggttatgatgttgtgcagatgatgaggaagttcaagttccgacctgctttttcagcttacacaactcttatcggtgctttctcggcagttaatcattctgatatgatgttgacactctttcagcaaatgcaggagttaggatatgaaccgaccgttcatctgtttacaacattgattcggggatttgccaaagagggtcgagttgattctgctctatctttacttgatgagatgaagagcagctctcttgatgccgacattgttctttataatgtatgtattgatagctttggtaaagtgggcaaggttgatatggcatggaaattttttcatgagattgaagcgaatggtttaaagcctgatgaagtcacttataccagcatgataggagttctgtgcaaggcaaacagattggatgaagctgtagagatgtttgagcatctagagaagaatagacgggttccttgcacttatgcttacaacacgatgattatgggttatggttcggctggaaaatttgatgaagcatacagtctcctagagagacagagggctaaagggtctataccgagtgtgattgcatataattgcattcttacatgcttaaggaaaatgggaaaagtggacgaagctttgaaagttttcgaggagatgaaaaaagacgctgctccaaatctttcaacctataatattctcattgacatgctgtgtagagctggtaaacttgacactgcttttgagctacgcgattctatgcagaaggctggtctgtttcctaatgtgaggactgtgaacataatggttgatcggctctgtaaatcccaaaaacttgatgaagcatgtgctatgttcgaggagatggattataaggtttgtaccccagatgagattacattttgctccctcatagatggcttaggaaaggtcggaagagttgatgacgcttacaaagtctatgaaaagatgttggattctgattgtcgtactaactctatcgtttacacatccctcataaaaaacttcttcaaccacggtagaaaagaagatggacacaagatatacaaggacatgattaatcaaaactgttctcctgatttacagcttcttaatacgtacatggattgcatgttcaaggctggagaaccagaaaagggaagggccatgtttgaagaaataaaagcccgtcggtttgtcccagatgctcgaagctactcgattttaattcatggactaataaaagcaggatttgcaaatgaaacttatgagttgttttattccatgaaagagcaagggtgtgtcttggacacacgtgcttacaatattgtcattgacggtttctgcaagtgtggaaaagttaacaaagcttatcagctgctggaggaaatgaagacaaaaggttttgagccaactgttgttacgtatggttcagtcatcgacgggcttgcaaaaatagatcggcttgatgaagcttatatgctctttgaggaagcaaaatcgaagagaatagagctaaacgtggtgatttacagtagtcttattgatgggtttggaaaagttggtaggatagatgaagcttaccttatcttggaagagcttatgcagaaaggattaacacctaatctttacacatggaactcattgcttgatgcattggtcaaagctgaggaaatcaacgaagcgcttgtctgttttcagtcgatgaaagaactgaaatgcacgccaaaccaagttacttatggtatcctaataaatggtctttgtaaggtcaggaagttcaataaagcctttgtcttttggcaggagatgcagaaacaggggatgaaacccagtactatttcttacaccaccatgatatcaggacttgcaaaggctgggaatattgcagaggctggggcgctcttcgatcggttcaaggcaaacggtggtgttccagactctgcttgttataatgccatgatcgaaggtctaagtaacggaaacagggcaatggatgctttttctctttttgaggaaacacgtcgaagaggattacctatccataacaaaacctgtgttgttcttttggatactttgcataagaatgattgtcttgagcaagcagctattgtgggagctgttttgagggaaacgggaaaggcacggcatgctgcccgatcttggtag

SEQ ID NO: 71629 - protein, 839 aa, Arabidopsis thaliana
  peptide (1)..(839): Ceres Seq. ID no. 4803128
  misc_feature (451)..(485): Pfam Name: PPR repeat Pfam Description: PPR repeat
  misc_feature (11)..(838): Homolog of NCBI NO: 33146978 NR Description: putative pentatricopeptide (PPR)
  misc_feature (11)..(787): Homolog of NCBI NO: 34900768 NR Description: hypothetical protein~similar to Arabidopsis
  misc_feature (56)..(796): Homolog of NCBI NO: 15236546 NR Description: putative protein; protein id: At4g31850.1
  misc_feature (30)..(789): Homolog of NCBI NO: 15236546 NR Description: putative protein; protein id: At4g31850.1
  misc_feature (83)..(753): Homolog of NCBI NO: 34394343 NR Description: putative fertility restorer homologue [Oryza
  misc_feature (709)..(818): Homolog of NCBI NO: 34394343 NR Description: putative fertility restorer homologue [Oryza
  misc_feature (112)..(796): Homolog of NCBI NO: 15238562 NR Description: putative protein; protein id: At5g59900.1 thaliana] >gi|9757911|dbj|BAB08358.1|
  misc_feature (162)..(795): Homolog of NCBI NO: 34900768 NR Description: hypothetical protein~similar to Arabidopsis
  misc_feature (70)..(746): Homolog of NCBI NO: 34394343 NR Description: putative fertility restorer homologue [Oryza
  misc_feature (36)..(795): Homolog of NCBI NO: 37534450 NR Description: unknown protein [Oryza sativa (japonica
MAKIMRNHIHLRTGPWGPSAENTLSALSFKPQPEFVIGVLRRLKDVNRAIEYFRWYERRTELPHCPESYNSLLLVMARCRNFDALDQILGEMSVAGFGPSVNTCIEMVLGCVKANKLREGYDVVQMMRKFKFRPAFSAYTTLIGAFSAVNHSDMMLTLFQQMQELGYEPTVHLFTTLIRGFAKEGRVDSALSLLDEMKSSSLDADIVLYNVCIDSFGKVGKVDMAWKFFHEIEANGLKPDEVTYTSMIGVLCKANRLDEAVEMFEHLEKNRRVPCTYAYNTMIMGYGSAGKFDEAYSLLERQRAKGSIPSVIAYNCILTCLRKMGKVDEALKVFEEMKKDAAPNLSTYNILIDMLCRAGKLDTAFELRDSMQKAGLFPNVRTVNIMVDRLCKSQKLDEACAMFEEMDYKVCTPDEITFCSLIDGLGKVGRVDDAYKVYEKMLDSDCRTNSIVYTSLIKNFFNHGRKEDGHKIYKDMINQNCSPDLQLLNTYMDCMFKAGEPEKGRAMFEEIKARRFVPDARSYSILIHGLIKAGFANETYELFYSMKEQGCVLDTRAYNIVIDGFCKCGKVNKAYQLLEEMKTKGFEPTVVTYGSVIDGLAKIDRLDEAYMLFEEAKSKRIELNVVIYSSLIDGFGKVGRIDEAYLILEELMQKGLTPNLYTWNSLLDALVKAEEINEALVCFQSMKELKCTPNQVTYGILINGLCKVRKFNKAFVFWQEMQKQGMKPSTISYTTMISGLAKAGNIAEAGALFDRFKANGGVPDSACYNAMIEGLSNGNRAMDAFSLFEETRRRGLPIHNKTCVVLLDTLHKNDCLEQAAIVGAVLRETGKARHAARSW

SEQ ID NO: 71630 - protein, 835 aa, Arabidopsis thaliana
  peptide (1)..(835): Ceres Seq. ID no. 4803129
  misc_feature (447)..(481): Pfam Name: PPR repeat Pfam Description: PPR repeat
  misc_feature (7)..(834): Homolog of NCBI NO: 33146978 NR Description: putative pentatricopeptide (PPR)
  misc_feature (7)..(783): Homolog of NCBI NO: 34900768 NR Description: hypothetical protein~similar to Arabidopsis
  misc_feature (52)..(792): Homolog of NCBI NO: 15236546 NR Description: putative protein; protein id: At4g31850.1
  misc_feature (26)..(785): Homolog of NCBI NO: 15236546 NR Description: putative protein; protein id: At4g31850.1
  misc_feature (79)..(749): Homolog of NCBI NO: 34394343 NR Description: putative fertility restorer homologue [Oryza
  misc_feature (705)..(814): Homolog of NCBI NO: 34394343 NR Description: putative fertility restorer homologue [Oryza
  misc_feature (108)..(792): Homolog of NCBI NO: 15238562 NR Description: putative protein; protein id: At5g59900.1 thaliana] >gi|9757911|dbj|BAB08358.1|
  misc_feature (158)..(791): Homolog of NCBI NO: 34900768 NR Description: hypothetical protein~similar to Arabidopsis
  misc_feature (66)..(742): Homolog of NCBI NO: 34394343 NR Description: putative fertility restorer homologue [Oryza
  misc_feature (32)..(791): Homolog of NCBI NO: 37534450 NR Description: unknown protein [Oryza sativa (japonica
MRNHIHLRTGPWGPSAENTLSALSFKPQPEFVIGVLRRLKDVNRAIEYFRWYERRTELPHCPESYNSLLLVMARCRNFDALDQILGEMSVAGFGPSVNTCIEMVLGCVKANKLREGYDVVQMMRKFKFRPAFSAYTTLIGAFSAVNHSDMMLTLFQQMQELGYEPTVHLFTTLIRGFAKEGRVDSALSLLDEMKSSSLDADIVLYNVCIDSFGKVGKVDMAWKFFHEIEANGLKPDEVTYTSMIGVLCKANRLDEAVEMFEHLEKNRRVPCTYAYNTMIMGYGSAGKFDEAYSLLERQRAKGSIPSVIAYNCILTCLRKMGKVDEALKVFEEMKKDAAPNLSTYNILIDMLCRAGKLDTAFELRDSMQKAGLFPNVRTVNIMVDRLCKSQKLDEACAMFEEMDYKVCTPDEITFCSLIDGLGKVGRVDDAYKVYEKMLDSDCRTNSIVYTSLIKNFFNHGRKEDGHKIYKDMINQNCSPDLQLLNTYMDCMFKAGEPEKGRAMFEEIKARRFVPDARSYSILIHGLIKAGFANETYELFYSMKEQGCVLDTRAYNIVIDGFCKCGKVNKAYQLLEEMKTKGFEPTVVTYGSVIDGLAKIDRLDEAYMLFEEAKSKRIELNVVIYSSLIDGFGKVGRIDEAYLILEELMQKGLTPNLYTWNSLLDALVKAEEINEALVCFQSMKELKCTPNQVTYGILINGLCKVRKFNKAFVFWQEMQKQGMKPSTISYTTMISGLAKAGNIAEAGALFDRFKANGGVPDSACYNAMIEGLSNGNRAMDAFSLFEETRRRGLPIHNKTCVVLLDTLHKNDCLEQAAIVGAVLRETGKARHAARSW

SEQ ID NO: 71631 - protein, 764 aa, Arabidopsis thaliana
  peptide (1)..(764): Ceres Seq. ID no. 4803130
  misc_feature (376)..(410): Pfam Name: PPR repeat Pfam Description: PPR repeat
  misc_feature (1)..(763): Homolog of NCBI NO: 33146978 NR Description: putative pentatricopeptide (PPR)
  misc_feature (1)..(712): Homolog of NCBI NO: 34900768 NR Description: hypothetical protein~similar to Arabidopsis
  misc_feature (1)..(721): Homolog of NCBI NO: 15236546 NR Description: putative protein; protein id: At4g31850.1
  misc_feature (1)..(714): Homolog of NCBI NO: 15236546 NR Description: putative protein; protein id: At4g31850.1
  misc_feature (8)..(678): Homolog of NCBI NO: 34394343 NR Description: putative fertility restorer homologue [Oryza
  misc_feature (634)..(743): Homolog of NCBI NO: 34394343 NR Description: putative fertility restorer homologue [Oryza
  misc_feature (37)..(721): Homolog of NCBI NO: 15238562 NR Description: putative protein; protein id: At5g59900.1 thaliana] >gi|9757911|dbj|BAB08358.1|
  misc_feature (87)..(720): Homolog of NCBI NO: 34900768 NR Description: hypothetical protein~similar to Arabidopsis
  misc_feature (1)..(671): Homolog of NCBI NO: 34394343 NR Description: putative fertility restorer homologue [Oryza
  misc_feature (1)..(720): Homolog of NCBI NO: 37534450 NR Description: unknown protein [Oryza sativa (japonica
MARCRNFDALDQILGEMSVAGFGPSVNTCIEMVLGCVKANKLREGYDVVQMMRKFKFRPAFSAYTTLIGAFSAVNHSDMMLTLFQQMQELGYEPTVHLFTTLIRGFAKEGRVDSALSLLDEMKSSSLDADIVLYNVCIDSFGKVGKVDMAWKFFHEIEANGLKPDEVTYTSMIGVLCKANRLDEAVEMFEHLEKNRRVPCTYAYNTMIMGYGSAGKFDEAYSLLERQRAKGSIPSVIAYNCILTCLRKMGKVDEALKVFEEMKKDAAPNLSTYNILIDMLCRAGKLDTAFELRDSMQKAGLFPNVRTVNIMVDRLCKSQKLDEACAMFEEMDYKVCTPDEITFCSLIDGLGKVGRVDDAYKVYEKMLDSDCRTNSIVYTSLIKNFFNHGRKEDGHKIYKDMINQNCSPDLQLLNTYMDCMFKAGEPEKGRAMFEEIKARRFVPDARSYSILIHGLIKAGFANETYELFYSMKEQGCVLDTRAYNIVIDGFCKCGKVNKAYQLLEEMKTKGFEPTVVTYGSVIDGLAKIDRLDEAYMLFEEAKSKRIELNVVIYSSLIDGFGKVGRIDEAYLILEELMQKGLTPNLYTWNSLLDALVKAEEINEALVCFQSMKELKCTPNQVTYGILINGLCKVRKFNKAFVFWQEMQKQGMKPSTISYTTMISGLAKAGNIAEAGALFDRFKANGGVPDSACYNAMIEGLSNGNRAMDAFSLFEETRRRGLPIHNKTCVVLLDTLHKNDCLEQAAIVGAVLRETGKARHAARSW

SEQ ID NO: 71632 - DNA, 612 bp, Arabidopsis thaliana
  misc_feature (1)..(612): Ceres Seq. ID no. 4803276
  misc_feature: MA Experiment ID: 20000182 Result: Up-regulated in Transcription
  misc_feature: MA Experiment 20000182 PARAMETER Experiment Name: At_2mM_SA_P Parameter: Age (day) Value: 14
  misc_feature: MA Experiment 20000182 PARAMETER Experiment Name: At_2mM_SA_P Parameter: Organism Value: A. thaliana
  misc_feature: MA Experiment 20000182 PARAMETER Experiment Name: At_2mM_SA_P Parameter: Plant Line Value: WS
  misc_feature: MA Experiment 20000182 PARAMETER Experiment Name: At_2mM_SA_P Parameter: Timepoint (hr) Value: 6
  misc_feature: MA Experiment 20000182 PARAMETER Experiment Name: At_2mM_SA_P Parameter: Tissue Value: Aerial
  misc_feature: MA Experiment 20000182 PARAMETER Experiment Name: At_2mM_SA_P Parameter: Treatment Value: 2mM SA vs. No Treatment
  misc_feature: MA Experiment ID: 20000234 Result: Down-regulated in Transcription
  misc_feature: MA Experiment 20000234 PARAMETER Experiment Name: At_Siliques_P Parameter: Age (day) Value: 21
  misc_feature: MA Experiment 20000234 PARAMETER Experiment Name: At_Siliques_P Parameter: Organism Value: A. thaliana
  misc_feature: MA Experiment 20000234 PARAMETER Experiment Name: At_Siliques_P Parameter: Plant Line Value: WS
  misc_feature: MA Experiment 20000234 PARAMETER Experiment Name: At_Siliques_P Parameter: Tissue Value: Less Than 5mm Siliques vs. Whole Plant
  misc_feature: MA Experiment ID: 20000437 Result: Up-regulated in Transcription
  misc_feature: MA Experiment 20000437 PARAMETER Experiment Name: At_Drought_P Parameter: Age (day) Value: 8
  misc_feature: MA Experiment 20000437 PARAMETER Experiment Name: At_Drought_P Parameter: Organism Value: A. thaliana
  misc_feature: MA Experiment 20000437 PARAMETER Experiment Name: At_Drought_P Parameter: Plant Line Value: WS
  misc_feature: MA Experiment 20000437 PARAMETER Experiment Name: At_Drought_P Parameter: Timepoint (hr) Value: 24
  misc_feature: MA Experiment 20000437 PARAMETER Experiment Name: At_Drought_P Parameter: Tissue Value: Whole Plant
  misc_feature: MA Experiment 20000437 PARAMETER Experiment Name: At_Drought_P Parameter: Treatment Value: Drought vs. No Drought
  misc_feature: MA Experiment ID: 20000438 Result: Down-regulated in Transcription
  misc_feature: MA Experiment 20000438 PARAMETER Experiment Name: At_Shoots__P Parameter: Age (day) Value: 14
  misc_feature: MA Experiment 20000438 PARAMETER Experiment Name: At_Shoots__P Parameter: Tissue Value: Shoots vs. Whole Plant
  misc_feature: MA Experiment ID: 20000709 Result: Up-regulated in Transcription
  misc_feature: MA Experiment 20000709 PARAMETER Experiment Name: At_15mM_NH4NO3_L-to-H_P Parameter: Age (hr) Value: 14
  misc_feature: MA Experiment 20000709 PARAMETER Experiment Name: At_15mM_NH4NO3_L-to-H_P Parameter: Organism Value: A. thaliana
  misc_feature: MA Experiment 20000709 PARAMETER Experiment Name: At_15mM_NH4NO3_L-to-H_P Parameter: Plant Line Value: WS
  misc_feature: MA Experiment 20000709 PARAMETER Experiment Name: At_15mM_NH4NO3_L-to-H_P Parameter: Timepoint (hr) Value: 4
  misc_feature: MA Experiment 20000709 PARAMETER Experiment Name: At_15mM_NH4NO3_L-to-H_P Parameter: Tissue Value: Aerial
  misc_feature: MA Experiment 20000709 PARAMETER Experiment Name: At_15mM_NH4NO3_L-to-H_P Parameter: Treatment Value: 15mM NH4NO3 vs. 30mM Mannitol
  misc_feature: MA Experiment ID: 20001905 Result: Up-regulated in Transcription
  misc_feature: MA Experiment 20001905 PARAMETER Experiment Name: At_Drought_Reproduction_P Parameter: Age (day) Value: 40
  misc_feature: MA Experiment 20001905 PARAMETER Experiment Name: At_Drought_Reproduction_P Parameter: Organism Value: A. thaliana
  misc_feature: MA Experiment 20001905 PARAMETER Experiment Name: At_Drought_Reproduction_P Parameter: Plant Line Value: WS
  misc_feature: MA Experiment 20001905 PARAMETER Experiment Name: At_Drought_Reproduction_P Parameter: Timepoint (day) Value: 10
  misc_feature: MA Experiment 20001905 PARAMETER Experiment Name: At_Drought_Reproduction_P Parameter: Tissue Value: Rosettes
  misc_feature: MA Experiment 20001905 PARAMETER Experiment Name: At_Drought_Reproduction_P Parameter: Treatment Value: Drought vs. No Drought
atgtgtttgattatggaaacggatgatcacaacggtgatgttttagcgccgccgtcgaatttctcgatggttgaagatggaatttatcgatctgggtttcctcgacctgagaatttcagtttccttaaaaccctaaatcttcgttccatcatttatctgtgtcctgaaccatacccagaggagaatctcaagtttcttgaggctaacaacattaagctttaccaatttggaatcgaaggcaaaacggatcctccaactcctatgccaaaagatacagttttggatgctctcaaagttttagttgatgtgagaaaccatccaattctcatacattgcaaacgcgggaagcataggacaggttgtctagtgggatgcttaagaaaagttcagagctggtgtttatcatcggtgctcgaggagtaccagaagaacgcgggtttaaaatggagacaaagggacttgaattttatagaggcatttgatatagtgagcttgagacagtgtctcttgagcatcatgtatcagtatcacggttatggcttcaagaggagaaggttggcatatgaagaagagaatgtcaagacaccaaaaccgcaggctgctagagtttaa

SEQ ID NO: 71633 - protein, 203 aa, Arabidopsis thaliana
  peptide (1)..(203): Ceres Seq. ID no. 4803277
  misc_feature (15)..(178): Pfam Name: Tyrosine phosphatase family Pfam Description: Tyrosine phosphatase family
  misc_feature (5)..(203): Homolog of NCBI NO: 15232985 NR Description: unknown protein; protein id: At3g02800.1 thaliana] >gi|6728982|gb|AAF26980.1|AC018363_25 unknown protein
  misc_feature (1)..(202): Homolog of NCBI NO: 21553927 NR Description: unknown [Arabidopsis thaliana]
  misc_feature (1)..(202): Homolog of NCBI NO: 15237359 NR Description: putative protein; protein id: At5g16480.1, by cDNA: 18232. [Arabidopsis thaliana] contains similarity to tyrosine phosphatase~gene_id:MQK4.21
  misc_feature (15)..(171): Homolog of NCBI NO: 15220383 NR Description: unkown protein; protein id: At1g05000.1
  misc_feature (15)..(171): Homolog of NCBI NO: 15225761 NR Description: unknown protein; protein id: At2g32960.1
  misc_feature (74)..(171): Homolog of NCBI NO: 30102538 NR Description: At2g32960 [Arabidopsis thaliana]
  misc_feature (15)..(87): Homolog of NCBI NO: 30102538 NR Description: At2g32960 [Arabidopsis thaliana]
  misc_feature (12)..(171): Homolog of NCBI NO: 18412419 NR Description: putative protein; protein id: At4g03960.1, by cDNA: 26983., supported by cDNA: gi_15810021, supported by gi_17981660 [Arabidopsis thaliana] >gi|15810022|gb|AAL06938.1|
  misc_feature (4)..(161): Homolog of NCBI NO: 6324296 NR Description: Synthetic interaction with Whi2; Siw14p cerevisiae] >gi|1730719|sp|P53965|YND2_YEAST HYPOTHETICAL 32.8 KD
  misc_feature (5)..(165): Homolog of NCBI NO: 15027525 NR Description: conserved hypothetical protein [Leishmania major]
MCLIMETDDHNGDVLAPPSNFSMVEDGIYRSGFPRPENFSFLKTLNLRSIIYLCPEPYPEENLKFLEANNIKLYQFGIEGKTDPPTPMPKDTVLDALKVLVDVRNHPILIHCKRGKHRTGCLVGCLRKVQSWCLSSVLEEYQKNAGLKWRQRDLNFIEAFDIVSLRQCLLSIMYQYHGYGFKRRRLAYEEENVKTPKPQAARV

SEQ ID NO: 71634 - protein, 199 aa, Arabidopsis thaliana
  peptide (1)..(199): Ceres Seq. ID no. 4803278
  misc_feature (11)..(174): Pfam Name: Tyrosine phosphatase family Pfam Description: Tyrosine phosphatase family
  misc_feature (1)..(199): Homolog of NCBI NO: 15232985 NR Description: unknown protein; protein id: At3g02800.1 thaliana] >gi|6728982|gb|AAF26980.1|AC018363_25 unknown protein
  misc_feature (1)..(198): Homolog of NCBI NO: 21553927 NR Description: unknown [Arabidopsis thaliana]
  misc_feature (1)..(198): Homolog of NCBI NO: 15237359 NR Description: putative protein; protein id: At5g16480.1, by cDNA: 18232. [Arabidopsis thaliana] contains similarity to tyrosine phosphatase~gene_id:MQK4.21
  misc_feature (11)..(167): Homolog of NCBI NO: 15220383 NR Description: unkown protein; protein id: At1g05000.1
  misc_feature (11)..(167): Homolog of NCBI NO: 15225761 NR Description: unknown protein; protein id: At2g32960.1
  misc_feature (70)..(167): Homolog of NCBI NO: 30102538 NR Description: At2g32960 [Arabidopsis thaliana]
  misc_feature (11)..(83): Homolog of NCBI NO: 30102538 NR Description: At2g32960 [Arabidopsis thaliana]
  misc_feature (8)..(167): Homolog of NCBI NO: 18412419 NR Description: putative protein; protein id: At4g03960.1, by cDNA: 26983., supported by cDNA: gi_15810021, supported by gi_17981660 [Arabidopsis thaliana] >gi|15810022|gb|AAL06938.1|
  misc_feature (1)..(157): Homolog of NCBI NO: 6324296 NR Description: Synthetic interaction with Whi2; Siw14p cerevisiae] >gi|1730719|sp|P53965|YND2_YEAST HYPOTHETICAL 32.8 KD
  misc_feature (1)..(161): Homolog of NCBI NO: 15027525 NR Description: conserved hypothetical protein [Leishmania major]
METDDHNGDVLAPPSNFSMVEDGIYRSGFPRPENFSFLKTLNLRSIIYLCPEPYPEENLKFLEANNIKLYQFGIEGKTDPPTPMPKDTVLDALKVLVDVRNHPILIHCKRGKHRTGCLVGCLRKVQSWCLSSVLEEYQKNAGLKWRQRDLNFIEAFDIVSLRQCLLSIMYQYHGYGFKRRRLAYEEENVKTPKPQAARV

SEQ ID NO: 71635 - protein, 181 aa, Arabidopsis thaliana
  peptide (1)..(181): Ceres Seq. ID no. 4803279
  misc_feature (1)..(156): Pfam Name: Tyrosine phosphatase family Pfam Description: Tyrosine phosphatase family
  misc_feature (1)..(181): Homolog of NCBI NO: 15232985 NR Description: unknown protein; protein id: At3g02800.1 thaliana] >gi|6728982|gb|AAF26980.1|AC018363_25 unknown protein
  misc_feature (1)..(180): Homolog of NCBI NO: 21553927 NR Description: unknown [Arabidopsis thaliana]
  misc_feature (1)..(180): Homolog of NCBI NO: 15237359 NR Description: putative protein; protein id: At5g16480.1, by cDNA: 18232. [Arabidopsis thaliana] contains similarity to tyrosine phosphatase~gene_id:MQK4.21
  misc_feature (1)..(149): Homolog of NCBI NO: 15220383 NR Description: unkown protein; protein id: At1g05000.1
  misc_feature (1)..(149): Homolog of NCBI NO: 15225761 NR Description: unknown protein; protein id: At2g32960.1
  misc_feature (52)..(149): Homolog of NCBI NO: 30102538 NR Description: At2g32960 [Arabidopsis thaliana]
  misc_feature (1)..(65): Homolog of NCBI NO: 30102538 NR Description: At2g32960 [Arabidopsis thaliana]
  misc_feature (1)..(149): Homolog of NCBI NO: 18412419 NR Description: putative protein; protein id: At4g03960.1, by cDNA: 26983., supported by cDNA: gi_15810021, supported by gi_17981660 [Arabidopsis thaliana] >gi|15810022|gb|AAL06938.1|
  misc_feature (1)..(139): Homolog of NCBI NO: 6324296 NR Description: Synthetic interaction with Whi2; Siw14p cerevisiae] >gi|1730719|sp|P53965|YND2_YEAST HYPOTHETICAL 32.8 KD
  misc_feature (1)..(143): Homolog of NCBI NO: 15027525 NR Description: conserved hypothetical protein [Leishmania major]
MVEDGIYRSGFPRPENFSFLKTLNLRSIIYLCPEPYPEENLKFLEANNIKLYQFGIEGKTDPPTPMPKDTVLDALKVLVDVRNHPILIHCKRGKHRTGCLVGCLRKVQSWCLSSVLEEYQKNAGLKWRQRDLNFIEAFDIVSLRQCLLSIMYQYHGYGFKRRRLAYEEENVKTPKPQAARV

SEQ ID NO: 71636 - DNA, 669 bp, Arabidopsis thaliana
  misc_feature (1)..(669): Ceres Seq. ID no. 4803378
  misc_feature: MA Experiment ID: 20000315 Result: Up-regulated in Transcription
  misc_feature: MA Experiment 20000315 PARAMETER Experiment Name: At_14day_Shoots-Roots_Sub_P Parameter: Age (day) Value: 14
  misc_feature: MA Experiment 20000315 PARAMETER Experiment Name: At_14day_Shoots-Roots_Sub_P Parameter: Organism Value: A. thaliana
  misc_feature: MA Experiment 20000315 PARAMETER Experiment Name: At_14day_Shoots-Roots_Sub_P Parameter: Plant Line Value: WS
  misc_feature: MA Experiment 20000315 PARAMETER Experiment Name: At_14day_Shoots-Roots_Sub_P Parameter: Tissue Value: Shoots vs. Whole Plant
atgaaaggtcttctgcattttcttttagccaaaatcattttgttggctttagcatcttcgtttgtatattgttacgaaccatctcctcttcaagactactgtgttgccaccaacgaaactaatggagtttatgtaaatggaaagttctgcaaagatccaaaatgtgtaacggcgaatgatttttacacttccggcctaaacgttcccggaaataccagcaccggtccgggcgtcaaaatcaccgtcgtggatgtcaaaagaatgcctggtctcaacactcttggggtcgacattgcccgcattgacttcgccccgggcggtctatacccacctcacacccacccacgtggcagcgagatcttcttagtcatgaagggcaagcttttcgttggatttgtgtcgtcgaacgaatacaactacacgctcttcaccaaagttctttatccgggagatgtatttgtgtttcccaaaggtttgatacaatttcatgcgaatattggaaagacaaatgcggttgtgattgctgcaactgggagccaaaaccccggtaggatcataataggtaatgcggttttcggatcgaaacctttgattgatcccaaggttttggctaaagcttttgcgttggacttcaacaaagtgaaatattttcaggcagtgttctcttga

SEQ ID NO: 71637 - protein, 222 aa, Arabidopsis thaliana
  peptide (1)..(222): Ceres Seq. ID no. 4803379
  misc_feature (64)..(215): Pfam Name: Cupin Pfam Description: Cupin
  misc_feature (1)..(222): Homolog of NCBI NO: 15229245 NR Description: germin-like protein; protein id: At3g04190.1
  misc_feature (1)..(222): Homolog of NCBI NO: 15229243 NR Description: germin-like protein; protein id: At3g04180.1
  misc_feature (1)..(222): Homolog of NCBI NO: 15229234 NR Description: germin-like protein; protein id: At3g04150.1
  misc_feature (1)..(222): Homolog of NCBI NO: 15229241 NR Description: germin-like protein; protein id: At3g04170.1
  misc_feature (1)..(222): Homolog of NCBI NO: 15230587 NR Description: germin-like protein; protein id: At3g05950.1
  misc_feature (1)..(221): Homolog of NCBI NO: 15229247 NR Description: germin-like protein; protein id: At3g04200.1
  misc_feature (9)..(221): Homolog of NCBI NO: 15241662 NR Description: germin-like protein (GLP2a) copy2; protein id:
  misc_feature (9)..(221): Homolog of NCBI NO: 15241640 NR Description: germin - like protein; protein id: At5g39130.1, by cDNA: gi_17065441 [Arabidopsis thaliana]
  misc_feature (9)..(221): Homolog of NCBI NO: 22327459 NR Description: germin-like protein (GLP2a) copy1; protein id:
  misc_feature (9)..(221): Homolog of NCBI NO: 2129594 NR Description: germin type 2 - Arabidopsis thaliana
MKGLLHFLLAKIILLALASSFVYCYEPSPLQDYCVATNETNGVYVNGKFCKDPKCVTANDFYTSGLNVPGNTSTGPGVKITVVDVKRMPGLNTLGVDIARIDFAPGGLYPPHTHPRGSEIFLVMKGKLFVGFVSSNEYNYTLFTKVLYPGDVFVFPKGLIQFHANIGKTNAVVIAATGSQNPGRIIIGNAVFGSKPLIDPKVLAKAFALDFNKVKYFQAVFS

SEQ ID NO: 71638 - protein, 135 aa, Arabidopsis thaliana
  peptide (1)..(135): Ceres Seq. ID no. 4803380
  misc_feature (1)..(128): Pfam Name: Cupin Pfam Description: Cupin
  misc_feature (1)..(135): Homolog of NCBI NO: 15229245 NR Description: germin-like protein; protein id: At3g04190.1
  misc_feature (1)..(135): Homolog of NCBI NO: 15229243 NR Description: germin-like protein; protein id: At3g04180.1
  misc_feature (1)..(135): Homolog of NCBI NO: 15229234 NR Description: germin-like protein; protein id: At3g04150.1
  misc_feature (1)..(135): Homolog of NCBI NO: 15229241 NR Description: germin-like protein; protein id: At3g04170.1
  misc_feature (1)..(135): Homolog of NCBI NO: 15230587 NR Description: germin-like protein; protein id: At3g05950.1
  misc_feature (1)..(134): Homolog of NCBI NO: 15229247 NR Description: germin-like protein; protein id: At3g04200.1
  misc_feature (1)..(134): Homolog of NCBI NO: 15241662 NR Description: germin-like protein (GLP2a) copy2; protein id:
  misc_feature (1)..(134): Homolog of NCBI NO: 15241640 NR Description: germin - like protein; protein id: At5g39130.1, by cDNA: gi_17065441 [Arabidopsis thaliana]
  misc_feature (1)..(134): Homolog of NCBI NO: 22327459 NR Description: germin-like protein (GLP2a) copy1; protein id:
  misc_feature (1)..(134): Homolog of NCBI NO: 2129594 NR Description: germin type 2 - Arabidopsis thaliana
MPGLNTLGVDIARIDFAPGGLYPPHTHPRGSEIFLVMKGKLFVGFVSSNEYNYTLFTKVLYPGDVFVFPKGLIQFHANIGKTNAVVIAATGSQNPGRIIIGNAVFGSKPLIDPKVLAKAFALDFNKVKYFQAVFS

SEQ ID NO: 71639 - DNA, 1437 bp, Arabidopsis thaliana
  misc_feature (1)..(1437): Ceres Seq. ID no. 4803596
  misc_feature: MA Experiment ID: 20000355 Result: Up-regulated in Transcription
  misc_feature: MA Experiment 20000355 PARAMETER Experiment Name: At_Siliques_Sub_P Parameter: Age (day) Value: 21
  misc_feature: MA Experiment 20000355 PARAMETER Experiment Name: At_Siliques_Sub_P Parameter: Organism Value: A. thaliana
  misc_feature: MA Experiment 20000355 PARAMETER Experiment Name: At_Siliques_Sub_P Parameter: Plant Line Value: WS
  misc_feature: MA Experiment 20000355 PARAMETER Experiment Name: At_Siliques_Sub_P Parameter: Tissue Value: Less Than 5mm Siliques vs. Whole Plant
  misc_feature: MA Experiment ID: 20000440 Result: Up-regulated in Transcription
  misc_feature: MA Experiment 20000440 PARAMETER Experiment Name: At_Closed-Flower__Sub_P Parameter: Tissue Value: Closed Flower vs. Whole Plant
atggaacttcctgcgacaaagttacgaataggactagtgatatttcctcttattctacttacgatagctccaatcctttatctcttttttggttatcctctctattattcaacatcaacatacaaacatttatcgaattcatcatcgtcgtcggcaatatcttctccatctaggtataaccattcatcatcatcatcagatagttataagacagaagattcagaaccatcgtcgtatgataatgattacgacgacacatatcatgatcccaagtcatcatctttgcataacaatgatcgtctatccatctcatcatcgaatggtcatcatcaagtaactcctaagaaagagcaccgccggaaaaagagaaaacgtaaatgcgatatattctccggcgagtggatcccaaaccctaaagccccgtactacacaaacacgacatgcagggcgatacacgaacaccaaaactgcatcaagtatggaagacctgatttaggtttcatgaaatggagatggaaacctaaagaatgtgatctccctctgtttgatccttacgagtttctggaaatagttagaggaacaagaatggcgttcgttggtgactccgttagcagaaaccacgttcagtctttgatctgcctactctctcgggtggaacatcctgagggtgactcacaacaggagtttaatttccaacgatggaaatacaaaacgtacaacttcacgatcgccacattttggacaacacatttggttcgcgctgaagaaacggaaaccggtccgacaggtcctaattcattctacaatctctacctcgacgaacctgaccctacttgggcttcccaaatcggtgagttcgattacataatcatctcatctggacaatggtttttccgaccactcttccttttcgacaaacaaaaaaggataggatgtttgtattgctacattcccggagtcagaaatgtcggggcacatttcgcgtatagaagagcattgagaacaacattcaagacaattcttggattagagaattttaaaggagaagtgtttctgaggacatttgctccttcacatttcgaaggtggagaatgggacaaaggtggaaattgcttgaaaacgcgaccatataggagcaatgagacagagttagatggtatgaatctagagacacacagcattcaactcgatgaatttcgcattgcaaacagagacaaaaacagaaatgacggattaaatttgagattactagatgtcacacagatgatgttgttaagaccagatggacatccgagcagattcggacataaacgagaagataaagttatcttgtataatgattgtgtacattggtgtttgccaggtccaattgattcatggaacgattttttactagacatgttgaaaaatagagatttaaagagattaaaatactag

SEQ ID NO: 71640 - protein, 478 aa, Arabidopsis thaliana
  peptide (1)..(478): Ceres Seq. ID no. 4803597
  misc_feature (298)..(468): Pfam Name: Arabidopsis proteins of unknown function Pfam Description: Arabidopsis proteins of unknown function
  misc_feature (1)..(368): Homolog of NCBI NO: 15232907 NR Description: hypothetical protein; protein id: At3g02440.1 thaliana] >gi|6957707|gb|AAF32451.1| hypothetical protein
  misc_feature (127)..(474): Homolog of NCBI NO: 15237213 NR Description: putative protein; protein id: At5g15900.1
  misc_feature (33)..(469): Homolog of NCBI NO: 15237211 NR Description: putative protein; protein id: At5g15890.1
  misc_feature (127)..(468): Homolog of NCBI NO: 34911880 NR Description: OSJNBb0032K15.17 [Oryza sativa (japonica
  misc_feature (120)..(468): Homolog of NCBI NO: 34898638 NR Description: contains ESTs to Oryza sativa chromosome 1, OSJNBb0032K15.17~unknown protein
  misc_feature (126)..(470): Homolog of NCBI NO: 34911888 NR Description: OSJNBb0032K15.21 [Oryza sativa (japonica
  misc_feature (126)..(475): Homolog of NCBI NO: 30678135 NR Description: expressed protein [Arabidopsis thaliana] unknown protein [Arabidopsis thaliana]
  misc_feature (126)..(470): Homolog of NCBI NO: 7486743 NR Description: hypothetical protein F9D16.260 - Arabidopsis >gi|4454048|emb|CAA23045.1| putative protein [Arabidopsis >gi|7269228|emb|CAB81297.1| putative protein [Arabidopsis
  misc_feature (126)..(470): Homolog of NCBI NO: 30686312 NR Description: expressed protein [Arabidopsis thaliana]
  misc_feature (126)..(472): Homolog of NCBI NO: 15234058 NR Description: hypothetical protein; protein id: At4g01080.1
MELPATKLRIGLVIFPLILLTIAPILYLFFGYPLYYSTSTYKHLSNSSSSSAISSPSRYNHSSSSSDSYKTEDSEPSSYDNDYDDTYHDPKSSSLHNNDRLSISSSNGHHQVTPKKEHRRKKRKRKCDIFSGEWIPNPKAPYYTNTTCRAIHEHQNCIKYGRPDLGFMKWRWKPKECDLPLFDPYEFLEIVRGTRMAFVGDSVSRNHVQSLICLLSRVEHPEGDSQQEFNFQRWKYKTYNFTIATFWTTHLVRAEETETGPTGPNSFYNLYLDEPDPTWASQIGEFDYIIISSGQWFFRPLFLFDKQKRIGCLYCYIPGVRNVGAHFAYRRALRTTFKTILGLENFKGEVFLRTFAPSHFEGGEWDKGGNCLKTRPYRSNETELDGMNLETHSIQLDEFRIANRDKNRNDGLNLRLLDVTQMMLLRPDGHPSRFGHKREDKVILYNDCVHWCLPGPIDSWNDFLLDMLKNRDLKRLKY

SEQ ID NO: 71641 - protein, 311 aa, Arabidopsis thaliana
  peptide (1)..(311): Ceres Seq. ID no. 4803598
  misc_feature (131)..(301): Pfam Name: Arabidopsis proteins of unknown function Pfam Description: Arabidopsis proteins of unknown function
  misc_feature (1)..(201): Homolog of NCBI NO: 15232907 NR Description: hypothetical protein; protein id: At3g02440.1 thaliana] >gi|6957707|gb|AAF32451.1| hypothetical protein
  misc_feature (1)..(307): Homolog of NCBI NO: 15237213 NR Description: putative protein; protein id: At5g15900.1
  misc_feature (1)..(302): Homolog of NCBI NO: 15237211 NR Description: putative protein; protein id: At5g15890.1
  misc_feature (1)..(301): Homolog of NCBI NO: 34911880 NR Description: OSJNBb0032K15.17 [Oryza sativa (japonica
  misc_feature (1)..(301): Homolog of NCBI NO: 34898638 NR Description: contains ESTs to Oryza sativa chromosome 1, OSJNBb0032K15.17~unknown protein
  misc_feature (1)..(303): Homolog of NCBI NO: 34911888 NR Description: OSJNBb0032K15.21 [Oryza sativa (japonica
  misc_feature (1)..(308): Homolog of NCBI NO: 30678135 NR Description: expressed protein [Arabidopsis thaliana] unknown protein [Arabidopsis thaliana]
  misc_feature (1)..(303): Homolog of NCBI NO: 7486743 NR Description: hypothetical protein F9D16.260 - Arabidopsis >gi|4454048|emb|CAA23045.1| putative protein [Arabidopsis >gi|7269228|emb|CAB81297.1| putative protein [Arabidopsis
  misc_feature (1)..(303): Homolog of NCBI NO: 30686312 NR Description: expressed protein [Arabidopsis thaliana]
  misc_feature (1)..(305): Homolog of NCBI NO: 15234058 NR Description: hypothetical protein; protein id: At4g01080.1
MKWRWKPKECDLPLFDPYEFLEIVRGTRMAFVGDSVSRNHVQSLICLLSRVEHPEGDSQQEFNFQRWKYKTYNFTIATFWTTHLVRAEETETGPTGPNSFYNLYLDEPDPTWASQIGEFDYIIISSGQWFFRPLFLFDKQKRIGCLYCYIPGVRNVGAHFAYRRALRTTFKTILGLENFKGEVFLRTFAPSHFEGGEWDKGGNCLKTRPYRSNETELDGMNLETHSIQLDEFRIANRDKNRNDGLNLRLLDVTQMMLLRPDGHPSRFGHKREDKVILYNDCVHWCLPGPIDSWNDFLLDMLKNRDLKRLKY

SEQ ID NO: 71642 - protein, 283 aa, Arabidopsis thaliana
  peptide (1)..(283): Ceres Seq. ID no. 4803599
  misc_feature (103)..(273): Pfam Name: Arabidopsis proteins of unknown function Pfam Description: Arabidopsis proteins of unknown function
  misc_feature (1)..(275): Homolog of NCBI NO: 7486743 NR Description: hypothetical protein F9D16.260 - Arabidopsis >gi|4454048|emb|CAA23045.1| putative protein [Arabidopsis >gi|7269228|emb|CAB81297.1| putative protein [Arabidopsis
  misc_feature (1)..(275): Homolog of NCBI NO: 30686312 NR Description: expressed protein [Arabidopsis thaliana]
  misc_feature (1)..(279): Homolog of NCBI NO: 15237213 NR Description: putative protein; protein id: At5g15900.1
  misc_feature (1)..(273): Homolog of NCBI NO: 34911880 NR Description: OSJNBb0032K15.17 [Oryza sativa (japonica
  misc_feature (1)..(275): Homolog of NCBI NO: 34911888 NR Description: OSJNBb0032K15.21 [Oryza sativa (japonica
  misc_feature (1)..(280): Homolog of NCBI NO: 30678135 NR Description: expressed protein [Arabidopsis thaliana] unknown protein [Arabidopsis thaliana]
  misc_feature (1)..(273): Homolog of NCBI NO: 34898638 NR Description: contains ESTs to Oryza sativa chromosome 1, OSJNBb0032K15.17~unknown protein
  misc_feature (1)..(274): Homolog of NCBI NO: 15237211 NR Description: putative protein; protein id: At5g15890.1
  misc_feature (1)..(173): Homolog of NCBI NO: 15232907 NR Description: hypothetical protein; protein id: At3g02440.1 thaliana] >gi|6957707|gb|AAF32451.1| hypothetical protein
  misc_feature (1)..(277): Homolog of NCBI NO: 15234058 NR Description: hypothetical protein; protein id: At4g01080.1
MAFVGDSVSRNHVQSLICLLSRVEHPEGDSQQEFNFQRWKYKTYNFTIATFWTTHLVRAEETETGPTGPNSFYNLYLDEPDPTWASQIGEFDYIIISSGQWFFRPLFLFDKQKRIGCLYCYIPGVRNVGAHFAYRRALRTTFKTILGLENFKGEVFLRTFAPSHFEGGEWDKGGNCLKTRPYRSNETELDGMNLETHSIQLDEFRIANRDKNRNDGLNLRLLDVTQMMLLRPDGHPSRFGHKREDKVILYNDCVHWCLPGPIDSWNDFLLDMLKNRDLKRLKY

SEQ ID NO: 71643 - DNA, 2658 bp, Arabidopsis thaliana
  misc_feature (1)..(2658): Ceres Seq. ID no. 4803721
  misc_feature: MA Experiment ID: 20000307 Result: Up-regulated in Transcription
  misc_feature: MA Experiment 20000307 PARAMETER Experiment Name: At_Germinating_Seeds_Sub_P Parameter: Age (hr) Value: 24 vs. 0
  misc_feature: MA Experiment 20000307 PARAMETER Experiment Name: At_Germinating_Seeds_Sub_P Parameter: Organism Value: A. thaliana
  misc_feature: MA Experiment 20000307 PARAMETER Experiment Name: At_Germinating_Seeds_Sub_P Parameter: Plant Line Value: WS
  misc_feature: MA Experiment 20000307 PARAMETER Experiment Name: At_Germinating_Seeds_Sub_P Parameter: Tissue Value: Germinating Seeds
  misc_feature: MA Experiment ID: 20000314 Result: Up-regulated in Transcription
  misc_feature: MA Experiment 20000314 PARAMETER Experiment Name: At_14day_Shoots-Roots_Sub_P Parameter: Age (day) Value: 14
  misc_feature: MA Experiment 20000314 PARAMETER Experiment Name: At_14day_Shoots-Roots_Sub_P Parameter: Organism Value: A. thaliana
  misc_feature: MA Experiment 20000314 PARAMETER Experiment Name: At_14day_Shoots-Roots_Sub_P Parameter: Plant Line Value: WS
  misc_feature: MA Experiment 20000314 PARAMETER Experiment Name: At_14day_Shoots-Roots_Sub_P Parameter: Tissue Value: Roots vs. Whole Plant
  misc_feature: MA Experiment ID: 20000328 Result: Down-regulated in Transcription
  misc_feature: MA Experiment 20000328 PARAMETER Experiment Name: At_42deg_Heat_Sub_P Parameter: Age (day) Value: 14
  misc_feature: MA Experiment 20000328 PARAMETER Experiment Name: At_42deg_Heat_Sub_P Parameter: Organism Value: A. thaliana
  misc_feature: MA Experiment 20000328 PARAMETER Experiment Name: At_42deg_Heat_Sub_P Parameter: Plant Line Value: WS
  misc_feature: MA Experiment 20000328 PARAMETER Experiment Name: At_42deg_Heat_Sub_P Parameter: Temperature (deg C) Value: 42 vs. 22
  misc_feature: MA Experiment 20000328 PARAMETER Experiment Name: At_42deg_Heat_Sub_P Parameter: Timepoint (hr) Value: 6
  misc_feature: MA Experiment 20000328 PARAMETER Experiment Name: At_42deg_Heat_Sub_P Parameter: Tissue Value: Aerial
  misc_feature: MA Experiment ID: 20000347 Result: Up-regulated in Transcription
  misc_feature: MA Experiment 20000347 PARAMETER Experiment Name: At_2mM_SA_Sub_P Parameter: Age (day) Value: 14
  misc_feature: MA Experiment 20000347 PARAMETER Experiment Name: At_2mM_SA_Sub_P Parameter: Organism Value: A. thaliana
  misc_feature: MA Experiment 20000347 PARAMETER Experiment Name: At_2mM_SA_Sub_P Parameter: Plant Line Value: WS
  misc_feature: MA Experiment 20000347 PARAMETER Experiment Name: At_2mM_SA_Sub_P Parameter: Timepoint (hr) Value: 6
  misc_feature: MA Experiment 20000347 PARAMETER Experiment Name: At_2mM_SA_Sub_P Parameter: Tissue Value: Aerial
  misc_feature: MA Experiment 20000347 PARAMETER Experiment Name: At_2mM_SA_Sub_P Parameter: Treatment Value: 2mM SA vs. No Treatment
  misc_feature: MA Experiment ID: 20000352 Result: Down-regulated in Transcription
  misc_feature: MA Experiment 20000352 PARAMETER Experiment Name: At_Drought_Sub_P Parameter: Age (day) Value: 7
  misc_feature: MA Experiment 20000352 PARAMETER Experiment Name: At_Drought_Sub_P Parameter: Organism Value: A. thaliana
  misc_feature: MA Experiment 20000352 PARAMETER Experiment Name: At_Drought_Sub_P Parameter: Plant Line Value: WS
  misc_feature: MA Experiment 20000352 PARAMETER Experiment Name: At_Drought_Sub_P Parameter: Timepoint (hr) Value: 6
  misc_feature: MA Experiment 20000352 PARAMETER Experiment Name: At_Drought_Sub_P Parameter: Tissue Value: Whole Plant
  misc_feature: MA Experiment 20000352 PARAMETER Experiment Name: At_Drought_Sub_P Parameter: Treatment Value: Drought vs. No Drought
  misc_feature: MA Experiment ID: 20000355 Result: Down-regulated in Transcription
  misc_feature: MA Experiment 20000355 PARAMETER Experiment Name: At_Siliques_Sub_P Parameter: Age (day) Value: 21
  misc_feature: MA Experiment 20000355 PARAMETER Experiment Name: At_Siliques_Sub_P Parameter: Organism Value: A. thaliana
  misc_feature: MA Experiment 20000355 PARAMETER Experiment Name: At_Siliques_Sub_P Parameter: Plant Line Value: WS
  misc_feature: MA Experiment 20000355 PARAMETER Experiment Name: At_Siliques_Sub_P Parameter: Tissue Value: Less Than 5mm Siliques vs. Whole Plant
  misc_feature: MA Experiment ID: 20000440 Result: Down-regulated in Transcription
  misc_feature: MA Experiment 20000440 PARAMETER Experiment Name: At_Closed-Flower__Sub_P Parameter: Tissue Value: Closed Flower vs. Whole Plant
  misc_feature: MA Experiment ID: 20000634 Result: Down-regulated in Transcription
  misc_feature: MA Experiment 20000634 PARAMETER Experiment Name: At_10percent_PEG_Sub_P Parameter: Age (day) Value: 12
  misc_feature: MA Experiment 20000634 PARAMETER Experiment Name: At_10percent_PEG_Sub_P Parameter: Organism Value: A. thaliana
  misc_feature: MA Experiment 20000634 PARAMETER Experiment Name: At_10percent_PEG_Sub_P Parameter: Plant Line Value: WS
  misc_feature: MA Experiment 20000634 PARAMETER Experiment Name: At_10percent_PEG_Sub_P Parameter: Timepoint (day) Value: 12
  misc_feature: MA Experiment 20000634 PARAMETER Experiment Name: At_10percent_PEG_Sub_P Parameter: Tissue Value: Whole Plant
  misc_feature: MA Experiment 20000634 PARAMETER Experiment Name: At_10percent_PEG_Sub_P Parameter: Treatment Value: 10% PEG vs. No Treatment
atggagagacattttgtgtttattgccacctatttgctgatatttcatcttgttcaagctcaaaatcaaacaggattcattagtgtggattgtggtttatcccttcttgagtctccttacgatgcaccacaaacgggtttaacatatacatcagatgccgatttagtagctagtggcaaaaccggtagactcgccaaagaatttgaaccactcgttgataagccgactttgacactgagatactttccagagggagtacgaaactgctacaatctaaatgtcaccagcgacaccaactatttaatcaaggccacatttgtatatgggaattacgatggtcttaatgttgggccaaacttcaacctttatctcggtccgaatttgtggacaacggtgagtagcaatgacactatagaggaaataatccttgtgaccagatccaactctttacaggtgtgtcttgttaagacgggaataagtataccttttataaatatgttggagctacgaccgatgaagaaaaatatgtacgttactcaaagcggttcactgaagtatttattcagagggtatattagcaattcaagtactcgtataaggttcccggatgatgtctatgaccgtaaatggtacccgctcttcgacgactcatggacacaagtaactacaaatctcaaagtgaacacaagtattacttatgaactaccacaaagtgtaatggcaaaagccgcaacgccaattaaggctaacgacaccttgaacattacatggacggtagagccccctactacacagttttactcttacgtacacattgcagagattcaggctctaagggcaaacgagacaagggagttcaatgtgacactgaatggagaatatacttttggaccttttagtcctataccgctaaaaaccgcatccatagtcgacttaagcccagggcaatgcgatggagggagatgcattttgcaggttgtgaagacgctgaaatctacgcttcctcctttacttaatgctatcgaagctttcaccgtgattgatttcccgcaaatggagacaaatgaaaatgatgttgctgggatcaagaatgttcaaggtacttatggattgagtagaattagttggcaaggagatccatgtgtccccaaacagttattgtgggatggtctaaactgcaaaaactcggatatttctacgccaccgataatcacttccttagacttatcttcaagtggattaactgggatcatcacgcaagccattaagaatcttactcacctgcaaatattggacttgtcagataataatttgactggagaagtacctgagtttttagctgacataaaatcactcttggtcataaacttaagtggtaataatctaagtggctcagttcctccctcacttcttcagaagaaaggaatgaagttaaatgtcgaaggcaatcctcatattctttgcacaacgggttcttgtgtcaagaaaaaagaggatggacataagaaaaagagtgtcatagtgccagttgttgcatcaattgcttcaatagctgttcttataggtgcattggttctgtttctaattcttagaaagaaaaggtcaccaaaagttgaagggccaccaccatcttatatgcaagcatcagatggtagattgcctagatcatctgaaccggcaatcgtaacgaaaaatagaaggttttcttattcacaagttgtgataatgacaaataacttccaaagaatccttgggaaaggagggtttggaatggtttatcatggtttcgtgaacggtacagagcaagtagctgttaagatactctcccattcatcgtctcaaggatataaacaattcaaagctgaggtagaacttcttcttagagttcatcacaagaacttggttggtcttgttgggtactgcgacgaaggagataacttggctcttatctatgaatacatggccaatggagatctaaaagaacatatgtcaggaacacgtaaccgctttattttgaattggggaactagactaaaaatagtcatcgagtctgcacaaggactcgagtacttgcataatggttgcaaaccaccaatggtacatagggacgtcaaaactacaaatatattgttgaacgaacactttgaggccaaacttgcggattttgggctttcgagatcattcctgatcgaaggtgaaactcatgtatcaacagttgttgctggaactcctggatatctcgatcctgaataccatagaacaaattggttgacagaaaagagtgatgtttatagttttgggattctattgttggagattatcacaaaccgacatgtgatcgaccaaagccgtgaaaagccacacataggagaatgggtaggagtaatgcttacaaaaggagacatccaaagcattatggatccaagtctcaatgaagattatgattccggttctgtttggaaagctgttgaactagcaatgagttgtctaaatcattcttcagcgagaagaccgaccatgtcccaagttgttattgaattgaacgagtgtctggcttctgaaaatgcaaggggaggagcaagtcgggacatggaatcaaagagttctatagaagtgagcttgacgtttggtactgaagtgagcccaaacgctcgatag

SEQ ID NO: 71644 - protein, 885 aa, Arabidopsis thaliana
  peptide (1)..(885): Ceres Seq. ID no. 4803722
  misc_feature (199)..(885): Homolog of NCBI NO: 25387133 NR Description: probable protein kinase [imported] - Arabidopsis >gi|9802785|gb|AAF99854.1|AC015448_4 Putative protein kinase
  misc_feature (415)..(851): Homolog of NCBI NO: 8778538 NR Description: F22G5.7 [Arabidopsis thaliana]
  misc_feature (5)..(358): Homolog of NCBI NO: 8778538 NR Description: F22G5.7 [Arabidopsis thaliana]
  misc_feature (298)..(622): Homolog of NCBI NO: 15238490 NR Description: leucine-rich repeat transmembrane protein kinase,
  misc_feature (648)..(885): Homolog of NCBI NO: 15238490 NR Description: leucine-rich repeat transmembrane protein kinase,
  misc_feature (62)..(262): Homolog of NCBI NO: 15238490 NR Description: leucine-rich repeat transmembrane protein kinase,
  misc_feature (14)..(64): Homolog of NCBI NO: 15238490 NR Description: leucine-rich repeat transmembrane protein kinase,
  misc_feature (6)..(568): Homolog of NCBI NO: 25387154 NR Description: protein F22G5.6 [imported] - Arabidopsis thaliana
  misc_feature (359)..(521): Homolog of NCBI NO: 8778538 NR Description: F22G5.7 [Arabidopsis thaliana]
  misc_feature (114)..(881): Homolog of NCBI NO: 34895444 NR Description: putative serine/threonine-specific receptor
MERHFVFIATYLLIFHLVQAQNQTGFISVDCGLSLLESPYDAPQTGLTYTSDADLVASGKTGRLAKEFEPLVDKPTLTLRYFPEGVRNCYNLNVTSDTNYLIKATFVYGNYDGLNVGPNFNLYLGPNLWTTVSSNDTIEEIILVTRSNSLQVCLVKTGISIPFINMLELRPMKKNMYVTQSGSLKYLFRGYISNSSTRIRFPDDVYDRKWYPLFDDSWTQVTTNLKVNTSITYELPQSVMAKAATPIKANDTLNITWTVEPPTTQFYSYVHIAEIQALRANETREFNVTLNGEYTFGPFSPIPLKTASIVDLSPGQCDGGRCILQVVKTLKSTLPPLLNAIEAFTVIDFPQMETNENDVAGIKNVQGTYGLSRISWQGDPCVPKQLLWDGLNCKNSDISTPPIITSLDLSSSGLTGIITQAIKNLTHLQILDLSDNNLTGEVPEFLADIKSLLVINLSGNNLSGSVPPSLLQKKGMKLNVEGNPHILCTTGSCVKKKEDGHKKKSVIVPVVASIASIAVLIGALVLFLILRKKRSPKVEGPPPSYMQASDGRLPRSSEPAIVTKNRRFSYSQVVIMTNNFQRILGKGGFGMVYHGFVNGTEQVAVKILSHSSSQGYKQFKAEVELLLRVHHKNLVGLVGYCDEGDNLALIYEYMANGDLKEHMSGTRNRFILNWGTRLKIVIESAQGLEYLHNGCKPPMVHRDVKTTNILLNEHFEAKLADFGLSRSFLIEGETHVSTVVAGTPGYLDPEYHRTNWLTEKSDVYSFGILLLEIITNRHVIDQSREKPHIGEWVGVMLTKGDIQSIMDPSLNEDYDSGSVWKAVELAMSCLNHSSARRPTMSQVVIELNECLASENARGGASRDMESKSSIEVSLTFGTEVSPNAR

SEQ ID NO: 71645 - protein, 720 aa, Arabidopsis thaliana
  peptide (1)..(720): Ceres Seq. ID no. 4803723
  misc_feature (34)..(720): Homolog of NCBI NO: 25387133 NR Description: probable protein kinase [imported] - Arabidopsis >gi|9802785|gb|AAF99854.1|AC015448_4 Putative protein kinase
  misc_feature (250)..(686): Homolog of NCBI NO: 8778538 NR Description: F22G5.7 [Arabidopsis thaliana]
  misc_feature (1)..(193): Homolog of NCBI NO: 8778538 NR Description: F22G5.7 [Arabidopsis thaliana]
  misc_feature (133)..(457): Homolog of NCBI NO: 15238490 NR Description: leucine-rich repeat transmembrane protein kinase,
  misc_feature (483)..(720): Homolog of NCBI NO: 15238490 NR Description: leucine-rich repeat transmembrane protein kinase,
  misc_feature (1)..(97): Homolog of NCBI NO: 15238490 NR Description: leucine-rich repeat transmembrane protein kinase,
  misc_feature (1)..(403): Homolog of NCBI NO: 25387154 NR Description: protein F22G5.6 [imported] - Arabidopsis thaliana
  misc_feature (194)..(356): Homolog of NCBI NO: 8778538 NR Description: F22G5.7 [Arabidopsis thaliana]
  misc_feature (1)..(716): Homolog of NCBI NO: 34895444 NR Description: putative serine/threonine-specific receptor
  misc_feature (248)..(720): Homolog of NCBI NO: 25387154 NR Description: protein F22G5.6 [imported] - Arabidopsis thaliana
MLELRPMKKNMYVTQSGSLKYLFRGYISNSSTRIRFPDDVYDRKWYPLFDDSWTQVTTNLKVNTSITYELPQSVMAKAATPIKANDTLNITWTVEPPTTQFYSYVHIAEIQALRANETREFNVTLNGEYTFGPFSPIPLKTASIVDLSPGQCDGGRCILQVVKTLKSTLPPLLNAIEAFTVIDFPQMETNENDVAGIKNVQGTYGLSRISWQGDPCVPKQLLWDGLNCKNSDISTPPIITSLDLSSSGLTGIITQAIKNLTHLQILDLSDNNLTGEVPEFLADIKSLLVINLSGNNLSGSVPPSLLQKKGMKLNVEGNPHILCTTGSCVKKKEDGHKKKSVIVPVVASIASIAVLIGALVLFLILRKKRSPKVEGPPPSYMQASDGRLPRSSEPAIVTKNRRFSYSQVVIMTNNFQRILGKGGFGMVYHGFVNGTEQVAVKILSHSSSQGYKQFKAEVELLLRVHHKNLVGLVGYCDEGDNLALIYEYMANGDLKEHMSGTRNRFILNWGTRLKIVIESAQGLEYLHNGCKPPMVHRDVKTTNILLNEHFEAKLADFGLSRSFLIEGETHVSTVVAGTPGYLDPEYHRTNWLTEKSDVYSFGILLLEIITNRHVIDQSREKPHIGEWVGVMLTKGDIQSIMDPSLNEDYDSGSVWKAVELAMSCLNHSSARRPTMSQVVIELNECLASENARGGASRDMESKSSIEVSLTFGTEVSPNAR

SEQ ID NO: 71646 - protein, 714 aa, Arabidopsis thaliana
  peptide (1)..(714): Ceres Seq. ID no. 4803724
  misc_feature (28)..(714): Homolog of NCBI NO: 25387133 NR Description: probable protein kinase [imported] - Arabidopsis >gi|9802785|gb|AAF99854.1|AC015448_4 Putative protein kinase
  misc_feature (244)..(680): Homolog of NCBI NO: 8778538 NR Description: F22G5.7 [Arabidopsis thaliana]
  misc_feature (1)..(187): Homolog of NCBI NO: 8778538 NR Description: F22G5.7 [Arabidopsis thaliana]
  misc_feature (127)..(451): Homolog of NCBI NO: 15238490 NR Description: leucine-rich repeat transmembrane protein kinase,
  misc_feature (477)..(714): Homolog of NCBI NO: 15238490 NR Description: leucine-rich repeat transmembrane protein kinase,
  misc_feature (1)..(91): Homolog of NCBI NO: 15238490 NR Description: leucine-rich repeat transmembrane protein kinase,
  misc_feature (1)..(397): Homolog of NCBI NO: 25387154 NR Description: protein F22G5.6 [imported] - Arabidopsis thaliana
  misc_feature (188)..(350): Homolog of NCBI NO: 8778538 NR Description: F22G5.7 [Arabidopsis thaliana]
  misc_feature (1)..(710): Homolog of NCBI NO: 34895444 NR Description: putative serine/threonine-specific receptor
  misc_feature (242)..(714): Homolog of NCBI NO: 25387154 NR Description: protein F22G5.6 [imported] - Arabidopsis thaliana
MKKNMYVTQSGSLKYLFRGYISNSSTRIRFPDDVYDRKWYPLFDDSWTQVTTNLKVNTSITYELPQSVMAKAATPIKANDTLNITWTVEPPTTQFYSYVHIAEIQALRANETREFNVTLNGEYTFGPFSPIPLKTASIVDLSPGQCDGGRCILQVVKTLKSTLPPLLNAIEAFTVIDFPQMETNENDVAGIKNVQGTYGLSRISWQGDPCVPKQLLWDGLNCKNSDISTPPIITSLDLSSSGLTGIITQAIKNLTHLQILDLSDNNLTGEVPEFLADIKSLLVINLSGNNLSGSVPPSLLQKKGMKLNVEGNPHILCTTGSCVKKKEDGHKKKSVIVPVVASIASIAVLIGALVLFLILRKKRSPKVEGPPPSYMQASDGRLPRSSEPAIVTKNRRFSYSQVVIMTNNFQRILGKGGFGMVYHGFVNGTEQVAVKILSHSSSQGYKQFKAEVELLLRVHHKNLVGLVGYCDEGDNLALIYEYMANGDLKEHMSGTRNRFILNWGTRLKIVIESAQGLEYLHNGCKPPMVHRDVKTTNILLNEHFEAKLADFGLSRSFLIEGETHVSTVVAGTPGYLDPEYHRTNWLTEKSDVYSFGILLLEIITNRHVIDQSREKPHIGEWVGVMLTKGDIQSIMDPSLNEDYDSGSVWKAVELAMSCLNHSSARRPTMSQVVIELNECLASENARGGASRDMESKSSIEVSLTFGTEVSPNAR

SEQ ID NO: 71647 - DNA, 1779 bp, Arabidopsis thaliana
  misc_feature (1)..(1779): Ceres Seq. ID no. 4803889
  misc_feature: MA Experiment ID: 20000235 Result: Up-regulated in Transcription
  misc_feature: MA Experiment 20000235 PARAMETER Experiment Name: At_Siliques_P Parameter: Age (day) Value: 21
  misc_feature: MA Experiment 20000235 PARAMETER Experiment Name: At_Siliques_P Parameter: Organism Value: A. thaliana
  misc_feature: MA Experiment 20000235 PARAMETER Experiment Name: At_Siliques_P Parameter: Plant Line Value: WS
  misc_feature: MA Experiment 20000235 PARAMETER Experiment Name: At_Siliques_P Parameter: Tissue Value: 5-10mm Siliques vs. Whole Plant
  misc_feature: MA Experiment ID: 20000265 Result: Up-regulated in Transcription
  misc_feature: MA Experiment 20000265 PARAMETER Experiment Name: At_Open_Flower_P Parameter: Age (day) Value: 21
  misc_feature: MA Experiment 20000265 PARAMETER Experiment Name: At_Open_Flower_P Parameter: Plant Line Value: WS
  misc_feature: MA Experiment 20000265 PARAMETER Experiment Name: At_Open_Flower_P Parameter: Tissue Value: Closed Flower vs. Whole Plant
  misc_feature: MA Experiment ID: 20000437 Result: Up-regulated in Transcription
  misc_feature: MA Experiment 20000437 PARAMETER Experiment Name: At_Drought_P Parameter: Age (day) Value: 8
  misc_feature: MA Experiment 20000437 PARAMETER Experiment Name: At_Drought_P Parameter: Organism Value: A. thaliana
  misc_feature: MA Experiment 20000437 PARAMETER Experiment Name: At_Drought_P Parameter: Plant Line Value: WS
  misc_feature: MA Experiment 20000437 PARAMETER Experiment Name: At_Drought_P Parameter: Timepoint (hr) Value: 24
  misc_feature: MA Experiment 20000437 PARAMETER Experiment Name: At_Drought_P Parameter: Tissue Value: Whole Plant
  misc_feature: MA Experiment 20000437 PARAMETER Experiment Name: At_Drought_P Parameter: Treatment Value: Drought vs. No Drought
  misc_feature: MA Experiment ID: 20000439 Result: Up-regulated in Transcription
  misc_feature: MA Experiment 20000439 PARAMETER Experiment Name: At_Roots__P Parameter: Age (day) Value: 14 vs. 21
  misc_feature: MA Experiment 20000439 PARAMETER Experiment Name: At_Roots__P Parameter: Organism Value: A. thaliana
  misc_feature: MA Experiment 20000439 PARAMETER Experiment Name: At_Roots__P Parameter: Tissue Value: Roots vs. Whole Plant
atgcggatgagccttcacttaaacaagaagcttctaaaagaaaagaaaacattgcagaattatccatccgaatatgggttcgcttcagacaccgatagaaatgagaagctcatcgttgttggatacgtcctgcggatatttgctcagagagttacaggcaagtttgttttgatgatgatatgggatgaagttggagaagataagtttgagagagaaaaagtgttgcttgatatagagcaggaatgtgtagaggcttaccggagaaaagttgaccatgccaatgtttcgaggtctcgtctacatcaagagctggcagaatctgaagccgaactcacccattttcttttgtgcctcggtgaaagatcagtacctggaagaccggagaaaaagggaggaacactgagggagcagctggattctattgcgcctgcactgcgtgagatgaggcttaggaaagacgagagagtgaagcagttccgatctgtcaaaggggaaattcagaaaatatcagcagaaatagcaggtagatcgacatatgaagactcaactagaaagataaccatagatgacaacgatctttctaataaaaaacttgaggaatatcagaatgaactgcatagactccatgatgagaagaatgagagactacagaaggttgatatatacatatgcgccattcgagatctatcagcaacattgggaacagaagcatcaatgatcataacaaagattcacccaagcttgaacgacctctatggaatatccaaaaacatcagtgatgatatcttaaaaaagcttaatggcactgttgtgtctctggaagaggaaaagcacaagcgccttgaaaagcttcaccatcttggtagagctttatcgaacctgtggaatctgatggatgcatcttatgaagatcgtcaaaagttttttcatgtcattgatttactgtcgtccgcaccatcagacgtgtgtgctcctggaagcattacattggacataattcagcaggctgaggctgaagtcaagagactagatcaactgaaagcaagcagaatcaaagaacttttcatcaagaagcaaaaggaactagaagatacgtgcaacatgtcgcatatggagactccatcaacggaaatgggaaatatcacgaaccttgtagactctggggaagttgaccatgttgaccttctagccgccatggatgaaaagatagcaagagcaaaggaagaagcagcaagtagaaaaggaataattgaaaaagttgataggtggatgttggcaagtgatgaagagcgctggctagaagaatatgaccaggacgagaatcggtactcagtaagtagaaatgctcatcgaaacctaaggagagcagaacgggcacgcataacagtcagcaaaatctcaggattagtggaatctatattggttaaggctaagagctgggaggtagaaagacagaaagtcttcttatacaatgaggtacctcttgttgcaatgttgcaagaatacaataagctgaggcaggaaaaagaaatggagaagcaaaggctccgggaaatgaagaagatgagcattccacaacctgtggctgagggagataatttttacatggcaaggccagctagcagcaataggcgaatatcaaatcgaagcatgaatggtggatttggaagtggaagtcctataaacagaaagtattcaggaggattcaacaatactaacaataattacacagcacttggtacatctataagaagagaaagcagaaagagtgaggcataa

SEQ ID NO: 71648 - protein, 592 aa, Arabidopsis thaliana
  peptide (1)..(592): Ceres Seq. ID no. 4803890
  misc_feature (70)..(592): Pfam Name: Microtubule associated protein (MAP65/ASE1 family) Pfam Description: Microtubule associated protein (MAP65/ASE1
  misc_feature (1)..(592): Homolog of NCBI NO: 15217774 NR Description: hypothetical protein; protein id: At1g27920.1
  misc_feature (57)..(588): Homolog of NCBI NO: 11558252 NR Description: microtubule-associated protein MAP65-1a
  misc_feature (57)..(587): Homolog of NCBI NO: 15240485 NR Description: putative protein; protein id: At5g55230.1 thaliana] >gi|9758120|dbj|BAB08592.1| similarity to unknown protein [Arabidopsis thaliana]
  misc_feature (57)..(592): Homolog of NCBI NO: 28200790 NR Description: 65kD microtubule associated protein [Daucus
  misc_feature (57)..(587): Homolog of NCBI NO: 18416818 NR Description: putative protein; protein id: At4g26760.1, by cDNA: 151418., supported by cDNA: gi_18377611 [Arabidopsis
  misc_feature (57)..(589): Homolog of NCBI NO: 11558254 NR Description: microtubule-associated protein MAP65-1b
  misc_feature (57)..(589): Homolog of NCBI NO: 11558256 NR Description: microtubule-associated protein MAP65-1c
  misc_feature (57)..(587): Homolog of NCBI NO: 21539547 NR Description: unknown protein [Arabidopsis thaliana]
  misc_feature (57)..(592): Homolog of NCBI NO: 27357984 NR Description: Unknown protein [Oryza sativa (japonica
  misc_feature (57)..(568): Homolog of NCBI NO: 25410943 NR Description: hypothetical protein At2g01910 [imported] - thaliana >gi|4522009|gb|AAD21782.1| unknown protein [Arabidopsis
MRMSLHLNKKLLKEKKTLQNYPSEYGFASDTDRNEKLIVVGYVLRIFAQRVTGKFVLMMIWDEVGEDKFEREKVLLDIEQECVEAYRRKVDHANVSRSRLHQELAESEAELTHFLLCLGERSVPGRPEKKGGTLREQLDSIAPALREMRLRKDERVKQFRSVKGEIQKISAEIAGRSTYEDSTRKITIDDNDLSNKKLEEYQNELHRLHDEKNERLQKVDIYICAIRDLSATLGTEASMIITKIHPSLNDLYGISKNISDDILKKLNGTVVSLEEEKHKRLEKLHHLGRALSNLWNLMDASYEDRQKFFHVIDLLSSAPSDVCAPGSITLDIIQQAEAEVKRLDQLKASRIKELFIKKQKELEDTCNMSHMETPSTEMGNITNLVDSGEVDHVDLLAAMDEKIARAKEEAASRKGIIEKVDRWMLASDEERWLEEYDQDENRYSVSRNAHRNLRRAERARITVSKISGLVESILVKAKSWEVERQKVFLYNEVPLVAMLQEYNKLRQEKEMEKQRLREMKKMSIPQPVAEGDNFYMARPASSNRRISNRSMNGGFGSGSPINRKYSGGFNNTNNNYTALGTSIRRESRKSEA

SEQ ID NO: 71649 - protein, 590 aa, Arabidopsis thaliana
  peptide (1)..(590): Ceres Seq. ID no. 4803891
  misc_feature (68)..(590): Pfam Name: Microtubule associated protein (MAP65/ASE1 family) Pfam Description: Microtubule associated protein (MAP65/ASE1
  misc_feature (1)..(590): Homolog of NCBI NO: 15217774 NR Description: hypothetical protein; protein id: At1g27920.1
  misc_feature (55)..(586): Homolog of NCBI NO: 11558252 NR Description: microtubule-associated protein MAP65-1a
  misc_feature (55)..(585): Homolog of NCBI NO: 15240485 NR Description: putative protein; protein id: At5g55230.1 thaliana] >gi|9758120|dbj|BAB08592.1| similarity to unknown protein [Arabidopsis thaliana]
  misc_feature (55)..(590): Homolog of NCBI NO: 28200790 NR Description: 65kD microtubule associated protein [Daucus
  misc_feature (55)..(585): Homolog of NCBI NO: 18416818 NR Description: putative protein; protein id: At4g26760.1, by cDNA: 151418., supported by cDNA: gi_18377611 [Arabidopsis
  misc_feature (55)..(587): Homolog of NCBI NO: 11558254 NR Description: microtubule-associated protein MAP65-1b
  misc_feature (55)..(587): Homolog of NCBI NO: 11558256 NR Description: microtubule-associated protein MAP65-1c
  misc_feature (55)..(585): Homolog of NCBI NO: 21539547 NR Description: unknown protein [Arabidopsis thaliana]
  misc_feature (55)..(590): Homolog of NCBI NO: 27357984 NR Description: Unknown protein [Oryza sativa (japonica
  misc_feature (55)..(566): Homolog of NCBI NO: 25410943 NR Description: hypothetical protein At2g01910 [imported] - thaliana >gi|4522009|gb|AAD21782.1| unknown protein [Arabidopsis
MSLHLNKKLLKEKKTLQNYPSEYGFASDTDRNEKLIVVGYVLRIFAQRVTGKFVLMMIWDEVGEDKFEREKVLLDIEQECVEAYRRKVDHANVSRSRLHQELAESEAELTHFLLCLGERSVPGRPEKKGGTLREQLDSIAPALREMRLRKDERVKQFRSVKGEIQKISAEIAGRSTYEDSTRKITIDDNDLSNKKLEEYQNELHRLHDEKNERLQKVDIYICAIRDLSATLGTEASMIITKIHPSLNDLYGISKNISDDILKKLNGTVVSLEEEKHKRLEKLHHLGRALSNLWNLMDASYEDRQKFFHVIDLLSSAPSDVCAPGSITLDIIQQAEAEVKRLDQLKASRIKELFIKKQKELEDTCNMSHMETPSTEMGNITNLVDSGEVDHVDLLAAMDEKIARAKEEAASRKGIIEKVDRWMLASDEERWLEEYDQDENRYSVSRNAHRNLRRAERARITVSKISGLVESILVKAKSWEVERQKVFLYNEVPLVAMLQEYNKLRQEKEMEKQRLREMKKMSIPQPVAEGDNFYMARPASSNRRISNRSMNGGFGSGSPINRKYSGGFNNTNNNYTALGTSIRRESRKSEA

SEQ ID NO: 71650 - protein, 535 aa, Arabidopsis thaliana
  peptide (1)..(535): Ceres Seq. ID no. 4803892
  misc_feature (13)..(535): Pfam Name: Microtubule associated protein (MAP65/ASE1 family) Pfam Description: Microtubule associated protein (MAP65/ASE1
  misc_feature (1)..(535): Homolog of NCBI NO: 15217774 NR Description: hypothetical protein; protein id: At1g27920.1
  misc_feature (1)..(531): Homolog of NCBI NO: 11558252 NR Description: microtubule-associated protein MAP65-1a
  misc_feature (1)..(530): Homolog of NCBI NO: 15240485 NR Description: putative protein; protein id: At5g55230.1 thaliana] >gi|9758120|dbj|BAB08592.1| similarity to unknown protein [Arabidopsis thaliana]
  misc_feature (1)..(535): Homolog of NCBI NO: 28200790 NR Description: 65kD microtubule associated protein [Daucus
  misc_feature (1)..(530): Homolog of NCBI NO: 18416818 NR Description: putative protein; protein id: At4g26760.1, by cDNA: 151418., supported by cDNA: gi_18377611 [Arabidopsis
  misc_feature (1)..(532): Homolog of NCBI NO: 11558254 NR Description: microtubule-associated protein MAP65-1b
  misc_feature (1)..(532): Homolog of NCBI NO: 11558256 NR Description: microtubule-associated protein MAP65-1c
  misc_feature (1)..(530): Homolog of NCBI NO: 21539547 NR Description: unknown protein [Arabidopsis thaliana]
  misc_feature (1)..(535): Homolog of NCBI NO: 27357984 NR Description: Unknown protein [Oryza sativa (japonica
  misc_feature (1)..(511): Homolog of NCBI NO: 25410943 NR Description: hypothetical protein At2g01910 [imported] - thaliana >gi|4522009|gb|AAD21782.1| unknown protein [Arabidopsis
MMIWDEVGEDKFEREKVLLDIEQECVEAYRRKVDHANVSRSRLHQELAESEAELTHFLLCLGERSVPGRPEKKGGTLREQLDSIAPALREMRLRKDERVKQFRSVKGEIQKISAEIAGRSTYEDSTRKITIDDNDLSNKKLEEYQNELHRLHDEKNERLQKVDIYICAIRDLSATLGTEASMIITKIHPSLNDLYGISKNISDDILKKLNGTVVSLEEEKHKRLEKLHHLGRALSNLWNLMDASYEDRQKFFHVIDLLSSAPSDVCAPGSITLDIIQQAEAEVKRLDQLKASRIKELFIKKQKELEDTCNMSHMETPSTEMGNITNLVDSGEVDHVDLLAAMDEKIARAKEEAASRKGIIEKVDRWMLASDEERWLEEYDQDENRYSVSRNAHRNLRRAERARITVSKISGLVESILVKAKSWEVERQKVFLYNEVPLVAMLQEYNKLRQEKEMEKQRLREMKKMSIPQPVAEGDNFYMARPASSNRRISNRSMNGGFGSGSPINRKYSGGFNNTNNNYTALGTSIRRESRKSEA

SEQ ID NO: 71651 - DNA, 816 bp, Arabidopsis thaliana
  misc_feature (1)..(816): Ceres Seq. ID no. 4803908
  misc_feature: MA Experiment ID: 20000179 Result: Down-regulated in Transcription
  misc_feature: MA Experiment 20000179 PARAMETER Experiment Name: At_Germinating_Seeds_P Parameter: Age (hr) Value: 6 vs. 0
  misc_feature: MA Experiment 20000179 PARAMETER Experiment Name: At_Germinating_Seeds_P Parameter: Tissue Value: Germinating Seeds
  misc_feature: MA Experiment ID: 20000180 Result: Down-regulated in Transcription
  misc_feature: MA Experiment 20000180 PARAMETER Experiment Name: At_Germinating_Seeds_P Parameter: Age (hr) Value: 24 vs. 0
  misc_feature: MA Experiment 20000180 PARAMETER Experiment Name: At_Germinating_Seeds_P Parameter: Tissue Value: Germinating Seeds
  misc_feature: MA Experiment ID: 20000437 Result: Up-regulated in Transcription
  misc_feature: MA Experiment 20000437 PARAMETER Experiment Name: At_Drought_P Parameter: Age (day) Value: 8
  misc_feature: MA Experiment 20000437 PARAMETER Experiment Name: At_Drought_P Parameter: Organism Value: A. thaliana
  misc_feature: MA Experiment 20000437 PARAMETER Experiment Name: At_Drought_P Parameter: Plant Line Value: WS
  misc_feature: MA Experiment 20000437 PARAMETER Experiment Name: At_Drought_P Parameter: Timepoint (hr) Value: 24
  misc_feature: MA Experiment 20000437 PARAMETER Experiment Name: At_Drought_P Parameter: Tissue Value: Whole Plant
  misc_feature: MA Experiment 20000437 PARAMETER Experiment Name: At_Drought_P Parameter: Treatment Value: Drought vs. No Drought
  misc_feature: MA Experiment ID: 20000451 Result: Up-regulated in Transcription
  misc_feature: MA Experiment 20000451 PARAMETER Experiment Name: At_CS6879_Shoots-Roots_P Parameter: Age (day) Value: 14
  misc_feature: MA Experiment 20000451 PARAMETER Experiment Name: At_CS6879_Shoots-Roots_P Parameter: Organism Value: A. thaliana
  misc_feature: MA Experiment 20000451 PARAMETER Experiment Name: At_CS6879_Shoots-Roots_P Parameter: Plant Line Value: CS6879 vs. WS
  misc_feature: MA Experiment 20000451 PARAMETER Experiment Name: At_CS6879_Shoots-Roots_P Parameter: Tissue Value: Roots
  misc_feature: MA Experiment ID: 20000527 Result: Up-regulated in Transcription
  misc_feature: MA Experiment 20000527 PARAMETER Experiment Name: At_10percent_PEG_P Parameter: Age (day) Value: 20
  misc_feature: MA Experiment 20000527 PARAMETER Experiment Name: At_10percent_PEG_P Parameter: Organism Value: A. thaliana
  misc_feature: MA Experiment 20000527 PARAMETER Experiment Name: At_10percent_PEG_P Parameter: Plant Line Value: WS
  misc_feature: MA Experiment 20000527 PARAMETER Experiment Name: At_10percent_PEG_P Parameter: Timepoint (day) Value: 20
  misc_feature: MA Experiment 20000527 PARAMETER Experiment Name: At_10percent_PEG_P Parameter: Tissue Value: Whole Plant
  misc_feature: MA Experiment 20000527 PARAMETER Experiment Name: At_10percent_PEG_P Parameter: Treatment Value: 10percent PEG vs. No Treatment
  misc_feature: MA Experiment ID: 20001557 Result: Down-regulated in Transcription
  misc_feature: MA Experiment 20001557 PARAMETER Experiment Name: At_Drought_Soil_Dry_P Parameter: Age (day) Value: 27
  misc_feature: MA Experiment 20001557 PARAMETER Experiment Name: At_Drought_Soil_Dry_P Parameter: Organism Value: A. thaliana
  misc_feature: MA Experiment 20001557 PARAMETER Experiment Name: At_Drought_Soil_Dry_P Parameter: Plant Line Value: WS
  misc_feature: MA Experiment 20001557 PARAMETER Experiment Name: At_Drought_Soil_Dry_P Parameter: Post Timepoint (hr) Value: 3
  misc_feature: MA Experiment 20001557 PARAMETER Experiment Name: At_Drought_Soil_Dry_P Parameter: Post-Treatment Value: Re-Water vs. No Drought
  misc_feature: MA Experiment 20001557 PARAMETER Experiment Name: At_Drought_Soil_Dry_P Parameter: Timepoint (day) Value: 13
  misc_feature: MA Experiment 20001557 PARAMETER Experiment Name: At_Drought_Soil_Dry_P Parameter: Treatment Value: Drought vs. No Drought
atgtcaggcgtgtctcttgcggttggtccaagaaccgacgtggacaaaacggcgtcatccagtgagaagggacggtggtcggggatgacggcgataggaggtggcagtggaggtttgatggggtcgttaagggttatagagctacagctagtcgcgttcatactagttttctcagcaagcggtctcgtaccaatacttgacatgctttttccagcgtttgcgtctatctatataatcgccctctcgcgtttagctttcccttctcacggcgtttccaccgcttcccccgaagtcttccgcggcagcaaactcttcaggttgtacgtgatttcggggacaacgattggtctgttcttgcctctagcttacgtattaggtggttttgcaagaggagatgatcatgcggtaagatcagcaacaccacacttgtttctactgtcgtgtcaaatcctgacagagaatgtaataagtggcctttctctgttctcgccaccggtaagagctctcgtcccattgctctacacagtctggagaatctttgtcatcattggttggtctaaagatgtttggttcaacaagtctttaccaatcaatgctacacccaatgtggttacatggttctggtttggaaggtatttagcactagcaaacttaggctacttcggagtgaatctactctgtttcttgatccctaggttcctgcctcgtgctttcgagcaatacttcagagagagagacgagatcttggcgaaaagccaagaagacaagccagttcaagttcctagatcaaaaccttctaaccacaaatctgattga

SEQ ID NO: 71652 - protein, 271 aa, Arabidopsis thaliana
  peptide (1)..(271): Ceres Seq. ID no. 4803909
  misc_feature (1)..(271): Homolog of NCBI NO: 15217782 NR Description: unknown protein; protein id: At1g27990.1
  misc_feature (1)..(256): Homolog of NCBI NO: 38347228 NR Description: OSJNBa0044M19.10 [Oryza sativa (japonica
  misc_feature (1)..(109): Homolog of NCBI NO: 26449376 NR Description: unknown protein [Arabidopsis thaliana]
  misc_feature (1)..(242): Homolog of NCBI NO: 15146256 NR Description: AT5g52420/K24M7_17 [Arabidopsis thaliana]
  misc_feature (1)..(242): Homolog of NCBI NO: 18423389 NR Description: expressed protein; protein id: At5g52420.1, by cDNA: gi_15146255, supported by cDNA: gi_19699159 [Arabidopsis >gi|10177408|dbj|BAB10539.1| gene_id:K24M7.17~unknown protein
  misc_feature (52)..(242): Homolog of NCBI NO: 37536624 NR Description: unknown protein [Oryza sativa (japonica
  misc_feature (38)..(242): Homolog of NCBI NO: 15237854 NR Description: unknown protein; protein id: At5g23920.1 thaliana] >gi|10176859|dbj|BAB10065.1| gene_id:MRO11.4~unknown [Arabidopsis thaliana] >gi|29028832|gb|AAO64795.1| At5g23920
MSGVSLAVGPRTDVDKTASSSEKGRWSGMTAIGGGSGGLMGSLRVIELQLVAFILVFSASGLVPILDMLFPAFASIYIIALSRLAFPSHGVSTASPEVFRGSKLFRLYVISGTTIGLFLPLAYVLGGFARGDDHAVRSATPHLFLLSCQILTENVISGLSLFSPPVRALVPLLYTVWRIFVIIGWSKDVWFNKSLPINATPNVVTWFWFGRYLALANLGYFGVNLLCFLIPRFLPRAFEQYFRERDEILAKSQEDKPVQVPRSKPSNHKSD

SEQ ID NO: 71653 - protein, 243 aa, Arabidopsis thaliana
  peptide (1)..(243): Ceres Seq. ID no. 4803910
  misc_feature (1)..(243): Homolog of NCBI NO: 15217782 NR Description: unknown protein; protein id: At1g27990.1
  misc_feature (1)..(228): Homolog of NCBI NO: 38347228 NR Description: OSJNBa0044M19.10 [Oryza sativa (japonica
  misc_feature (1)..(81): Homolog of NCBI NO: 26449376 NR Description: unknown protein [Arabidopsis thaliana]
  misc_feature (1)..(214): Homolog of NCBI NO: 15146256 NR Description: AT5g52420/K24M7_17 [Arabidopsis thaliana]
  misc_feature (1)..(214): Homolog of NCBI NO: 18423389 NR Description: expressed protein; protein id: At5g52420.1, by cDNA: gi_15146255, supported by cDNA: gi_19699159 [Arabidopsis >gi|10177408|dbj|BAB10539.1| gene_id:K24M7.17~unknown protein
  misc_feature (24)..(214): Homolog of NCBI NO: 37536624 NR Description: unknown protein [Oryza sativa (japonica
  misc_feature (10)..(214): Homolog of NCBI NO: 15237854 NR Description: unknown protein; protein id: At5g23920.1 thaliana] >gi|10176859|dbj|BAB10065.1| gene_id:MRO11.4~unknown [Arabidopsis thaliana] >gi|29028832|gb|AAO64795.1| At5g23920
MTAIGGGSGGLMGSLRVIELQLVAFILVFSASGLVPILDMLFPAFASIYIIALSRLAFPSHGVSTASPEVFRGSKLFRLYVISGTTIGLFLPLAYVLGGFARGDDHAVRSATPHLFLLSCQILTENVISGLSLFSPPVRALVPLLYTVWRIFVIIGWSKDVWFNKSLPINATPNVVTWFWFGRYLALANLGYFGVNLLCFLIPRFLPRAFEQYFRERDEILAKSQEDKPVQVPRSKPSNHKSD

SEQ ID NO: 71654 - protein, 232 aa, Arabidopsis thaliana
  peptide (1)..(232): Ceres Seq. ID no. 4803911
  misc_feature (1)..(232): Homolog of NCBI NO: 15217782 NR Description: unknown protein; protein id: At1g27990.1
  misc_feature (1)..(217): Homolog of NCBI NO: 38347228 NR Description: OSJNBa0044M19.10 [Oryza sativa (japonica
  misc_feature (1)..(70): Homolog of NCBI NO: 26449376 NR Description: unknown protein [Arabidopsis thaliana]
  misc_feature (1)..(203): Homolog of NCBI NO: 15146256 NR Description: AT5g52420/K24M7_17 [Arabidopsis thaliana]
  misc_feature (1)..(203): Homolog of NCBI NO: 18423389 NR Description: expressed protein; protein id: At5g52420.1, by cDNA: gi_15146255, supported by cDNA: gi_19699159 [Arabidopsis >gi|10177408|dbj|BAB10539.1| gene_id:K24M7.17~unknown protein
  misc_feature (13)..(203): Homolog of NCBI NO: 37536624 NR Description: unknown protein [Oryza sativa (japonica
  misc_feature (1)..(203): Homolog of NCBI NO: 15237854 NR Description: unknown protein; protein id: At5g23920.1 thaliana] >gi|10176859|dbj|BAB10065.1| gene_id:MRO11.4~unknown [Arabidopsis thaliana] >gi|29028832|gb|AAO64795.1| At5g23920
MGSLRVIELQLVAFILVFSASGLVPILDMLFPAFASIYIIALSRLAFPSHGVSTASPEVFRGSKLFRLYVISGTTIGLFLPLAYVLGGFARGDDHAVRSATPHLFLLSCQILTENVISGLSLFSPPVRALVPLLYTVWRIFVIIGWSKDVWFNKSLPINATPNVVTWFWFGRYLALANLGYFGVNLLCFLIPRFLPRAFEQYFRERDEILAKSQEDKPVQVPRSKPSNHKSD

SEQ ID NO: 71655 - DNA, 3744 bp, Arabidopsis thaliana
  misc_feature (1)..(3744): Ceres Seq. ID no. 4803912
  misc_feature: MA Experiment ID: 20000306 Result: Down-regulated in Transcription
  misc_feature: MA Experiment 20000306 PARAMETER Experiment Name: At_Germinating_Seeds_Sub_P Parameter: Age (hr) Value: 6 vs. 0
  misc_feature: MA Experiment 20000306 PARAMETER Experiment Name: At_Germinating_Seeds_Sub_P Parameter: Organism Value: A. thaliana
  misc_feature: MA Experiment 20000306 PARAMETER Experiment Name: At_Germinating_Seeds_Sub_P Parameter: Plant Line Value: WS
  misc_feature: MA Experiment 20000306 PARAMETER Experiment Name: At_Germinating_Seeds_Sub_P Parameter: Tissue Value: Germinating Seeds
  misc_feature: MA Experiment ID: 20000327 Result: Down-regulated in Transcription
  misc_feature: MA Experiment 20000327 PARAMETER Experiment Name: At_42deg_Heat_Sub_P Parameter: Age (day) Value: 14
  misc_feature: MA Experiment 20000327 PARAMETER Experiment Name: At_42deg_Heat_Sub_P Parameter: Organism Value: A. thaliana
  misc_feature: MA Experiment 20000327 PARAMETER Experiment Name: At_42deg_Heat_Sub_P Parameter: Plant Line Value: WS
  misc_feature: MA Experiment 20000327 PARAMETER Experiment Name: At_42deg_Heat_Sub_P Parameter: Temperature (deg C) Value: 42 vs. 22
  misc_feature: MA Experiment 20000327 PARAMETER Experiment Name: At_42deg_Heat_Sub_P Parameter: Timepoint (hr) Value: 1
  misc_feature: MA Experiment 20000327 PARAMETER Experiment Name: At_42deg_Heat_Sub_P Parameter: Tissue Value: Aerial
  misc_feature: MA Experiment ID: 20000328 Result: Down-regulated in Transcription
  misc_feature: MA Experiment 20000328 PARAMETER Experiment Name: At_42deg_Heat_Sub_P Parameter: Age (day) Value: 14
  misc_feature: MA Experiment 20000328 PARAMETER Experiment Name: At_42deg_Heat_Sub_P Parameter: Organism Value: A. thaliana
  misc_feature: MA Experiment 20000328 PARAMETER Experiment Name: At_42deg_Heat_Sub_P Parameter: Plant Line Value: WS
  misc_feature: MA Experiment 20000328 PARAMETER Experiment Name: At_42deg_Heat_Sub_P Parameter: Temperature (deg C) Value: 42 vs. 22
  misc_feature: MA Experiment 20000328 PARAMETER Experiment Name: At_42deg_Heat_Sub_P Parameter: Timepoint (hr) Value: 6
  misc_feature: MA Experiment 20000328 PARAMETER Experiment Name: At_42deg_Heat_Sub_P Parameter: Tissue Value: Aerial
atggataacatagaaccaccctttagtggaaacatccatgctgagaccgaagtaaagaaggaggagaagaaaaagatgaagaaggaatcggtgtcattgatgggtttgtttagtgcagctgataatgttgattactttctgatgtttcttgggggtttaggcacgtgtattcatggcggtacgcttccgctcttcttcgtgttcttcgggggaatgctagattctcttgggaagctttctacagacccgaatgccatatcttctcgcgtttcacagaatgctctgtacttggtctacttaggattggtcaatttggtatcagcctggattggagttgcttgttggatgcaaacaggggaaagacaaacagcgcgattgcgtataaattatctcaaatcaatcttagcaaaagatattactttctttgatactgaagctagagattcaaacttcattttccacatctcaagcgacgcaatcttggttcaagatgccattggcgataagaccggccatgttttgcggtacctatgtcagttcatcgcgggatttgtcatcggttttttgtcagtatggcaactaacgttgcttacgttaggagtggttccactgatagcaattgcaggaggagggtatgctatagtcatgtctacaatatcagagaagagtgaggctgcttatgctgatgcaggaaaagttgcagaagaggtcatgtcacaggtgagaacagtgtatgcatttgtaggagaagagaaagctgtaaaatcttactcaaattctctcaagaaagctctgaaactcagtaaaagaagtggtcttgctaaaggtttaggagttggattaacatatagcctcttgttctgtgcttgggcattgcttttttggtatgcaagtcttcttgtacgccatggcaaaaccaacggcgcaaaagccttcacaacaatcctcaatgtcatttacagcggattcgccttaggtcaagccgtgcctagcttatccgcaatttctaaaggcagagttgctgctgcaaatattttcaaaatgataggaaacaacaatcttgaaagctctgagagattagaaaacggaacaacattgcaaaacgtagttggcaagattgagttttgtggagtttcgttcgcatatccttcgagaccaaacatggtttttgagaatcttagtttcacgatacattcaggcaagacttttgcatttgtcggtccaagtggttcggggaaaagcacaatcatatcaatggtgcaacgtttctatgaacctagatcaggggagattctcttggatggaaatgacatcaagaacctgaagctgaaatggttgagagaacagatgggattagtgagtcaagaaccagcattattcgccacaacaatagcttctaatattcttctcggtaaagagaaagccaatatggatcagatcatagaagctgctaaagcagccaacgcagattctttcattaaatcattacctaatggttacaatactcaggttggagaaggaggaactcaactttcaggagggcagaaacagaggattgctattgctcgggcggttctaagaaatccaaagatattacttttagatgaagcaacaagcgctcttgatgccgaatcagagaagattgttcagcaagcacttgacaatgtcatggaaaaaagaacaacaatcgtcattgcacatagattatccaccattcgaaatgttgacaagattgttgtcttgagagatggtcaagttagggaaaccggaagtcactcagaactgatatcaagaggaggagattatgccactcttgtaaattgtcaagacacagaacctcaagaaaacttgagatcagtcatgtatgaatcttgtaggtctcaagctggatcatatagttcaagaagagtttttagctcaagaaggacttcaagcttcagggaagaccaagagaagactgaaaaagattcaaaaggcgaagatttaataagctcgtcctcaatgatatgggaactaataaagttgaatgctccagaatggctttatgcattacttggctcaattggtgccgttcttgccggatcacaaccggcattgttctccatggggcttgcttacgtgttaaccacgttttattcaccttttcctagtctgatcaagcgtgaagtcgataaggtagctattatctttgttggagctggaatagtaacagcgcctatatacattctccaacattacttctatacactaatgggagagcgtcttacttctcgggttcgcttatccttgttctcagcgattctttcaaatgagattggatggtttgatctggatgagaacaacactggctcactcacttcaatcttagctgctgatgcaaccttggtgaggagtgctatagcggatcgtctatcgacaatagtccaaaacttgtctcttacaatcacagccttagcacttgcctttttctacagttggcgtgttgcagctgtcgtaacagcttgttttcctcttctcattgccgcttcacttaccgagcaattatttctaaaaggctttggaggagattacacaagggcttactctagggcaacttcattggcgcgtgaagcgatttcgaatataagaaccgtcgctgcatttagtgctgaaaagcaaatctcagaacagtttacttgtgaactaagcaaacccaccaagagtgccttactcagaggtcatatctcgggatttggatacggtttgtcacagtgtctcgcgttctgttcctacgcacttggtctctggtatatctcagttctgattaagcgcaacgagaccaactttgaggatagtatcaaatctttcatggtattgctcgtcactgcttactccgtagcggaaacgcttgcgttaaccccagatatcgtgaagggcacacaagcactcgggtccgtatttagggttttacatagagagactgaaatacctccagaccagcctaactcaagattggtcactcatatcaaaggagatatagagtttagaaacgtgagctttgcgtatcccactagacccgaaatcgccattttcaaaaatctaaatctccgagtttcagccgggaagagtcttgcggtcgtgggacctagtggttcgggaaagagcacagtgatcggactaatcatgagattctacgatccgagcaacggaaatctctgtatcgatgggcatgatataaaatctgtaaacctacgtagcttgcgcaagaagctagcgttagttcagcaagaaccggctctgttttcaacatccatacacgagaacatcaagtatgggaacgagaacgcgtcagaggcagagatcattgaagccgcaaaagccgcgaacgcgcacgagttcataagcaggatggaagaagggtacatgactcacgtgggtgataagggagtgcagttatcaggtgggcaaaaacagagagtggctatcgcacgggcagttctaaaagatccttcagtgcttctccttgatgaggcaacaagtgctttggatacgagcgcagagaaacaggtccaagaggcgctagacaagttgatgaagggacgaaccacgattctggtggctcacaggctctcgaccataagaaaagcagacacaatcgttgtattgcataaaggaaaagttgtggagaaaggaagtcacagagaacttgtatctaaatccgatgggttttataagaaattgacgagtcttcaagaagcggtgtga

SEQ ID NO: 71656 - protein, 1247 aa, Arabidopsis thaliana
  peptide (1)..(1247): Ceres Seq. ID no. 4803913
  misc_feature (48)..(325): Pfam Name: ABC transporter transmembrane region Pfam Description: ABC transporter transmembrane region
  misc_feature (666)..(1244): Homolog of NCBI NO: 27368845 NR Description: MDR-like ABC transporter [Oryza sativa (japonica
  misc_feature (36)..(510): Homolog of NCBI NO: 27368845 NR Description: MDR-like ABC transporter [Oryza sativa (japonica
  misc_feature (503)..(715): Homolog of NCBI NO: 27368845 NR Description: MDR-like ABC transporter [Oryza sativa (japonica
  misc_feature (588)..(1244): Homolog of NCBI NO: 38049160 NR Description: P-glycoprotein 1 [Sorghum bicolor]
  misc_feature (5)..(665): Homolog of NCBI NO: 38049160 NR Description: P-glycoprotein 1 [Sorghum bicolor]
  misc_feature (520)..(1246): Homolog of NCBI NO: 34913530 NR Description: putative multidrug resistance protein [Oryza
  misc_feature (31)..(652): Homolog of NCBI NO: 34913530 NR Description: putative multidrug resistance protein [Oryza
  misc_feature (30)..(610): Homolog of NCBI NO: 27368853 NR Description: MDR-like ABC transporter [Oryza sativa (japonica
  misc_feature (670)..(1240): Homolog of NCBI NO: 27368853 NR Description: MDR-like ABC transporter [Oryza sativa (japonica
  misc_feature (12)..(935): Homolog of NCBI NO: 18496818 NR Description: ABC transporter AbcB3 [Dictyostelium discoideum]
MDNIEPPFSGNIHAETEVKKEEKKKMKKESVSLMGLFSAADNVDYFLMFLGGLGTCIHGGTLPLFFVFFGGMLDSLGKLSTDPNAISSRVSQNALYLVYLGLVNLVSAWIGVACWMQTGERQTARLRINYLKSILAKDITFFDTEARDSNFIFHISSDAILVQDAIGDKTGHVLRYLCQFIAGFVIGFLSVWQLTLLTLGVVPLIAIAGGGYAIVMSTISEKSEAAYADAGKVAEEVMSQVRTVYAFVGEEKAVKSYSNSLKKALKLSKRSGLAKGLGVGLTYSLLFCAWALLFWYASLLVRHGKTNGAKAFTTILNVIYSGFALGQAVPSLSAISKGRVAAANIFKMIGNNNLESSERLENGTTLQNVVGKIEFCGVSFAYPSRPNMVFENLSFTIHSGKTFAFVGPSGSGKSTIISMVQRFYEPRSGEILLDGNDIKNLKLKWLREQMGLVSQEPALFATTIASNILLGKEKANMDQIIEAAKAANADSFIKSLPNGYNTQVGEGGTQLSGGQKQRIAIARAVLRNPKILLLDEATSALDAESEKIVQQALDNVMEKRTTIVIAHRLSTIRNVDKIVVLRDGQVRETGSHSELISRGGDYATLVNCQDTEPQENLRSVMYESCRSQAGSYSSRRVFSSRRTSSFREDQEKTEKDSKGEDLISSSSMIWELIKLNAPEWLYALLGSIGAVLAGSQPALFSMGLAYVLTTFYSPFPSLIKREVDKVAIIFVGAGIVTAPIYILQHYFYTLMGERLTSRVRLSLFSAILSNEIGWFDLDENNTGSLTSILAADATLVRSAIADRLSTIVQNLSLTITALALAFFYSWRVAAVVTACFPLLIAASLTEQLFLKGFGGDYTRAYSRATSLAREAISNIRTVAAFSAEKQISEQFTCELSKPTKSALLRGHISGFGYGLSQCLAFCSYALGLWYISVLIKRNETNFEDSIKSFMVLLVTAYSVAETLALTPDIVKGTQALGSVFRVLHRETEIPPDQPNSRLVTHIKGDIEFRNVSFAYPTRPEIAIFKNLNLRVSAGKSLAVVGPSGSGKSTVIGLIMRFYDPSNGNLCIDGHDIKSVNLRSLRKKLALVQQEPALFSTSIHENIKYGNENASEAEIIEAAKAANAHEFISRMEEGYMTHVGDKGVQLSGGQKQRVAIARAVLKDPSVLLLDEATSALDTSAEKQVQEALDKLMKGRTTILVAHRLSTIRKADTIVVLHKGKVVEKGSHRELVSKSDGFYKKLTSLQEAV

SEQ ID NO: 71657 - protein, 1222 aa, Arabidopsis thaliana
  peptide (1)..(1222): Ceres Seq. ID no. 4803914
  misc_feature (23)..(300): Pfam Name: ABC transporter transmembrane region Pfam Description: ABC transporter transmembrane region
  misc_feature (641)..(1219): Homolog of NCBI NO: 27368845 NR Description: MDR-like ABC transporter [Oryza sativa (japonica
  misc_feature (11)..(485): Homolog of NCBI NO: 27368845 NR Description: MDR-like ABC transporter [Oryza sativa (japonica
  misc_feature (478)..(690): Homolog of NCBI NO: 27368845 NR Description: MDR-like ABC transporter [Oryza sativa (japonica
  misc_feature (563)..(1219): Homolog of NCBI NO: 38049160 NR Description: P-glycoprotein 1 [Sorghum bicolor]
  misc_feature (1)..(640): Homolog of NCBI NO: 38049160 NR Description: P-glycoprotein 1 [Sorghum bicolor]
  misc_feature (495)..(1221): Homolog of NCBI NO: 34913530 NR Description: putative multidrug resistance protein [Oryza
  misc_feature (6)..(627): Homolog of NCBI NO: 34913530 NR Description: putative multidrug resistance protein [Oryza
  misc_feature (5)..(585): Homolog of NCBI NO: 27368853 NR Description: MDR-like ABC transporter [Oryza sativa (japonica
  misc_feature (645)..(1215): Homolog of NCBI NO: 27368853 NR Description: MDR-like ABC transporter [Oryza sativa (japonica
  misc_feature (1)..(910): Homolog of NCBI NO: 18496818 NR Description: ABC transporter AbcB3 [Dictyostelium discoideum]
MKKESVSLMGLFSAADNVDYFLMFLGGLGTCIHGGTLPLFFVFFGGMLDSLGKLSTDPNAISSRVSQNALYLVYLGLVNLVSAWIGVACWMQTGERQTARLRINYLKSILAKDITFFDTEARDSNFIFHISSDAILVQDAIGDKTGHVLRYLCQFIAGFVIGFLSVWQLTLLTLGVVPLIAIAGGGYAIVMSTISEKSEAAYADAGKVAEEVMSQVRTVYAFVGEEKAVKSYSNSLKKALKLSKRSGLAKGLGVGLTYSLLFCAWALLFWYASLLVRHGKTNGAKAFTTILNVIYSGFALGQAVPSLSAISKGRVAAANIFKMIGNNNLESSERLENGTTLQNVVGKIEFCGVSFAYPSRPNMVFENLSFTIHSGKTFAFVGPSGSGKSTIISMVQRFYEPRSGEILLDGNDIKNLKLKWLREQMGLVSQEPALFATTIASNILLGKEKANMDQIIEAAKAANADSFIKSLPNGYNTQVGEGGTQLSGGQKQRIAIARAVLRNPKILLLDEATSALDAESEKIVQQALDNVMEKRTTIVIAHRLSTIRNVDKIVVLRDGQVRETGSHSELISRGGDYATLVNCQDTEPQENLRSVMYESCRSQAGSYSSRRVFSSRRTSSFREDQEKTEKDSKGEDLISSSSMIWELIKLNAPEWLYALLGSIGAVLAGSQPALFSMGLAYVLTTFYSPFPSLIKREVDKVAIIFVGAGIVTAPIYILQHYFYTLMGERLTSRVRLSLFSAILSNEIGWFDLDENNTGSLTSILAADATLVRSAIADRLSTIVQNLSLTITALALAFFYSWRVAAVVTACFPLLIAASLTEQLFLKGFGGDYTRAYSRATSLAREAISNIRTVAAFSAEKQISEQFTCELSKPTKSALLRGHISGFGYGLSQCLAFCSYALGLWYISVLIKRNETNFEDSIKSFMVLLVTAYSVAETLALTPDIVKGTQALGSVFRVLHRETEIPPDQPNSRLVTHIKGDIEFRNVSFAYPTRPEIAIFKNLNLRVSAGKSLAVVGPSGSGKSTVIGLIMRFYDPSNGNLCIDGHDIKSVNLRSLRKKLALVQQEPALFSTSIHENIKYGNENASEAEIIEAAKAANAHEFISRMEEGYMTHVGDKGVQLSGGQKQRVAIARAVLKDPSVLLLDEATSALDTSAEKQVQEALDKLMKGRTTILVAHRLSTIRKADTIVVLHKGKVVEKGSHRELVSKSDGFYKKLTSLQEAV

SEQ ID NO: 71658 - protein, 1214 aa, Arabidopsis thaliana
  peptide (1)..(1214): Ceres Seq. ID no. 4803915
  misc_feature (15)..(292): Pfam Name: ABC transporter transmembrane region Pfam Description: ABC transporter transmembrane region
  misc_feature (633)..(1211): Homolog of NCBI NO: 27368845 NR Description: MDR-like ABC transporter [Oryza sativa (japonica
  misc_feature (3)..(477): Homolog of NCBI NO: 27368845 NR Description: MDR-like ABC transporter [Oryza sativa (japonica
  misc_feature (470)..(682): Homolog of NCBI NO: 27368845 NR Description: MDR-like ABC transporter [Oryza sativa (japonica
  misc_feature (555)..(1211): Homolog of NCBI NO: 38049160 NR Description: P-glycoprotein 1 [Sorghum bicolor]
  misc_feature (1)..(632): Homolog of NCBI NO: 38049160 NR Description: P-glycoprotein 1 [Sorghum bicolor]
  misc_feature (487)..(1213): Homolog of NCBI NO: 34913530 NR Description: putative multidrug resistance protein [Oryza
  misc_feature (1)..(619): Homolog of NCBI NO: 34913530 NR Description: putative multidrug resistance protein [Oryza
  misc_feature (1)..(577): Homolog of NCBI NO: 27368853 NR Description: MDR-like ABC transporter [Oryza sativa (japonica
  misc_feature (637)..(1207): Homolog of NCBI NO: 27368853 NR Description: MDR-like ABC transporter [Oryza sativa (japonica
  misc_feature (1)..(902): Homolog of NCBI NO: 18496818 NR Description: ABC transporter AbcB3 [Dictyostelium discoideum]
MGLFSAADNVDYFLMFLGGLGTCIHGGTLPLFFVFFGGMLDSLGKLSTDPNAISSRVSQNALYLVYLGLVNLVSAWIGVACWMQTGERQTARLRINYLKSILAKDITFFDTEARDSNFIFHISSDAILVQDAIGDKTGHVLRYLCQFIAGFVIGFLSVWQLTLLTLGVVPLIAIAGGGYAIVMSTISEKSEAAYADAGKVAEEVMSQVRTVYAFVGEEKAVKSYSNSLKKALKLSKRSGLAKGLGVGLTYSLLFCAWALLFWYASLLVRHGKTNGAKAFTTILNVIYSGFALGQAVPSLSAISKGRVAAANIFKMIGNNNLESSERLENGTTLQNVVGKIEFCGVSFAYPSRPNMVFENLSFTIHSGKTFAFVGPSGSGKSTIISMVQRFYEPRSGEILLDGNDIKNLKLKWLREQMGLVSQEPALFATTIASNILLGKEKANMDQIIEAAKAANADSFIKSLPNGYNTQVGEGGTQLSGGQKQRIAIARAVLRNPKILLLDEATSALDAESEKIVQQALDNVMEKRTTIVIAHRLSTIRNVDKIVVLRDGQVRETGSHSELISRGGDYATLVNCQDTEPQENLRSVMYESCRSQAGSYSSRRVFSSRRTSSFREDQEKTEKDSKGEDLISSSSMIWELIKLNAPEWLYALLGSIGAVLAGSQPALFSMGLAYVLTTFYSPFPSLIKREVDKVAIIFVGAGIVTAPIYILQHYFYTLMGERLTSRVRLSLFSAILSNEIGWFDLDENNTGSLTSILAADATLVRSAIADRLSTIVQNLSLTITALALAFFYSWRVAAVVTACFPLLIAASLTEQLFLKGFGGDYTRAYSRATSLAREAISNIRTVAAFSAEKQISEQFTCELSKPTKSALLRGHISGFGYGLSQCLAFCSYALGLWYISVLIKRNETNFEDSIKSFMVLLVTAYSVAETLALTPDIVKGTQALGSVFRVLHRETEIPPDQPNSRLVTHIKGDIEFRNVSFAYPTRPEIAIFKNLNLRVSAGKSLAVVGPSGSGKSTVIGLIMRFYDPSNGNLCIDGHDIKSVNLRSLRKKLALVQQEPALFSTSIHENIKYGNENASEAEIIEAAKAANAHEFISRMEEGYMTHVGDKGVQLSGGQKQRVAIARAVLKDPSVLLLDEATSALDTSAEKQVQEALDKLMKGRTTILVAHRLSTIRKADTIVVLHKGKVVEKGSHRELVSKSDGFYKKLTSLQEAV

SEQ ID NO: 71659 - DNA, 732 bp, Arabidopsis thaliana
  misc_feature (1)..(732): Ceres Seq. ID no. 4803967
  misc_feature: MA Experiment ID: 20000171 Result: Up-regulated in Transcription
  misc_feature: MA Experiment 20000171 PARAMETER Experiment Name: At_42deg_Heat_P Parameter: Age (day) Value: 14
  misc_feature: MA Experiment 20000171 PARAMETER Experiment Name: At_42deg_Heat_P Parameter: Organism Value: A. thaliana
  misc_feature: MA Experiment 20000171 PARAMETER Experiment Name: At_42deg_Heat_P Parameter: Plant Line Value: WS
  misc_feature: MA Experiment 20000171 PARAMETER Experiment Name: At_42deg_Heat_P Parameter: Temperature (deg C) Value: 42 vs. 22
  misc_feature: MA Experiment 20000171 PARAMETER Experiment Name: At_42deg_Heat_P Parameter: Timepoint (hr) Value: 1
  misc_feature: MA Experiment 20000171 PARAMETER Experiment Name: At_42deg_Heat_P Parameter: Tissue Value: Aerial
  misc_feature: MA Experiment ID: 20000184 Result: Down-regulated in Transcription
  misc_feature: MA Experiment 20000184 PARAMETER Experiment Name: At_Shoots__P Parameter: Age (day) Value: 7
  misc_feature: MA Experiment 20000184 PARAMETER Experiment Name: At_Shoots__P Parameter: Tissue Value: Shoots vs. Whole Plant
atggaggaggtaaagggacaaagaggaagtggaaccacagaggcagattttgtgttgcaatggggtgagaggaaaagagttagatgtatgaaagtgaagaaagatcaaagccttgccaatggcaaatcaactgattgtttgactaaacgtaaactcatttctcgtgctgtctcttctgagagaggctcaccttctcgacatcttaaccgtcctaacaagatcactgattctctagtcaatgtgcggagatcgtttatggcgtcgcccgagaaggaagataggtattatacaacaaggggttcgatgggaatagatgagagtgggaaaattattaaggaacctgtgaaagaaacaaagaagcatgtgtggccaaagttgtatatagctttgtcaaataaagagaaggaagaagattttttggctatgaaaggttgcaagcttcctcaaagacctaagaagcgagccaaattggttcagaagacattgcttctggtgagtccaggagcttggttatcagatctgtgcaaagagagatatgaagtaagagagaagaagacttcaaagaagaccaagaggattgaaggcaatggggagcatggaaagcgattcggagtgaagaaccgtcgaagaaagaacttaaatgagatattcaagattttggcgaggggtaggaaggtgtatttcactttttcgttgcattttgagatgcctctcttcattactacaggttaa

SEQ ID NO: 71660 - protein, 243 aa, Arabidopsis thaliana
  peptide (1)..(243): Ceres Seq. ID no. 4803968
  misc_feature (10)..(195): Homolog of NCBI NO: 30678969 NR Description: expressed protein [Arabidopsis thaliana] unknown protein [Arabidopsis thaliana]
  misc_feature (10)..(163): Homolog of NCBI NO: 6006854 NR Description: hypothetical protein [Arabidopsis thaliana]
  misc_feature (164)..(195): Homolog of NCBI NO: 6006854 NR Description: hypothetical protein [Arabidopsis thaliana]
  misc_feature (34)..(195): Homolog of NCBI NO: 7485821 NR Description: hypothetical protein F1C12.211 - Arabidopsis >gi|3046695|emb|CAA18257.1| putative protein [Arabidopsis >gi|7268825|emb|CAB79030.1| putative protein [Arabidopsis
  misc_feature (34)..(195): Homolog of NCBI NO: 30685058 NR Description: expressed protein [Arabidopsis thaliana] putative protein [Arabidopsis thaliana]
  misc_feature (34)..(195): Homolog of NCBI NO: 21553974 NR Description: unknown [Arabidopsis thaliana]
  misc_feature (34)..(189): Homolog of NCBI NO: 30685055 NR Description: expressed protein [Arabidopsis thaliana]
  misc_feature (1)..(243): Homolog of NCBI NO: 25405821 NR Description: unknown protein, 25817-24837 [imported] -
  misc_feature (1)..(192): Homolog of NCBI NO: 30695924 NR Description: expressed protein [Arabidopsis thaliana]
  misc_feature (3)..(192): Homolog of NCBI NO: 30103017 NR Description: unknown protein [Oryza sativa (japonica
MEEVKGQRGSGTTEADFVLQWGERKRVRCMKVKKDQSLANGKSTDCLTKRKLISRAVSSERGSPSRHLNRPNKITDSLVNVRRSFMASPEKEDRYYTTRGSMGIDESGKIIKEPVKETKKHVWPKLYIALSNKEKEEDFLAMKGCKLPQRPKKRAKLVQKTLLLVSPGAWLSDLCKERYEVREKKTSKKTKRIEGNGEHGKRFGVKNRRRKNLNEIFKILARGRKVYFTFSLHFEMPLFITTG

SEQ ID NO: 71661 - protein, 214 aa, Arabidopsis thaliana
  peptide (1)..(214): Ceres Seq. ID no. 4803969
  misc_feature (1)..(214): Homolog of NCBI NO: 25405821 NR Description: unknown protein, 25817-24837 [imported] -
  misc_feature (1)..(163): Homolog of NCBI NO: 30695924 NR Description: expressed protein [Arabidopsis thaliana]
  misc_feature (1)..(163): Homolog of NCBI NO: 30103017 NR Description: unknown protein [Oryza sativa (japonica
  misc_feature (1)..(166): Homolog of NCBI NO: 30678969 NR Description: expressed protein [Arabidopsis thaliana] unknown protein [Arabidopsis thaliana]
  misc_feature (1)..(134): Homolog of NCBI NO: 6006854 NR Description: hypothetical protein [Arabidopsis thaliana]
  misc_feature (135)..(166): Homolog of NCBI NO: 6006854 NR Description: hypothetical protein [Arabidopsis thaliana]
  misc_feature (5)..(166): Homolog of NCBI NO: 7485821 NR Description: hypothetical protein F1C12.211 - Arabidopsis >gi|3046695|emb|CAA18257.1| putative protein [Arabidopsis >gi|7268825|emb|CAB79030.1| putative protein [Arabidopsis
  misc_feature (5)..(166): Homolog of NCBI NO: 30685058 NR Description: expressed protein [Arabidopsis thaliana] putative protein [Arabidopsis thaliana]
  misc_feature (5)..(166): Homolog of NCBI NO: 21553974 NR Description: unknown [Arabidopsis thaliana]
  misc_feature (5)..(160): Homolog of NCBI NO: 30685055 NR Description: expressed protein [Arabidopsis thaliana]
MKVKKDQSLANGKSTDCLTKRKLISRAVSSERGSPSRHLNRPNKITDSLVNVRRSFMASPEKEDRYYTTRGSMGIDESGKIIKEPVKETKKHVWPKLYIALSNKEKEEDFLAMKGCKLPQRPKKRAKLVQKTLLLVSPGAWLSDLCKERYEVREKKTSKKTKRIEGNGEHGKRFGVKNRRRKNLNEIFKILARGRKVYFTFSLHFEMPLFITTG

SEQ ID NO: 71662 - protein, 158 aa, Arabidopsis thaliana
  peptide (1)..(158): Ceres Seq. ID no. 4803970
  misc_feature (1)..(158): Homolog of NCBI NO: 25405821 NR Description: unknown protein, 25817-24837 [imported] -
  misc_feature (1)..(107): Homolog of NCBI NO: 30695924 NR Description: expressed protein [Arabidopsis thaliana]
  misc_feature (1)..(107): Homolog of NCBI NO: 30103017 NR Description: unknown protein [Oryza sativa (japonica
  misc_feature (1)..(110): Homolog of NCBI NO: 30678969 NR Description: expressed protein [Arabidopsis thaliana] unknown protein [Arabidopsis thaliana]
  misc_feature (1)..(78): Homolog of NCBI NO: 6006854 NR Description: hypothetical protein [Arabidopsis thaliana]
  misc_feature (79)..(110): Homolog of NCBI NO: 6006854 NR Description: hypothetical protein [Arabidopsis thaliana]
  misc_feature (1)..(110): Homolog of NCBI NO: 7485821 NR Description: hypothetical protein F1C12.211 - Arabidopsis >gi|3046695|emb|CAA18257.1| putative protein [Arabidopsis >gi|7268825|emb|CAB79030.1| putative protein [Arabidopsis
  misc_feature (1)..(110): Homolog of NCBI NO: 30685058 NR Description: expressed protein [Arabidopsis thaliana] putative protein [Arabidopsis thaliana]
  misc_feature (1)..(110): Homolog of NCBI NO: 21553974 NR Description: unknown [Arabidopsis thaliana]
  misc_feature (1)..(104): Homolog of NCBI NO: 30685055 NR Description: expressed protein [Arabidopsis thaliana]
MASPEKEDRYYTTRGSMGIDESGKIIKEPVKETKKHVWPKLYIALSNKEKEEDFLAMKGCKLPQRPKKRAKLVQKTLLLVSPGAWLSDLCKERYEVREKKTSKKTKRIEGNGEHGKRFGVKNRRRKNLNEIFKILARGRKVYFTFSLHFEMPLFITTG

SEQ ID NO: 71663 - DNA, 1266 bp, Arabidopsis thaliana
  misc_feature (1)..(1266): Ceres Seq. ID no. 4804174
  misc_feature: MA Experiment ID: 20000185 Result: Down-regulated in Transcription
  misc_feature: MA Experiment 20000185 PARAMETER Experiment Name: At_Roots__P Parameter: Age (day) Value: 7 vs. 21
  misc_feature: MA Experiment 20000185 PARAMETER Experiment Name: At_Roots__P Parameter: Organism Value: A. thaliana
  misc_feature: MA Experiment 20000185 PARAMETER Experiment Name: At_Roots__P Parameter: Tissue Value: Roots vs. Whole Plant
  misc_feature: MA Experiment ID: 20000438 Result: Down-regulated in Transcription
  misc_feature: MA Experiment 20000438 PARAMETER Experiment Name: At_Shoots__P Parameter: Age (day) Value: 14
  misc_feature: MA Experiment 20000438 PARAMETER Experiment Name: At_Shoots__P Parameter: Tissue Value: Shoots vs. Whole Plant
  misc_feature: MA Experiment ID: 20000439 Result: Down-regulated in Transcription
  misc_feature: MA Experiment 20000439 PARAMETER Experiment Name: At_Roots__P Parameter: Age (day) Value: 14 vs. 21
  misc_feature: MA Experiment 20000439 PARAMETER Experiment Name: At_Roots__P Parameter: Organism Value: A. thaliana
  misc_feature: MA Experiment 20000439 PARAMETER Experiment Name: At_Roots__P Parameter: Tissue Value: Roots vs. Whole Plant
  misc_feature: MA Experiment ID: 20000527 Result: Down-regulated in Transcription
  misc_feature: MA Experiment 20000527 PARAMETER Experiment Name: At_10percent_PEG_P Parameter: Age (day) Value: 20
  misc_feature: MA Experiment 20000527 PARAMETER Experiment Name: At_10percent_PEG_P Parameter: Organism Value: A. thaliana
  misc_feature: MA Experiment 20000527 PARAMETER Experiment Name: At_10percent_PEG_P Parameter: Plant Line Value: WS
  misc_feature: MA Experiment 20000527 PARAMETER Experiment Name: At_10percent_PEG_P Parameter: Timepoint (day) Value: 20
  misc_feature: MA Experiment 20000527 PARAMETER Experiment Name: At_10percent_PEG_P Parameter: Tissue Value: Whole Plant
  misc_feature: MA Experiment 20000527 PARAMETER Experiment Name: At_10percent_PEG_P Parameter: Treatment Value: 10percent PEG vs. No Treatment
  misc_feature: MA Experiment ID: 20001557 Result: Down-regulated in Transcription
  misc_feature: MA Experiment 20001557 PARAMETER Experiment Name: At_Drought_Soil_Dry_P Parameter: Age (day) Value: 27
  misc_feature: MA Experiment 20001557 PARAMETER Experiment Name: At_Drought_Soil_Dry_P Parameter: Organism Value: A. thaliana
  misc_feature: MA Experiment 20001557 PARAMETER Experiment Name: At_Drought_Soil_Dry_P Parameter: Plant Line Value: WS
  misc_feature: MA Experiment 20001557 PARAMETER Experiment Name: At_Drought_Soil_Dry_P Parameter: Post Timepoint (hr) Value: 3
  misc_feature: MA Experiment 20001557 PARAMETER Experiment Name: At_Drought_Soil_Dry_P Parameter: Post-Treatment Value: Re-Water vs. No Drought
  misc_feature: MA Experiment 20001557 PARAMETER Experiment Name: At_Drought_Soil_Dry_P Parameter: Timepoint (day) Value: 13
  misc_feature: MA Experiment 20001557 PARAMETER Experiment Name: At_Drought_Soil_Dry_P Parameter: Treatment Value: Drought vs. No Drought
  misc_feature: MA Experiment ID: 20001904 Result: Down-regulated in Transcription
  misc_feature: MA Experiment 20001904 PARAMETER Experiment Name: At_Drought_Reproduction_P Parameter: Age (day) Value: 37
  misc_feature: MA Experiment 20001904 PARAMETER Experiment Name: At_Drought_Reproduction_P Parameter: Organism Value: A. thaliana
  misc_feature: MA Experiment 20001904 PARAMETER Experiment Name: At_Drought_Reproduction_P Parameter: Plant Line Value: WS
  misc_feature: MA Experiment 20001904 PARAMETER Experiment Name: At_Drought_Reproduction_P Parameter: Timepoint (day) Value: 7
  misc_feature: MA Experiment 20001904 PARAMETER Experiment Name: At_Drought_Reproduction_P Parameter: Tissue Value: Rosettes
  misc_feature: MA Experiment 20001904 PARAMETER Experiment Name: At_Drought_Reproduction_P Parameter: Treatment Value: Drought vs. No Drought
atgagccaaaagaaactgacgaggactcaatcgtcgttactcagatcatctccgacgattcgatcgtcgatccaaagcctttcttcaatcactgaatgtgatgacttcaacgaaacctctcaccaccgccgtgaacaagatctcgaagccggtgagaaagaggaaaaacagaggaggagaaaaccggttaaatcattcgggtcaatgaaccgaattaaaccgggtctcgcattcacactcgcttgtctctctttcctgagtctctcatctttcttactgttcttcgttgatgagattttcacgtcggagaatctcttactaggtttgattttcgtcgctcttgctctgttcttcgcgtcgagaaacatggcggttattaaccaaaccgtaatcgcaatcaagcagattcgtgtaaggtctcgaatcaaacacaaaccgaaaccggttcaatggtacatcggagattcaaaaccggaaccgatcaaagaagaagaaacaagacttgtcgttaaagaaggagttcaattctttagcaatggagatttctacgaaggtgaattcaacagagggaagtgtaacggaagtggagtttattattattacgttaatggaagatatgaaggagattggatcaatggaaggtacgatggttatggaatcgagtgttggtctaaaggaagtaaatataaaggacagtataagcaaggacttagacatggttttggagtttactggttttacaccggagattcttactctggtgaatggtttaacggtcaaagccatggctttggagttcaaacttgtgctgatggaagctcttttgtcggagaattcaaatttggtgtcaaacatggacttggttcttaccatttcaggaatggagataagtatgcaggagagtattttggagacaagattcatggatttggtgtttaccatttcgctaatggtcactattacgaaggagcttggcatgaaggtcgtaaacaaggctatggcacgtatagatttagaaccggtgatatcaaatccggtgaatgggatgatggtaatctcgttaaccatcttcctttagactctgacccggttcgtagggcggttcagagtgcacgagaaagagcaaagaatggagtgaatcagagacggatcgatgagcaggtgatacgagctgtggctgcagctaataaagctgcgacggctgctagagttgcagctgtgaaagcagttcaaaatcaaatggatggtaaaatttgtgacaattaa

SEQ ID NO: 71664 - protein, 421 aa, Arabidopsis thaliana
  peptide (1)..(421): Ceres Seq. ID no. 4804175
  misc_feature (206)..(228): Pfam Name: MORN repeat Pfam Description: MORN repeat
  misc_feature (1)..(421): Homolog of NCBI NO: 15217439 NR Description: unknown protein; protein id: At1g77660.1
  misc_feature (3)..(421): Homolog of NCBI NO: 15219142 NR Description: phosphatidylinositol-4-phosphate 5-kinase, protein id: At1g21920.1, supported by cDNA: 37462., supported by gi_13878044 [Arabidopsis thaliana]
  misc_feature (3)..(421): Homolog of NCBI NO: 21593251 NR Description: phosphatidylinositol-4-phosphate 5-kinase,
  misc_feature (148)..(414): Homolog of NCBI NO: 37536922 NR Description: putative phosphatidylinositol-4-phosphate
  misc_feature (76)..(413): Homolog of NCBI NO: 18403768 NR Description: expressed protein; protein id: At2g35170.1, by cDNA: gi_16604413, supported by cDNA: gi_19699213 [Arabidopsis >gi|25370691|pir||E84765 hypothetical protein At2g35170
  misc_feature (86)..(413): Homolog of NCBI NO: 21928129 NR Description: AT4g17080/dl4570w [Arabidopsis thaliana]
  misc_feature (84)..(413): Homolog of NCBI NO: 15235967 NR Description: hypothetical protein; protein id: At4g17080.1
  misc_feature (172)..(350): Homolog of NCBI NO: 40062709 NR Description: MORN repeat protein [uncultured bacterium 314]
  misc_feature (172)..(354): Homolog of NCBI NO: 40062709 NR Description: MORN repeat protein [uncultured bacterium 314]
  misc_feature (172)..(351): Homolog of NCBI NO: 40062709 NR Description: MORN repeat protein [uncultured bacterium 314]
MSQKKLTRTQSSLLRSSPTIRSSIQSLSSITECDDFNETSHHRREQDLEAGEKEEKQRRRKPVKSFGSMNRIKPGLAFTLACLSFLSLSSFLLFFVDEIFTSENLLLGLIFVALALFFASRNMAVINQTVIAIKQIRVRSRIKHKPKPVQWYIGDSKPEPIKEEETRLVVKEGVQFFSNGDFYEGEFNRGKCNGSGVYYYYVNGRYEGDWINGRYDGYGIECWSKGSKYKGQYKQGLRHGFGVYWFYTGDSYSGEWFNGQSHGFGVQTCADGSSFVGEFKFGVKHGLGSYHFRNGDKYAGEYFGDKIHGFGVYHFANGHYYEGAWHEGRKQGYGTYRFRTGDIKSGEWDDGNLVNHLPLDSDPVRRAVQSARERAKNGVNQRRIDEQVIRAVAAANKAATAARVAAVKAVQNQMDGKICDN

SEQ ID NO: 71665 - protein, 353 aa, Arabidopsis thaliana
  peptide (1)..(353): Ceres Seq. ID no. 4804176
  misc_feature (138)..(160): Pfam Name: MORN repeat Pfam Description: MORN repeat
  misc_feature (1)..(353): Homolog of NCBI NO: 15217439 NR Description: unknown protein; protein id: At1g77660.1
  misc_feature (1)..(353): Homolog of NCBI NO: 15219142 NR Description: phosphatidylinositol-4-phosphate 5-kinase, protein id: At1g21920.1, supported by cDNA: 37462., supported by gi_13878044 [Arabidopsis thaliana]
  misc_feature (1)..(353): Homolog of NCBI NO: 21593251 NR Description: phosphatidylinositol-4-phosphate 5-kinase,
  misc_feature (80)..(346): Homolog of NCBI NO: 37536922 NR Description: putative phosphatidylinositol-4-phosphate
  misc_feature (8)..(345): Homolog of NCBI NO: 18403768 NR Description: expressed protein; protein id: At2g35170.1, by cDNA: gi_16604413, supported by cDNA: gi_19699213 [Arabidopsis >gi|25370691|pir||E84765 hypothetical protein At2g35170
  misc_feature (18)..(345): Homolog of NCBI NO: 21928129 NR Description: AT4g17080/dl4570w [Arabidopsis thaliana]
  misc_feature (16)..(345): Homolog of NCBI NO: 15235967 NR Description: hypothetical protein; protein id: At4g17080.1
  misc_feature (104)..(282): Homolog of NCBI NO: 40062709 NR Description: MORN repeat protein [uncultured bacterium 314]
  misc_feature (104)..(286): Homolog of NCBI NO: 40062709 NR Description: MORN repeat protein [uncultured bacterium 314]
  misc_feature (104)..(283): Homolog of NCBI NO: 40062709 NR Description: MORN repeat protein [uncultured bacterium 314]
MNRIKPGLAFTLACLSFLSLSSFLLFFVDEIFTSENLLLGLIFVALALFFASRNMAVINQTVIAIKQIRVRSRIKHKPKPVQWYIGDSKPEPIKEEETRLVVKEGVQFFSNGDFYEGEFNRGKCNGSGVYYYYVNGRYEGDWINGRYDGYGIECWSKGSKYKGQYKQGLRHGFGVYWFYTGDSYSGEWFNGQSHGFGVQTCADGSSFVGEFKFGVKHGLGSYHFRNGDKYAGEYFGDKIHGFGVYHFANGHYYEGAWHEGRKQGYGTYRFRTGDIKSGEWDDGNLVNHLPLDSDPVRRAVQSARERAKNGVNQRRIDEQVIRAVAAANKAATAARVAAVKAVQNQMDGKICDN

SEQ ID NO: 71666 - protein, 299 aa, Arabidopsis thaliana
  peptide (1)..(299): Ceres Seq. ID no. 4804177
  misc_feature (84)..(106): Pfam Name: MORN repeat Pfam Description: MORN repeat
  misc_feature (1)..(299): Homolog of NCBI NO: 15217439 NR Description: unknown protein; protein id: At1g77660.1
  misc_feature (1)..(299): Homolog of NCBI NO: 15219142 NR Description: phosphatidylinositol-4-phosphate 5-kinase, protein id: At1g21920.1, supported by cDNA: 37462., supported by gi_13878044 [Arabidopsis thaliana]
  misc_feature (1)..(299): Homolog of NCBI NO: 21593251 NR Description: phosphatidylinositol-4-phosphate 5-kinase,
  misc_feature (26)..(292): Homolog of NCBI NO: 37536922 NR Description: putative phosphatidylinositol-4-phosphate
  misc_feature (1)..(291): Homolog of NCBI NO: 18403768 NR Description: expressed protein; protein id: At2g35170.1, by cDNA: gi_16604413, supported by cDNA: gi_19699213 [Arabidopsis >gi|25370691|pir||E84765 hypothetical protein At2g35170
  misc_feature (1)..(291): Homolog of NCBI NO: 21928129 NR Description: AT4g17080/dl4570w [Arabidopsis thaliana]
  misc_feature (1)..(291): Homolog of NCBI NO: 15235967 NR Description: hypothetical protein; protein id: At4g17080.1
  misc_feature (50)..(228): Homolog of NCBI NO: 40062709 NR Description: MORN repeat protein [uncultured bacterium 314]
  misc_feature (50)..(232): Homolog of NCBI NO: 40062709 NR Description: MORN repeat protein [uncultured bacterium 314]
  misc_feature (50)..(229): Homolog of NCBI NO: 40062709 NR Description: MORN repeat protein [uncultured bacterium 314]
MAVINQTVIAIKQIRVRSRIKHKPKPVQWYIGDSKPEPIKEEETRLVVKEGVQFFSNGDFYEGEFNRGKCNGSGVYYYYVNGRYEGDWINGRYDGYGIECWSKGSKYKGQYKQGLRHGFGVYWFYTGDSYSGEWFNGQSHGFGVQTCADGSSFVGEFKFGVKHGLGSYHFRNGDKYAGEYFGDKIHGFGVYHFANGHYYEGAWHEGRKQGYGTYRFRTGDIKSGEWDDGNLVNHLPLDSDPVRRAVQSARERAKNGVNQRRIDEQVIRAVAAANKAATAARVAAVKAVQNQMDGKICDN

SEQ ID NO: 71667 - DNA, 1089 bp, Arabidopsis thaliana
  misc_feature (1)..(1089): Ceres Seq. ID no. 4804200
  misc_feature: MA Experiment ID: 20000171 Result: Up-regulated in Transcription
  misc_feature: MA Experiment 20000171 PARAMETER Experiment Name: At_42deg_Heat_P Parameter: Age (day) Value: 14
  misc_feature: MA Experiment 20000171 PARAMETER Experiment Name: At_42deg_Heat_P Parameter: Organism Value: A. thaliana
  misc_feature: MA Experiment 20000171 PARAMETER Experiment Name: At_42deg_Heat_P Parameter: Plant Line Value: WS
  misc_feature: MA Experiment 20000171 PARAMETER Experiment Name: At_42deg_Heat_P Parameter: Temperature (deg C) Value: 42 vs. 22
  misc_feature: MA Experiment 20000171 PARAMETER Experiment Name: At_42deg_Heat_P Parameter: Timepoint (hr) Value: 1
  misc_feature: MA Experiment 20000171 PARAMETER Experiment Name: At_42deg_Heat_P Parameter: Tissue Value: Aerial
  misc_feature: MA Experiment ID: 20000173 Result: Up-regulated in Transcription
  misc_feature: MA Experiment 20000173 PARAMETER Experiment Name: At_42deg_Heat_P Parameter: Age (day) Value: 14
  misc_feature: MA Experiment 20000173 PARAMETER Experiment Name: At_42deg_Heat_P Parameter: Organism Value: A. thaliana
  misc_feature: MA Experiment 20000173 PARAMETER Experiment Name: At_42deg_Heat_P Parameter: Plant Line Value: WS
  misc_feature: MA Experiment 20000173 PARAMETER Experiment Name: At_42deg_Heat_P Parameter: Temperature (deg C) Value: 42 vs. 22
  misc_feature: MA Experiment 20000173 PARAMETER Experiment Name: At_42deg_Heat_P Parameter: Timepoint (hr) Value: 6
  misc_feature: MA Experiment 20000173 PARAMETER Experiment Name: At_42deg_Heat_P Parameter: Tissue Value: Aerial
  misc_feature: MA Experiment ID: 20000184 Result: Up-regulated in Transcription
  misc_feature: MA Experiment 20000184 PARAMETER Experiment Name: At_Shoots__P Parameter: Age (day) Value: 7
  misc_feature: MA Experiment 20000184 PARAMETER Experiment Name: At_Shoots__P Parameter: Tissue Value: Shoots vs. Whole Plant
  misc_feature: MA Experiment ID: 20001906 Result: Up-regulated in Transcription
  misc_feature: MA Experiment 20001906 PARAMETER Experiment Name: At_Drought_Reproduction_P Parameter: Age (day) Value: 35
  misc_feature: MA Experiment 20001906 PARAMETER Experiment Name: At_Drought_Reproduction_P Parameter: Organism Value: A. thaliana
  misc_feature: MA Experiment 20001906 PARAMETER Experiment Name: At_Drought_Reproduction_P Parameter: Plant Line Value: WS
  misc_feature: MA Experiment 20001906 PARAMETER Experiment Name: At_Drought_Reproduction_P Parameter: Timepoint (day) Value: 5
  misc_feature: MA Experiment 20001906 PARAMETER Experiment Name: At_Drought_Reproduction_P Parameter: Tissue Value: Siliques
  misc_feature: MA Experiment 20001906 PARAMETER Experiment Name: At_Drought_Reproduction_P Parameter: Treatment Value: Drought vs. No Drought
atgtcttcttcttcttcaatggacttactcatgtgtctgcttcttctaatctctccggttgttctggccaagtcttcttccaccgtccctgctatctttaccttcggtgactctatttttgacgccggaaacaaccattacaacaaaaactgtaccgctcaggctgattttcctccttatggttcttcctttttccaccgtcctactgggaggttcaccaacggaagaaccgtcgctgacttcatctcggaatttgtaggccttccattacagaaaccattcttggaattgcagattcaaatcttgaatggaacttcaaacttttcaaatggcattaactttgctagtgctggtagtggtctcttgcttgataccaacaaatttatgggcgtgacaccgatccaaacccagctacagcaattccagacacttgtagagcaaaaccttatcgaaaaatctataatccaagagtctctcttcttattagaaactggttctaacgacatcttcaactacttcctcccattccgagctcctacactttctccagacgcttatgtgaacgcaatgttagaccaagtgaacaaaacgattgatcagatctacaaactaggcgcacgccgcatcgctttcttctccttaggtcctgtaggttgtgtccctgcaagagccatgcttcctaatgccccaaccaataaatgctttggtaagatgaatgttatggccaagatgtataataaaagacttgaagatatagtgaacataatccccactaagtaccctggagccattgcggtgtttggagctgtatatggtatcactcacagatttcaaacctaccctgcccgttacgggttttcggatgtttcaaacgcgtgttgtgggaacggtacactgggaggattgatgcagtgtggaagagaaggatacaagatttgcaataacccaaatgagtttctgttttgggatttttatcatcccacagaacacacttaccgtctcatgtcaaaagctttatggaatggaaacaaaaaccatatcagaccatttaatctcatggctcttgccaccaacaagatcacattttaa

SEQ ID NO: 71668 - protein, 362 aa, Arabidopsis thaliana
  peptide (1)..(362): Ceres Seq. ID no. 4804201
  misc_feature (32)..(339): Pfam Name: GDSL-like Lipase/Acylhydrolase Pfam Description: GDSL-like Lipase/Acylhydrolase
  misc_feature (1)..(362): Homolog of NCBI NO: 15223959 NR Description: putative proline-rich APG protein; protein id:
  misc_feature (9)..(356): Homolog of NCBI NO: 18417760 NR Description: putative protein; protein id: At5g15720.1, by cDNA: 118296. [Arabidopsis thaliana]
  misc_feature (9)..(356): Homolog of NCBI NO: 11280578 NR Description: hypothetical protein F14F8_100 - Arabidopsis >gi|9755617|emb|CAC01771.1| putative protein [Arabidopsis
  misc_feature (27)..(342): Homolog of NCBI NO: 25336254 NR Description: hypothetical protein T18A20.15 [imported] -
  misc_feature (27)..(342): Homolog of NCBI NO: 30695607 NR Description: GDSL-motif lipase/hydrolase protein [Arabidopsis
  misc_feature (78)..(361): Homolog of NCBI NO: 25405682 NR Description: hypothetical protein F15I1.7 [imported] - thaliana >gi|4587540|gb|AAD25771.1|AC006577_7 Belongs to the
  misc_feature (31)..(82): Homolog of NCBI NO: 25405682 NR Description: hypothetical protein F15I1.7 [imported] - thaliana >gi|4587540|gb|AAD25771.1|AC006577_7 Belongs to the
  misc_feature (1)..(355): Homolog of NCBI NO: 32489520 NR Description: OSJNBa0043L24.11 [Oryza sativa (japonica
  misc_feature (5)..(355): Homolog of NCBI NO: 21358785 NR Description: lipase SIL1 [Brassica rapa subsp. pekinensis]
  misc_feature (31)..(355): Homolog of NCBI NO: 15237530 NR Description: GDSL-motif lipase/hydrolase-like protein; protein
MSSSSSMDLLMCLLLLISPVVLAKSSSTVPAIFTFGDSIFDAGNNHYNKNCTAQADFPPYGSSFFHRPTGRFTNGRTVADFISEFVGLPLQKPFLELQIQILNGTSNFSNGINFASAGSGLLLDTNKFMGVTPIQTQLQQFQTLVEQNLIEKSIIQESLFLLETGSNDIFNYFLPFRAPTLSPDAYVNAMLDQVNKTIDQIYKLGARRIAFFSLGPVGCVPARAMLPNAPTNKCFGKMNVMAKMYNKRLEDIVNIIPTKYPGAIAVFGAVYGITHRFQTYPARYGFSDVSNACCGNGTLGGLMQCGREGYKICNNPNEFLFWDFYHPTEHTYRLMSKALWNGNKNHIRPFNLMALATNKITF

SEQ ID NO: 71669 - protein, 356 aa, Arabidopsis thaliana
  peptide (1)..(356): Ceres Seq. ID no. 4804202
  misc_feature (26)..(333): Pfam Name: GDSL-like Lipase/Acylhydrolase Pfam Description: GDSL-like Lipase/Acylhydrolase
  misc_feature (1)..(356): Homolog of NCBI NO: 15223959 NR Description: putative proline-rich APG protein; protein id:
  misc_feature (3)..(350): Homolog of NCBI NO: 18417760 NR Description: putative protein; protein id: At5g15720.1, by cDNA: 118296. [Arabidopsis thaliana]
  misc_feature (3)..(350): Homolog of NCBI NO: 11280578 NR Description: hypothetical protein F14F8_100 - Arabidopsis >gi|9755617|emb|CAC01771.1| putative protein [Arabidopsis
  misc_feature (21)..(336): Homolog of NCBI NO: 25336254 NR Description: hypothetical protein T18A20.15 [imported] -
  misc_feature (21)..(336): Homolog of NCBI NO: 30695607 NR Description: GDSL-motif lipase/hydrolase protein [Arabidopsis
  misc_feature (72)..(355): Homolog of NCBI NO: 25405682 NR Description: hypothetical protein F15I1.7 [imported] - thaliana >gi|4587540|gb|AAD25771.1|AC006577_7 Belongs to the
  misc_feature (25)..(76): Homolog of NCBI NO: 25405682 NR Description: hypothetical protein F15I1.7 [imported] - thaliana >gi|4587540|gb|AAD25771.1|AC006577_7 Belongs to the
  misc_feature (1)..(349): Homolog of NCBI NO: 32489520 NR Description: OSJNBa0043L24.11 [Oryza sativa (japonica
  misc_feature (1)..(349): Homolog of NCBI NO: 21358785 NR Description: lipase SIL1 [Brassica rapa subsp. pekinensis]
  misc_feature (25)..(349): Homolog of NCBI NO: 15237530 NR Description: GDSL-motif lipase/hydrolase-like protein; protein
MDLLMCLLLLISPVVLAKSSSTVPAIFTFGDSIFDAGNNHYNKNCTAQADFPPYGSSFFHRPTGRFTNGRTVADFISEFVGLPLQKPFLELQIQILNGTSNFSNGINFASAGSGLLLDTNKFMGVTPIQTQLQQFQTLVEQNLIEKSIIQESLFLLETGSNDIFNYFLPFRAPTLSPDAYVNAMLDQVNKTIDQIYKLGARRIAFFSLGPVGCVPARAMLPNAPTNKCFGKMNVMAKMYNKRLEDIVNIIPTKYPGAIAVFGAVYGITHRFQTYPARYGFSDVSNACCGNGTLGGLMQCGREGYKICNNPNEFLFWDFYHPTEHTYRLMSKALWNGNKNHIRPFNLMALATNKITF

SEQ ID NO: 71670 - protein, 352 aa, Arabidopsis thaliana
  peptide (1)..(352): Ceres Seq. ID no. 4804203
  misc_feature (22)..(329): Pfam Name: GDSL-like Lipase/Acylhydrolase Pfam Description: GDSL-like Lipase/Acylhydrolase
  misc_feature (1)..(352): Homolog of NCBI NO: 15223959 NR Description: putative proline-rich APG protein; protein id:
  misc_feature (1)..(346): Homolog of NCBI NO: 18417760 NR Description: putative protein; protein id: At5g15720.1, by cDNA: 118296. [Arabidopsis thaliana]
  misc_feature (1)..(346): Homolog of NCBI NO: 11280578 NR Description: hypothetical protein F14F8_100 - Arabidopsis >gi|9755617|emb|CAC01771.1| putative protein [Arabidopsis
  misc_feature (17)..(332): Homolog of NCBI NO: 25336254 NR Description: hypothetical protein T18A20.15 [imported] -
  misc_feature (17)..(332): Homolog of NCBI NO: 30695607 NR Description: GDSL-motif lipase/hydrolase protein [Arabidopsis
  misc_feature (68)..(351): Homolog of NCBI NO: 25405682 NR Description: hypothetical protein F15I1.7 [imported] - thaliana >gi|4587540|gb|AAD25771.1|AC006577_7 Belongs to the
  misc_feature (21)..(72): Homolog of NCBI NO: 25405682 NR Description: hypothetical protein F15I1.7 [imported] - thaliana >gi|4587540|gb|AAD25771.1|AC006577_7 Belongs to the
  misc_feature (1)..(345): Homolog of NCBI NO: 32489520 NR Description: OSJNBa0043L24.11 [Oryza sativa (japonica
  misc_feature (1)..(345): Homolog of NCBI NO: 21358785 NR Description: lipase SIL1 [Brassica rapa subsp. pekinensis]
  misc_feature (21)..(345): Homolog of NCBI NO: 15237530 NR Description: GDSL-motif lipase/hydrolase-like protein; protein
MCLLLLISPVVLAKSSSTVPAIFTFGDSIFDAGNNHYNKNCTAQADFPPYGSSFFHRPTGRFTNGRTVADFISEFVGLPLQKPFLELQIQILNGTSNFSNGINFASAGSGLLLDTNKFMGVTPIQTQLQQFQTLVEQNLIEKSIIQESLFLLETGSNDIFNYFLPFRAPTLSPDAYVNAMLDQVNKTIDQIYKLGARRIAFFSLGPVGCVPARAMLPNAPTNKCFGKMNVMAKMYNKRLEDIVNIIPTKYPGAIAVFGAVYGITHRFQTYPARYGFSDVSNACCGNGTLGGLMQCGREGYKICNNPNEFLFWDFYHPTEHTYRLMSKALWNGNKNHIRPFNLMALATNKITF

SEQ ID NO: 71671 - DNA, 1566 bp, Arabidopsis thaliana
  misc_feature (1)..(1566): Ceres Seq. ID no. 4804279
  misc_feature: MA Experiment ID: 20000306 Result: Up-regulated in Transcription
  misc_feature: MA Experiment 20000306 PARAMETER Experiment Name: At_Germinating_Seeds_Sub_P Parameter: Age (hr) Value: 6 vs. 0
  misc_feature: MA Experiment 20000306 PARAMETER Experiment Name: At_Germinating_Seeds_Sub_P Parameter: Organism Value: A. thaliana
  misc_feature: MA Experiment 20000306 PARAMETER Experiment Name: At_Germinating_Seeds_Sub_P Parameter: Plant Line Value: WS
  misc_feature: MA Experiment 20000306 PARAMETER Experiment Name: At_Germinating_Seeds_Sub_P Parameter: Tissue Value: Germinating Seeds
  misc_feature: MA Experiment ID: 20000315 Result: Down-regulated in Transcription
  misc_feature: MA Experiment 20000315 PARAMETER Experiment Name: At_14day_Shoots-Roots_Sub_P Parameter: Age (day) Value: 14
  misc_feature: MA Experiment 20000315 PARAMETER Experiment Name: At_14day_Shoots-Roots_Sub_P Parameter: Organism Value: A. thaliana
  misc_feature: MA Experiment 20000315 PARAMETER Experiment Name: At_14day_Shoots-Roots_Sub_P Parameter: Plant Line Value: WS
  misc_feature: MA Experiment 20000315 PARAMETER Experiment Name: At_14day_Shoots-Roots_Sub_P Parameter: Tissue Value: Shoots vs. Whole Plant
  misc_feature: MA Experiment ID: 20000355 Result: Up-regulated in Transcription
  misc_feature: MA Experiment 20000355 PARAMETER Experiment Name: At_Siliques_Sub_P Parameter: Age (day) Value: 21
  misc_feature: MA Experiment 20000355 PARAMETER Experiment Name: At_Siliques_Sub_P Parameter: Organism Value: A. thaliana
  misc_feature: MA Experiment 20000355 PARAMETER Experiment Name: At_Siliques_Sub_P Parameter: Plant Line Value: WS
  misc_feature: MA Experiment 20000355 PARAMETER Experiment Name: At_Siliques_Sub_P Parameter: Tissue Value: Less Than 5mm Siliques vs. Whole Plant
  misc_feature: MA Experiment ID: 20000440 Result: Up-regulated in Transcription
  misc_feature: MA Experiment 20000440 PARAMETER Experiment Name: At_Closed-Flower__Sub_P Parameter: Tissue Value: Closed Flower vs. Whole Plant
  misc_feature: MA Experiment ID: 20001807 Result: Down-regulated in Transcription
  misc_feature: MA Experiment 20001807 PARAMETER Experiment Name: At_50mM_NH4NO3_L-to-H_Sub_P Parameter: Timepoint (hr) Value: 6
  misc_feature: MA Experiment 20001807 PARAMETER Experiment Name: At_50mM_NH4NO3_L-to-H_Sub_P Parameter: Tissue Value: Leaf
  misc_feature: MA Experiment 20001807 PARAMETER Experiment Name: At_50mM_NH4NO3_L-to-H_Sub_P Parameter: Treatment Value: 50mM NH4NO3 vs 100mM Mannitol
atggcagacgctggagataatcagagaagaagcgatgaaaaagagtcgatatcaactgaagaaacgaaggagaatgaagacttgggatctggaagaaacgacacaggtcatcatgtatacaacgagggacacgaagaggtactagagtatctgaaacaagagagactgaaagatgctgatatgcagaggaaaaggcatgaaacagagtcgaaatccattgagggcacaactcctgatattaggctgagtgattcagggaaagggtctgatgaaatacagaaagcagactcagtttacaaacgctctaacgctgacacgcgagtgagtctgccacaacagagacgactgaaagatgtggtggaggcgcatagggatagatctctggtttggggaggaagtgaacccaggatgagatttgatgaaagtactcagggttggagagatagtgactatgaatccaaatggaggataggagaggaagtgaatcccaaggggtatttgatgagagaacagagaggagacaagaaccagtgcgatggcccggtgaagagtgttggtgtctgcggtgtcgaaacggaggaagttgccgttacaatcatcctactcaacttccacagatttgcagggggatattgtaagttcggctcagtttgtggatttcaacacataagggacagggatgttgcagaacctatgtatgagaattggagttttgatgtgagaactcagaggagatatgaaatagagtactcaggattcaggccagagaagagggcaaaaactagtctggattccgtagagcctgattcaagaaaaagactggaaggtctagagaataaacgagagcaagagaatccgcaagaacctgaaaggcagaggactgaggctcaagacaatctgcaggaatttcgagagcaagagaatccgcaaaaccagatacagataaatactgaaagacagaggacaatggctcatgacaatctgcagatcgtttcggattctcgaatgcatgatccaagacgccatgatacagagttgagactcgaacgagagaagatggtaaacagagaacttgaaaagcagaggatagaacatctaatcgatccactagtgaggcgatacatgcaagcaaagagagataaagaagttgaacagagagagagagctagcattgagagccagaggatagtggctcaagagattctgcggcaacagagattacaggggatgcgagagaatcagaacgtggattctcgaatgcatgatccaagacgccatgatacagagttgagactcgaacgagagaagatggtaaacagagaacttgaaaagcagaggatagaacctctaatcggtccactagtgaggcgatacatgcaagcaaagagagataaagaagttgaacagagagagagagctagcattgagagccagaggatagtggctcaagagaatctgcgacaacagagattgcaggggatgcgagagaatcagaacgtggatgctcatgatcaagagaaaactcaggaactcggtttcaaaggaaaagagggagatggagtttaa

SEQ ID NO: 71672 - protein, 521 aa, Arabidopsis thaliana
  peptide (1)..(521): Ceres Seq. ID no. 4804280
  misc_feature (267)..(519): Pfam Name: Caldesmon Pfam Description: Caldesmon
  misc_feature (1)..(521): Homolog of NCBI NO: 15220484 NR Description: hypothetical protein; protein id: At1g29560.1
  misc_feature (217)..(406): Homolog of NCBI NO: 15220486 NR Description: zinc finger protein, putative; protein id: [Arabidopsis thaliana] >gi|25403078|pir||G86418 probable zinc
  misc_feature (278)..(511): Homolog of NCBI NO: 15220486 NR Description: zinc finger protein, putative; protein id: [Arabidopsis thaliana] >gi|25403078|pir||G86418 probable zinc
  misc_feature (243)..(510): Homolog of NCBI NO: 24580684 NR Description: CG2839-PA [Drosophila melanogaster]
  misc_feature (224)..(511): Homolog of NCBI NO: 23943906 NR Description: trichohyalin [Homo sapiens]
  misc_feature (221)..(498): Homolog of NCBI NO: 28316334 NR Description: hair follicle protein AHF [Mus musculus]
  misc_feature (243)..(510): Homolog of NCBI NO: 24580684 NR Description: CG2839-PA [Drosophila melanogaster]
  misc_feature (243)..(510): Homolog of NCBI NO: 24580684 NR Description: CG2839-PA [Drosophila melanogaster]
  misc_feature (254)..(514): Homolog of NCBI NO: 586122 NR Description: Trichohyalin >gi|423321|pir||A40691 trichohyalin
  misc_feature (221)..(510): Homolog of NCBI NO: 23943906 NR Description: trichohyalin [Homo sapiens]
MADAGDNQRRSDEKESISTEETKENEDLGSGRNDTGHHVYNEGHEEVLEYLKQERLKDADMQRKRHETESKSIEGTTPDIRLSDSGKGSDEIQKADSVYKRSNADTRVSLPQQRRLKDVVEAHRDRSLVWGGSEPRMRFDESTQGWRDSDYESKWRIGEEVNPKGYLMREQRGDKNQCDGPVKSVGVCGVETEEVAVTIILLNFHRFAGGYCKFGSVCGFQHIRDRDVAEPMYENWSFDVRTQRRYEIEYSGFRPEKRAKTSLDSVEPDSRKRLEGLENKREQENPQEPERQRTEAQDNLQEFREQENPQNQIQINTERQRTMAHDNLQIVSDSRMHDPRRHDTELRLEREKMVNRELEKQRIEHLIDPLVRRYMQAKRDKEVEQRERASIESQRIVAQEILRQQRLQGMRENQNVDSRMHDPRRHDTELRLEREKMVNRELEKQRIEPLIGPLVRRYMQAKRDKEVEQRERASIESQRIVAQENLRQQRLQGMRENQNVDAHDQEKTQELGFKGKEGDGV

SEQ ID NO: 71673 - protein, 461 aa, Arabidopsis thaliana
  peptide (1)..(461): Ceres Seq. ID no. 4804281
  misc_feature (207)..(459): Pfam Name: Caldesmon Pfam Description: Caldesmon
  misc_feature (1)..(461): Homolog of NCBI NO: 15220484 NR Description: hypothetical protein; protein id: At1g29560.1
  misc_feature (157)..(346): Homolog of NCBI NO: 15220486 NR Description: zinc finger protein, putative; protein id: [Arabidopsis thaliana] >gi|25403078|pir||G86418 probable zinc
  misc_feature (218)..(451): Homolog of NCBI NO: 15220486 NR Description: zinc finger protein, putative; protein id: [Arabidopsis thaliana] >gi|25403078|pir||G86418 probable zinc
  misc_feature (183)..(450): Homolog of NCBI NO: 24580684 NR Description: CG2839-PA [Drosophila melanogaster]
  misc_feature (164)..(451): Homolog of NCBI NO: 23943906 NR Description: trichohyalin [Homo sapiens]
  misc_feature (161)..(438): Homolog of NCBI NO: 28316334 NR Description: hair follicle protein AHF [Mus musculus]
  misc_feature (183)..(450): Homolog of NCBI NO: 24580684 NR Description: CG2839-PA [Drosophila melanogaster]
  misc_feature (183)..(450): Homolog of NCBI NO: 24580684 NR Description: CG2839-PA [Drosophila melanogaster]
  misc_feature (194)..(454): Homolog of NCBI NO: 586122 NR Description: Trichohyalin >gi|423321|pir||A40691 trichohyalin
  misc_feature (161)..(450): Homolog of NCBI NO: 23943906 NR Description: trichohyalin [Homo sapiens]
MQRKRHETESKSIEGTTPDIRLSDSGKGSDEIQKADSVYKRSNADTRVSLPQQRRLKDVVEAHRDRSLVWGGSEPRMRFDESTQGWRDSDYESKWRIGEEVNPKGYLMREQRGDKNQCDGPVKSVGVCGVETEEVAVTIILLNFHRFAGGYCKFGSVCGFQHIRDRDVAEPMYENWSFDVRTQRRYEIEYSGFRPEKRAKTSLDSVEPDSRKRLEGLENKREQENPQEPERQRTEAQDNLQEFREQENPQNQIQINTERQRTMAHDNLQIVSDSRMHDPRRHDTELRLEREKMVNRELEKQRIEHLIDPLVRRYMQAKRDKEVEQRERASIESQRIVAQEILRQQRLQGMRENQNVDSRMHDPRRHDTELRLEREKMVNRELEKQRIEPLIGPLVRRYMQAKRDKEVEQRERASIESQRIVAQENLRQQRLQGMRENQNVDAHDQEKTQELGFKGKEGDGV

SEQ ID NO: 71674 - protein, 385 aa, Arabidopsis thaliana
  peptide (1)..(385): Ceres Seq. ID no. 4804282
  misc_feature (131)..(383): Pfam Name: Caldesmon Pfam Description: Caldesmon
  misc_feature (118)..(378): Homolog of NCBI NO: 586122 NR Description: Trichohyalin >gi|423321|pir||A40691 trichohyalin
  misc_feature (1)..(385): Homolog of NCBI NO: 15220484 NR Description: hypothetical protein; protein id: At1g29560.1
  misc_feature (142)..(375): Homolog of NCBI NO: 15220486 NR Description: zinc finger protein, putative; protein id: [Arabidopsis thaliana] >gi|25403078|pir||G86418 probable zinc
  misc_feature (88)..(375): Homolog of NCBI NO: 23943906 NR Description: trichohyalin [Homo sapiens]
  misc_feature (107)..(374): Homolog of NCBI NO: 24580684 NR Description: CG2839-PA [Drosophila melanogaster]
  misc_feature (107)..(374): Homolog of NCBI NO: 24580684 NR Description: CG2839-PA [Drosophila melanogaster]
  misc_feature (85)..(362): Homolog of NCBI NO: 28316334 NR Description: hair follicle protein AHF [Mus musculus]
  misc_feature (107)..(374): Homolog of NCBI NO: 24580684 NR Description: CG2839-PA [Drosophila melanogaster]
  misc_feature (81)..(270): Homolog of NCBI NO: 15220486 NR Description: zinc finger protein, putative; protein id: [Arabidopsis thaliana] >gi|25403078|pir||G86418 probable zinc
  misc_feature (85)..(374): Homolog of NCBI NO: 23943906 NR Description: trichohyalin [Homo sapiens]
MRFDESTQGWRDSDYESKWRIGEEVNPKGYLMREQRGDKNQCDGPVKSVGVCGVETEEVAVTIILLNFHRFAGGYCKFGSVCGFQHIRDRDVAEPMYENWSFDVRTQRRYEIEYSGFRPEKRAKTSLDSVEPDSRKRLEGLENKREQENPQEPERQRTEAQDNLQEFREQENPQNQIQINTERQRTMAHDNLQIVSDSRMHDPRRHDTELRLEREKMVNRELEKQRIEHLIDPLVRRYMQAKRDKEVEQRERASIESQRIVAQEILRQQRLQGMRENQNVDSRMHDPRRHDTELRLEREKMVNRELEKQRIEPLIGPLVRRYMQAKRDKEVEQRERASIESQRIVAQENLRQQRLQGMRENQNVDAHDQEKTQELGFKGKEGDGV

SEQ ID NO: 71675 - DNA, 1668 bp, Arabidopsis thaliana
  misc_feature (1)..(1668): Ceres Seq. ID no. 4804359
  misc_feature: MA Experiment ID: 20000184 Result: Up-regulated in Transcription
  misc_feature: MA Experiment 20000184 PARAMETER Experiment Name: At_Shoots__P Parameter: Age (day) Value: 7
  misc_feature: MA Experiment 20000184 PARAMETER Experiment Name: At_Shoots__P Parameter: Tissue Value: Shoots vs. Whole Plant
  misc_feature: MA Experiment ID: 20000185 Result: Up-regulated in Transcription
  misc_feature: MA Experiment 20000185 PARAMETER Experiment Name: At_Roots__P Parameter: Age (day) Value: 7 vs. 21
  misc_feature: MA Experiment 20000185 PARAMETER Experiment Name: At_Roots__P Parameter: Organism Value: A. thaliana
  misc_feature: MA Experiment 20000185 PARAMETER Experiment Name: At_Roots__P Parameter: Tissue Value: Roots vs. Whole Plant
  misc_feature: MA Experiment ID: 20000438 Result: Up-regulated in Transcription
  misc_feature: MA Experiment 20000438 PARAMETER Experiment Name: At_Shoots__P Parameter: Age (day) Value: 14
  misc_feature: MA Experiment 20000438 PARAMETER Experiment Name: At_Shoots__P Parameter: Tissue Value: Shoots vs. Whole Plant
  misc_feature: MA Experiment ID: 20000439 Result: Up-regulated in Transcription
  misc_feature: MA Experiment 20000439 PARAMETER Experiment Name: At_Roots__P Parameter: Age (day) Value: 14 vs. 21
  misc_feature: MA Experiment 20000439 PARAMETER Experiment Name: At_Roots__P Parameter: Organism Value: A. thaliana
  misc_feature: MA Experiment 20000439 PARAMETER Experiment Name: At_Roots__P Parameter: Tissue Value: Roots vs. Whole Plant
  misc_feature: MA Experiment ID: 20000527 Result: Down-regulated in Transcription
  misc_feature: MA Experiment 20000527 PARAMETER Experiment Name: At_10percent_PEG_P Parameter: Age (day) Value: 20
  misc_feature: MA Experiment 20000527 PARAMETER Experiment Name: At_10percent_PEG_P Parameter: Organism Value: A. thaliana
  misc_feature: MA Experiment 20000527 PARAMETER Experiment Name: At_10percent_PEG_P Parameter: Plant Line Value: WS
  misc_feature: MA Experiment 20000527 PARAMETER Experiment Name: At_10percent_PEG_P Parameter: Timepoint (day) Value: 20
  misc_feature: MA Experiment 20000527 PARAMETER Experiment Name: At_10percent_PEG_P Parameter: Tissue Value: Whole Plant
  misc_feature: MA Experiment 20000527 PARAMETER Experiment Name: At_10percent_PEG_P Parameter: Treatment Value: 10percent PEG vs. No Treatment
  misc_feature: MA Experiment ID: 20001247 Result: Up-regulated in Transcription
  misc_feature: MA Experiment 20001247 PARAMETER Experiment Name: At_Far-red-induction_P Parameter: Age (day) Value: 7
  misc_feature: MA Experiment 20001247 PARAMETER Experiment Name: At_Far-red-induction_P Parameter: Light Value: Far-red vs. White
  misc_feature: MA Experiment 20001247 PARAMETER Experiment Name: At_Far-red-induction_P Parameter: Organism Value: A. thaliana
  misc_feature: MA Experiment 20001247 PARAMETER Experiment Name: At_Far-red-induction_P Parameter: Plant Line Value: Columbia
  misc_feature: MA Experiment 20001247 PARAMETER Experiment Name: At_Far-red-induction_P Parameter: Timepoint (hr) Value: 1
  misc_feature: MA Experiment 20001247 PARAMETER Experiment Name: At_Far-red-induction_P Parameter: Tissue Value: Whole Plant
atgtcgacatccatcggcgataatgagactggagctatagtttcaaacgagaatgtcgagttttccgtcgatttccgaggcaatccatctatcagatcctcttccggtgcatggaaatcttctggcttcaccatgtgtgcggaagttgccgagaaattcgcctacttcggtatcgcctcgaatctgataacctacttcaccgaggcgttaggagagtcgacggctgttgcagcgtcaaacgttaacctctggcttgggacggcagctttcttgcctctcatatggggttctatcgccgactcttttcttggccgtttccgtacaatcctcttaacctcttctttctatatcatgggacttgggctgcttacgttttcagcaacgattccttctctttgtaatgatcaagaaacacgtgagtcgtgcgtctctcaggtcaaagtaataatcttcttttgtgctctctacctaattgctttgggagaaggaggcttcaaggtatgtcttcgagcctttggagcagatcagtttgatgaacaagacccaaatgagtccaaagccaagagttcttactttaactggttgtattttgctatatcaatcggcatattgaccactcgtctggtcacaaattatgtccaagagaatctgagctgggctttaggatatgcgattccatgtctttctatgatgcttgctctattcttgttcttacttggaatcaaaacttaccgcttcagcaccggaggagaaggaagacagggcaaaaaacatgataacccttttgttagaattggccgtgtttttgtggctgcagctagaaaccggcgacaaactccttctgatacttgtcttcttctgcctaacgaaagcaccaagaaattcagattcttggacagagcggtgatttcatgcgattcatatgaagttgaggaagcaaaagctgtgttgagtctcattccaatttggttgtgtagtttggtgtttggcattgtgtttgcgcaatctcctactttctttacaaagcaaggatctacaatggatagatcaatctcatcaacactccaagtccctgcagctacactccaatgcttcataagcctagcaatcctcgtcttcatcccaatctacgaccgtttattcgtcccaatcgcacgatcaatcactcgtaaaccagcaggaattacaacccttcagagaatttccaccggcattttcctctcaattatttcaatggtaatagctgctttggtcgagatgaaaagactcaagactgctcgagatcatggattagttgattcgcctaaagccacggtcccgatgagcgtttgctggctgattccacaatacattctctttggagtctctgacgttttcactatggttggtttgcaagagtttttctacggagaagtcccgccacagcttaggagcatgggactggctctatatctaagcataatcggcataggaaacttcttgagtagcttcatggtatcagtcatcgaggaagccacaagccagtccggtcaagtgagctggttctctaataacctgaaccaggcacatcttgattacttctactggctacttgcttgtctcagctccctcgcctttatttttactgtctattttgccaagtcctatctctacaacagcccaaagtag

SEQ ID NO: 71676 - protein, 555 aa, Arabidopsis thaliana
  peptide (1)..(555): Ceres Seq. ID no. 4804360
  misc_feature (106)..(488): Pfam Name: POT family Pfam Description: POT family
  misc_feature (1)..(555): Homolog of NCBI NO: 15218381 NR Description: peptide transporter PTR2-B, putative; protein id:
  misc_feature (22)..(550): Homolog of NCBI NO: 30687920 NR Description: oligopeptide transporter -related [Arabidopsis
  misc_feature (12)..(552): Homolog of NCBI NO: 22330582 NR Description: oligopeptide transporter, putative; protein id: supported by cDNA: gi_19699295 [Arabidopsis thaliana] At1g72130/F28P5.1 [Arabidopsis thaliana]
  misc_feature (12)..(549): Homolog of NCBI NO: 25406147 NR Description: probable peptide transporter PTR2-B T9N14.15 - Arabidopsis thaliana >gi|12323655|gb|AAG51788.1|AC067754_4
  misc_feature (49)..(552): Homolog of NCBI NO: 26450432 NR Description: putative peptide transporter PTR2-B [Arabidopsis
  misc_feature (12)..(534): Homolog of NCBI NO: 12322195 NR Description: oligopeptide transporter, putative [Arabidopsis
  misc_feature (14)..(551): Homolog of NCBI NO: 18086410 NR Description: At1g72120/F28P5_2 [Arabidopsis thaliana]
  misc_feature (14)..(551): Homolog of NCBI NO: 15218352 NR Description: oligopeptide transporter, putative; protein id: [Arabidopsis thaliana] >gi|25406146|pir||E96744 probable
  misc_feature (14)..(532): Homolog of NCBI NO: 15218352 NR Description: oligopeptide transporter, putative; protein id: [Arabidopsis thaliana] >gi|25406146|pir||E96744 probable
  misc_feature (9)..(551): Homolog of NCBI NO: 15219905 NR Description: peptide transporter, putative; protein id: [Arabidopsis thaliana] >gi|25402971|pir||G86358 protein Similar
MSTSIGDNETGAIVSNENVEFSVDFRGNPSIRSSSGAWKSSGFTMCAEVAEKFAYFGIASNLITYFTEALGESTAVAASNVNLWLGTAAFLPLIWGSIADSFLGRFRTILLTSSFYIMGLGLLTFSATIPSLCNDQETRESCVSQVKVIIFFCALYLIALGEGGFKVCLRAFGADQFDEQDPNESKAKSSYFNWLYFAISIGILTTRLVTNYVQENLSWALGYAIPCLSMMLALFLFLLGIKTYRFSTGGEGRQGKKHDNPFVRIGRVFVAAARNRRQTPSDTCLLLPNESTKKFRFLDRAVISCDSYEVEEAKAVLSLIPIWLCSLVFGIVFAQSPTFFTKQGSTMDRSISSTLQVPAATLQCFISLAILVFIPIYDRLFVPIARSITRKPAGITTLQRISTGIFLSIISMVIAALVEMKRLKTARDHGLVDSPKATVPMSVCWLIPQYILFGVSDVFTMVGLQEFFYGEVPPQLRSMGLALYLSIIGIGNFLSSFMVSVIEEATSQSGQVSWFSNNLNQAHLDYFYWLLACLSSLAFIFTVYFAKSYLYNSPK

SEQ ID NO: 71677 - protein, 511 aa, Arabidopsis thaliana
  peptide (1)..(511): Ceres Seq. ID no. 4804361
  misc_feature (62)..(444): Pfam Name: POT family Pfam Description: POT family
  misc_feature (1)..(511): Homolog of NCBI NO: 15218381 NR Description: peptide transporter PTR2-B, putative; protein id:
  misc_feature (1)..(506): Homolog of NCBI NO: 30687920 NR Description: oligopeptide transporter -related [Arabidopsis
  misc_feature (1)..(508): Homolog of NCBI NO: 22330582 NR Description: oligopeptide transporter, putative; protein id: supported by cDNA: gi_19699295 [Arabidopsis thaliana] At1g72130/F28P5.1 [Arabidopsis thaliana]
  misc_feature (1)..(505): Homolog of NCBI NO: 25406147 NR Description: probable peptide transporter PTR2-B T9N14.15 - Arabidopsis thaliana >gi|12323655|gb|AAG51788.1|AC067754_4
  misc_feature (5)..(508): Homolog of NCBI NO: 26450432 NR Description: putative peptide transporter PTR2-B [Arabidopsis
  misc_feature (1)..(490): Homolog of NCBI NO: 12322195 NR Description: oligopeptide transporter, putative [Arabidopsis
  misc_feature (1)..(507): Homolog of NCBI NO: 18086410 NR Description: At1g72120/F28P5_2 [Arabidopsis thaliana]
  misc_feature (1)..(507): Homolog of NCBI NO: 15218352 NR Description: oligopeptide transporter, putative; protein id: [Arabidopsis thaliana] >gi|25406146|pir||E96744 probable
  misc_feature (1)..(488): Homolog of NCBI NO: 15218352 NR Description: oligopeptide transporter, putative; protein id: [Arabidopsis thaliana] >gi|25406146|pir||E96744 probable
  misc_feature (1)..(507): Homolog of NCBI NO: 15219905 NR Description: peptide transporter, putative; protein id: [Arabidopsis thaliana] >gi|25402971|pir||G86358 protein Similar
MCAEVAEKFAYFGIASNLITYFTEALGESTAVAASNVNLWLGTAAFLPLIWGSIADSFLGRFRTILLTSSFYIMGLGLLTFSATIPSLCNDQETRESCVSQVKVIIFFCALYLIALGEGGFKVCLRAFGADQFDEQDPNESKAKSSYFNWLYFAISIGILTTRLVTNYVQENLSWALGYAIPCLSMMLALFLFLLGIKTYRFSTGGEGRQGKKHDNPFVRIGRVFVAAARNRRQTPSDTCLLLPNESTKKFRFLDRAVISCDSYEVEEAKAVLSLIPIWLCSLVFGIVFAQSPTFFTKQGSTMDRSISSTLQVPAATLQCFISLAILVFIPIYDRLFVPIARSITRKPAGITTLQRISTGIFLSIISMVIAALVEMKRLKTARDHGLVDSPKATVPMSVCWLIPQYILFGVSDVFTMVGLQEFFYGEVPPQLRSMGLALYLSIIGIGNFLSSFMVSVIEEATSQSGQVSWFSNNLNQAHLDYFYWLLACLSSLAFIFTVYFAKSYLYNSPK

SEQ ID NO: 71678 - protein, 438 aa, Arabidopsis thaliana
  peptide (1)..(438): Ceres Seq. ID no. 4804362
  misc_feature (1)..(371): Pfam Name: POT family Pfam Description: POT family
  misc_feature (1)..(438): Homolog of NCBI NO: 15218381 NR Description: peptide transporter PTR2-B, putative; protein id:
  misc_feature (1)..(433): Homolog of NCBI NO: 30687920 NR Description: oligopeptide transporter -related [Arabidopsis
  misc_feature (1)..(435): Homolog of NCBI NO: 22330582 NR Description: oligopeptide transporter, putative; protein id: supported by cDNA: gi_19699295 [Arabidopsis thaliana] At1g72130/F28P5.1 [Arabidopsis thaliana]
  misc_feature (1)..(432): Homolog of NCBI NO: 25406147 NR Description: probable peptide transporter PTR2-B T9N14.15 - Arabidopsis thaliana >gi|12323655|gb|AAG51788.1|AC067754_4
  misc_feature (1)..(435): Homolog of NCBI NO: 26450432 NR Description: putative peptide transporter PTR2-B [Arabidopsis
  misc_feature (1)..(417): Homolog of NCBI NO: 12322195 NR Description: oligopeptide transporter, putative [Arabidopsis
  misc_feature (1)..(434): Homolog of NCBI NO: 18086410 NR Description: At1g72120/F28P5_2 [Arabidopsis thaliana]
  misc_feature (1)..(434): Homolog of NCBI NO: 15218352 NR Description: oligopeptide transporter, putative; protein id: [Arabidopsis thaliana] >gi|25406146|pir||E96744 probable
  misc_feature (1)..(415): Homolog of NCBI NO: 15218352 NR Description: oligopeptide transporter, putative; protein id: [Arabidopsis thaliana] >gi|25406146|pir||E96744 probable
  misc_feature (1)..(434): Homolog of NCBI NO: 15219905 NR Description: peptide transporter, putative; protein id: [Arabidopsis thaliana] >gi|25402971|pir||G86358 protein Similar
MGLGLLTFSATIPSLCNDQETRESCVSQVKVIIFFCALYLIALGEGGFKVCLRAFGADQFDEQDPNESKAKSSYFNWLYFAISIGILTTRLVTNYVQENLSWALGYAIPCLSMMLALFLFLLGIKTYRFSTGGEGRQGKKHDNPFVRIGRVFVAAARNRRQTPSDTCLLLPNESTKKFRFLDRAVISCDSYEVEEAKAVLSLIPIWLCSLVFGIVFAQSPTFFTKQGSTMDRSISSTLQVPAATLQCFISLAILVFIPIYDRLFVPIARSITRKPAGITTLQRISTGIFLSIISMVIAALVEMKRLKTARDHGLVDSPKATVPMSVCWLIPQYILFGVSDVFTMVGLQEFFYGEVPPQLRSMGLALYLSIIGIGNFLSSFMVSVIEEATSQSGQVSWFSNNLNQAHLDYFYWLLACLSSLAFIFTVYFAKSYLYNSPK

SEQ ID NO: 71679 - DNA, 1758 bp, Arabidopsis thaliana
  misc_feature (1)..(1758): Ceres Seq. ID no. 4804363
  misc_feature: MA Experiment ID: 20000306 Result: Up-regulated in Transcription
  misc_feature: MA Experiment 20000306 PARAMETER Experiment Name: At_Germinating_Seeds_Sub_P Parameter: Age (hr) Value: 6 vs. 0
  misc_feature: MA Experiment 20000306 PARAMETER Experiment Name: At_Germinating_Seeds_Sub_P Parameter: Organism Value: A. thaliana
  misc_feature: MA Experiment 20000306 PARAMETER Experiment Name: At_Germinating_Seeds_Sub_P Parameter: Plant Line Value: WS
  misc_feature: MA Experiment 20000306 PARAMETER Experiment Name: At_Germinating_Seeds_Sub_P Parameter: Tissue Value: Germinating Seeds
  misc_feature: MA Experiment ID: 20000307 Result: Up-regulated in Transcription
  misc_feature: MA Experiment 20000307 PARAMETER Experiment Name: At_Germinating_Seeds_Sub_P Parameter: Age (hr) Value: 24 vs. 0
  misc_feature: MA Experiment 20000307 PARAMETER Experiment Name: At_Germinating_Seeds_Sub_P Parameter: Organism Value: A. thaliana
  misc_feature: MA Experiment 20000307 PARAMETER Experiment Name: At_Germinating_Seeds_Sub_P Parameter: Plant Line Value: WS
  misc_feature: MA Experiment 20000307 PARAMETER Experiment Name: At_Germinating_Seeds_Sub_P Parameter: Tissue Value: Germinating Seeds
  misc_feature: MA Experiment ID: 20000314 Result: Up-regulated in Transcription
  misc_feature: MA Experiment 20000314 PARAMETER Experiment Name: At_14day_Shoots-Roots_Sub_P Parameter: Age (day) Value: 14
  misc_feature: MA Experiment 20000314 PARAMETER Experiment Name: At_14day_Shoots-Roots_Sub_P Parameter: Organism Value: A. thaliana
  misc_feature: MA Experiment 20000314 PARAMETER Experiment Name: At_14day_Shoots-Roots_Sub_P Parameter: Plant Line Value: WS
  misc_feature: MA Experiment 20000314 PARAMETER Experiment Name: At_14day_Shoots-Roots_Sub_P Parameter: Tissue Value: Roots vs. Whole Plant
  misc_feature: MA Experiment ID: 20000315 Result: Down-regulated in Transcription
  misc_feature: MA Experiment 20000315 PARAMETER Experiment Name: At_14day_Shoots-Roots_Sub_P Parameter: Age (day) Value: 14
  misc_feature: MA Experiment 20000315 PARAMETER Experiment Name: At_14day_Shoots-Roots_Sub_P Parameter: Organism Value: A. thaliana
  misc_feature: MA Experiment 20000315 PARAMETER Experiment Name: At_14day_Shoots-Roots_Sub_P Parameter: Plant Line Value: WS
  misc_feature: MA Experiment 20000315 PARAMETER Experiment Name: At_14day_Shoots-Roots_Sub_P Parameter: Tissue Value: Shoots vs. Whole Plant
  misc_feature: MA Experiment ID: 20000328 Result: Down-regulated in Transcription
  misc_feature: MA Experiment 20000328 PARAMETER Experiment Name: At_42deg_Heat_Sub_P Parameter: Age (day) Value: 14
  misc_feature: MA Experiment 20000328 PARAMETER Experiment Name: At_42deg_Heat_Sub_P Parameter: Organism Value: A. thaliana
  misc_feature: MA Experiment 20000328 PARAMETER Experiment Name: At_42deg_Heat_Sub_P Parameter: Plant Line Value: WS
  misc_feature: MA Experiment 20000328 PARAMETER Experiment Name: At_42deg_Heat_Sub_P Parameter: Temperature (deg C) Value: 42 vs. 22
  misc_feature: MA Experiment 20000328 PARAMETER Experiment Name: At_42deg_Heat_Sub_P Parameter: Timepoint (hr) Value: 6
  misc_feature: MA Experiment 20000328 PARAMETER Experiment Name: At_42deg_Heat_Sub_P Parameter: Tissue Value: Aerial
  misc_feature: MA Experiment ID: 20000355 Result: Up-regulated in Transcription
  misc_feature: MA Experiment 20000355 PARAMETER Experiment Name: At_Siliques_Sub_P Parameter: Age (day) Value: 21
  misc_feature: MA Experiment 20000355 PARAMETER Experiment Name: At_Siliques_Sub_P Parameter: Organism Value: A. thaliana
  misc_feature: MA Experiment 20000355 PARAMETER Experiment Name: At_Siliques_Sub_P Parameter: Plant Line Value: WS
  misc_feature: MA Experiment 20000355 PARAMETER Experiment Name: At_Siliques_Sub_P Parameter: Tissue Value: Less Than 5mm Siliques vs. Whole Plant
  misc_feature: MA Experiment ID: 20000440 Result: Up-regulated in Transcription
  misc_feature: MA Experiment 20000440 PARAMETER Experiment Name: At_Closed-Flower__Sub_P Parameter: Tissue Value: Closed Flower vs. Whole Plant
atgcaagatctcttcggttcagttcgccgctcacttgtcttccgttctaccaccgacgatgagaatcaagagaatcatcctcctccgtttccttctctcctcgccgataaaatcacttcctgtatccgcaaatcaatggttttcgccaaatcccagtcacctccgaataactccaccgtacaaatcaaacctccgattcggtggcggaaaggtcagttaattggccgtggcgcttttggtactgtgtatatgggaatgaatctcgattccggtgagcttctcgccgttaaacaggttctgattacatctaattgtgcatccaaggaaaaaactcaggctcatattcaggagcttgaagaggaagtgaagctactcaagaatctctctcatccaaatatagttagatatttgggtacggtgagggaagatgaaactttgaatatcttgcttgaatttgttcctggtggatctatatcttcactcttggagaaatttggagcctttcctgaatctgttgttcggacatacacgaaccaactgcttttgggattggagtaccttcataatcatgccattatgcaccgtgacattaagggtgctaatatccttgtggataatcaaggatgcattaaacttgctgattttggtgcgtccaaacaggtagcggagttggctactatttcgggtgccaaatctatgaaaggaactccctattggatggctccagaagttattcttcaaaccgggcatagcttttctgctgatatttggagtgtaggatgcacagtgattgaaatggtgactggaaaagctccttggagccagcaatataaagagattgctgctattttccacattggaacgacgaaatcgcatcctccaatccctgacaatatctcctctgacgcaaatgattttttgctcaagtgtctgcagcaggaaccaaatctgcggccaaccgcttctgagctgctaaaggtgaaatggtcaacagacatccatttgttacgggcaaacagaaggaatctgcgtctaaagatcttacttcatttatgtcaaacatctacgagtgacgatgtaggagacatctgtaacttgggtagtctgacttgtacacttgctttccctgagaaatcaatccaaaataacagtttgtgtctgaaaagtaataacgggtatgatgacgatgatgataatgatatgtgtttgattgacgatgagaatttcttgacatataatggagagactggccctagtcttgacaataatactgatgccaagaagagctgtgataccatgagtgagatctctgatattttgaagtgcaaatttgacgaaaattctggaaacggagaaacagagacgaaagttagtatggaagttgaccatccatcatactcggaggatgaaaatgagctgactgagtcgaaaatcaaagctttcttagatgacaagggccatattggtcgatcaccttctagagcaacagatgcagcctgttgttccaagagtccagaaagtggtaatagctctggtgccccgaagaatagcaatgcaagtgctggtgctgaacaagaatcaaacagtcaaagtgtcgcgctgtcggagatagagaggaagtggaaggaagagcttgatcaagaacttgaaagaaagcgaagagagattacacggcaagcagggatgggatcatccccgagagatagaagcttgagccgacatagagagaagtcaagatttgcatctccaggcaaatga

SEQ ID NO: 71680 - protein, 585 aa, Arabidopsis thaliana
  peptide (1)..(585): Ceres Seq. ID no. 4804364
  misc_feature (68)..(330): Pfam Name: Protein kinase domain Pfam Description: Protein kinase domain
  misc_feature (1)..(585): Homolog of NCBI NO: 15221948 NR Description: NPK1-related protein kinase, putative; protein id:
  misc_feature (1)..(485): Homolog of NCBI NO: 25387090 NR Description: NPK1-related protein kinase 2 [imported] -
  misc_feature (10)..(485): Homolog of NCBI NO: 2342425 NR Description: NPK1-related protein kinase 2 [Arabidopsis
  misc_feature (1)..(485): Homolog of NCBI NO: 30680907 NR Description: protein kinase, putative [Arabidopsis thaliana]
  misc_feature (529)..(585): Homolog of NCBI NO: 30680907 NR Description: protein kinase, putative [Arabidopsis thaliana]
  misc_feature (6)..(485): Homolog of NCBI NO: 2342421 NR Description: NPK1-related protein kinase 1L [Arabidopsis
  misc_feature (529)..(585): Homolog of NCBI NO: 2342421 NR Description: NPK1-related protein kinase 1L [Arabidopsis
  misc_feature (485)..(555): Homolog of NCBI NO: 30680907 NR Description: protein kinase, putative [Arabidopsis thaliana]
  misc_feature (485)..(555): Homolog of NCBI NO: 2342421 NR Description: NPK1-related protein kinase 1L [Arabidopsis
  misc_feature (1)..(326): Homolog of NCBI NO: 2342423 NR Description: NPK1-related protein kinase 1S [Arabidopsis
MQDLFGSVRRSLVFRSTTDDENQENHPPPFPSLLADKITSCIRKSMVFAKSQSPPNNSTVQIKPPIRWRKGQLIGRGAFGTVYMGMNLDSGELLAVKQVLITSNCASKEKTQAHIQELEEEVKLLKNLSHPNIVRYLGTVREDETLNILLEFVPGGSISSLLEKFGAFPESVVRTYTNQLLLGLEYLHNHAIMHRDIKGANILVDNQGCIKLADFGASKQVAELATISGAKSMKGTPYWMAPEVILQTGHSFSADIWSVGCTVIEMVTGKAPWSQQYKEIAAIFHIGTTKSHPPIPDNISSDANDFLLKCLQQEPNLRPTASELLKVKWSTDIHLLRANRRNLRLKILLHLCQTSTSDDVGDICNLGSLTCTLAFPEKSIQNNSLCLKSNNGYDDDDDNDMCLIDDENFLTYNGETGPSLDNNTDAKKSCDTMSEISDILKCKFDENSGNGETETKVSMEVDHPSYSEDENELTESKIKAFLDDKGHIGRSPSRATDAACCSKSPESGNSSGAPKNSNASAGAEQESNSQSVALSEIERKWKEELDQELERKRREITRQAGMGSSPRDRSLSRHREKSRFASPGK

SEQ ID NO: 71681 - protein, 540 aa, Arabidopsis thaliana
  peptide (1)..(540): Ceres Seq. ID no. 4804365
  misc_feature (23)..(285): Pfam Name: Protein kinase domain Pfam Description: Protein kinase domain
  misc_feature (1)..(540): Homolog of NCBI NO: 15221948 NR Description: NPK1-related protein kinase, putative; protein id:
  misc_feature (1)..(440): Homolog of NCBI NO: 25387090 NR Description: NPK1-related protein kinase 2 [imported] -
  misc_feature (1)..(440): Homolog of NCBI NO: 2342425 NR Description: NPK1-related protein kinase 2 [Arabidopsis
  misc_feature (1)..(440): Homolog of NCBI NO: 30680907 NR Description: protein kinase, putative [Arabidopsis thaliana]
  misc_feature (484)..(540): Homolog of NCBI NO: 30680907 NR Description: protein kinase, putative [Arabidopsis thaliana]
  misc_feature (1)..(440): Homolog of NCBI NO: 2342421 NR Description: NPK1-related protein kinase 1L [Arabidopsis
  misc_feature (484)..(540): Homolog of NCBI NO: 2342421 NR Description: NPK1-related protein kinase 1L [Arabidopsis
  misc_feature (440)..(510): Homolog of NCBI NO: 30680907 NR Description: protein kinase, putative [Arabidopsis thaliana]
  misc_feature (440)..(510): Homolog of NCBI NO: 2342421 NR Description: NPK1-related protein kinase 1L [Arabidopsis
  misc_feature (1)..(281): Homolog of NCBI NO: 2342423 NR Description: NPK1-related protein kinase 1S [Arabidopsis
MVFAKSQSPPNNSTVQIKPPIRWRKGQLIGRGAFGTVYMGMNLDSGELLAVKQVLITSNCASKEKTQAHIQELEEEVKLLKNLSHPNIVRYLGTVREDETLNILLEFVPGGSISSLLEKFGAFPESVVRTYTNQLLLGLEYLHNHAIMHRDIKGANILVDNQGCIKLADFGASKQVAELATISGAKSMKGTPYWMAPEVILQTGHSFSADIWSVGCTVIEMVTGKAPWSQQYKEIAAIFHIGTTKSHPPIPDNISSDANDFLLKCLQQEPNLRPTASELLKVKWSTDIHLLRANRRNLRLKILLHLCQTSTSDDVGDICNLGSLTCTLAFPEKSIQNNSLCLKSNNGYDDDDDNDMCLIDDENFLTYNGETGPSLDNNTDAKKSCDTMSEISDILKCKFDENSGNGETETKVSMEVDHPSYSEDENELTESKIKAFLDDKGHIGRSPSRATDAACCSKSPESGNSSGAPKNSNASAGAEQESNSQSVALSEIERKWKEELDQELERKRREITRQAGMGSSPRDRSLSRHREKSRFASPGK

SEQ ID NO: 71682 - protein, 502 aa, Arabidopsis thaliana
  peptide (1)..(502): Ceres Seq. ID no. 4804366
  misc_feature (1)..(247): Pfam Name: Protein kinase domain Pfam Description: Protein kinase domain
  misc_feature (1)..(502): Homolog of NCBI NO: 15221948 NR Description: NPK1-related protein kinase, putative; protein id:
  misc_feature (1)..(402): Homolog of NCBI NO: 25387090 NR Description: NPK1-related protein kinase 2 [imported] -
  misc_feature (1)..(402): Homolog of NCBI NO: 2342425 NR Description: NPK1-related protein kinase 2 [Arabidopsis
  misc_feature (1)..(402): Homolog of NCBI NO: 30680907 NR Description: protein kinase, putative [Arabidopsis thaliana]
  misc_feature (446)..(502): Homolog of NCBI NO: 30680907 NR Description: protein kinase, putative [Arabidopsis thaliana]
  misc_feature (1)..(402): Homolog of NCBI NO: 2342421 NR Description: NPK1-related protein kinase 1L [Arabidopsis
  misc_feature (446)..(502): Homolog of NCBI NO: 2342421 NR Description: NPK1-related protein kinase 1L [Arabidopsis
  misc_feature (402)..(472): Homolog of NCBI NO: 30680907 NR Description: protein kinase, putative [Arabidopsis thaliana]
  misc_feature (402)..(472): Homolog of NCBI NO: 2342421 NR Description: NPK1-related protein kinase 1L [Arabidopsis
  misc_feature (1)..(243): Homolog of NCBI NO: 2342423 NR Description: NPK1-related protein kinase 1S [Arabidopsis
MGMNLDSGELLAVKQVLITSNCASKEKTQAHIQELEEEVKLLKNLSHPNIVRYLGTVREDETLNILLEFVPGGSISSLLEKFGAFPESVVRTYTNQLLLGLEYLHNHAIMHRDIKGANILVDNQGCIKLADFGASKQVAELATISGAKSMKGTPYWMAPEVILQTGHSFSADIWSVGCTVIEMVTGKAPWSQQYKEIAAIFHIGTTKSHPPIPDNISSDANDFLLKCLQQEPNLRPTASELLKVKWSTDIHLLRANRRNLRLKILLHLCQTSTSDDVGDICNLGSLTCTLAFPEKSIQNNSLCLKSNNGYDDDDDNDMCLIDDENFLTYNGETGPSLDNNTDAKKSCDTMSEISDILKCKFDENSGNGETETKVSMEVDHPSYSEDENELTESKIKAFLDDKGHIGRSPSRATDAACCSKSPESGNSSGAPKNSNASAGAEQESNSQSVALSEIERKWKEELDQELERKRREITRQAGMGSSPRDRSLSRHREKSRFASPGK

SEQ ID NO: 71683 - DNA, 1791 bp, Arabidopsis thaliana
  misc_feature (1)..(1791): Ceres Seq. ID no. 4804398
  misc_feature: MA Experiment ID: 20000227 Result: Down-regulated in Transcription
  misc_feature: MA Experiment 20000227 PARAMETER Experiment Name: At_Root-Tips-vs-Tops_P Parameter: Tissue Value: Root Tips vs. Root Tops
  misc_feature: MA Experiment ID: 20000439 Result: Up-regulated in Transcription
  misc_feature: MA Experiment 20000439 PARAMETER Experiment Name: At_Roots__P Parameter: Age (day) Value: 14 vs. 21
  misc_feature: MA Experiment 20000439 PARAMETER Experiment Name: At_Roots__P Parameter: Organism Value: A. thaliana
  misc_feature: MA Experiment 20000439 PARAMETER Experiment Name: At_Roots__P Parameter: Tissue Value: Roots vs. Whole Plant
  misc_feature: MA Experiment ID: 20000451 Result: Up-regulated in Transcription
  misc_feature: MA Experiment 20000451 PARAMETER Experiment Name: At_CS6879_Shoots-Roots_P Parameter: Age (day) Value: 14
  misc_feature: MA Experiment 20000451 PARAMETER Experiment Name: At_CS6879_Shoots-Roots_P Parameter: Organism Value: A. thaliana
  misc_feature: MA Experiment 20000451 PARAMETER Experiment Name: At_CS6879_Shoots-Roots_P Parameter: Plant Line Value: CS6879 vs. WS
  misc_feature: MA Experiment 20000451 PARAMETER Experiment Name: At_CS6879_Shoots-Roots_P Parameter: Tissue Value: Roots
  misc_feature: MA Experiment ID: 20000495 Result: Up-regulated in Transcription
  misc_feature: MA Experiment 20000495 PARAMETER Experiment Name: At_Guard_Cells_P Parameter: Harvest Date Value: 8/2/2002
  misc_feature: MA Experiment 20000495 PARAMETER Experiment Name: At_Guard_Cells_P Parameter: Organism Value: A. thaliana
  misc_feature: MA Experiment 20000495 PARAMETER Experiment Name: At_Guard_Cells_P Parameter: Tissue Value: Guard Cells vs. Leaves
  misc_feature: MA Experiment ID: 20001556 Result: Down-regulated in Transcription
  misc_feature: MA Experiment 20001556 PARAMETER Experiment Name: At_Drought_Soil_Dry_P Parameter: Age (day) Value: 26
  misc_feature: MA Experiment 20001556 PARAMETER Experiment Name: At_Drought_Soil_Dry_P Parameter: Organism Value: A. thaliana
  misc_feature: MA Experiment 20001556 PARAMETER Experiment Name: At_Drought_Soil_Dry_P Parameter: Plant Line Value: WS
  misc_feature: MA Experiment 20001556 PARAMETER Experiment Name: At_Drought_Soil_Dry_P Parameter: Post Timepoint (hr) Value: None
  misc_feature: MA Experiment 20001556 PARAMETER Experiment Name: At_Drought_Soil_Dry_P Parameter: Post-Treatment Value: None
  misc_feature: MA Experiment 20001556 PARAMETER Experiment Name: At_Drought_Soil_Dry_P Parameter: Timepoint (day) Value: 12
  misc_feature: MA Experiment 20001556 PARAMETER Experiment Name: At_Drought_Soil_Dry_P Parameter: Treatment Value: Drought vs. No Drought
atggatgttcatgatctatctgaagaagccaaaagaggagtaatacacacgtcggaggaatcattggacgatctttgtgttgattttcgaggtcggccatgcaggccaagcaagcatggtggtacaagagctgccctctttgttctaggcttccaagctttcgagatgatggcgatcgcagctgttggaaacaacttgatcacatacgtattcaatgagatgcatttccctttgtcaaaatccgcaaacctcgttactaacttcataggaacggtgtttctcctctcgcttcttggtggcttcctctctgattcataccttggaagctttcgtaccatgctcgtttttggcgtcatcgaaatctctgtattccaagctcatctcccagagctaagaccaccagaatgcaacatgaagagcaccacaatacattgcgtagaggcaaatggttacaaggcagccactctctacaccgcactctgtttagtggccttagggagcggctgcctcaaaccgaacatcatctctcacggtgcaaaccagtttcaaaggaaagatttgaggaagctctcgagtttcttcaatgcggcttacttcgccttctcaatgggtcagcttattgcactcacactcttagtttgggtgcaaacacattctggtatggacgttggttttggtgtctccgcggctgttatggccgcggggatgatcagccttgtcgctggaactagcttttataggaataaaccgcctagtggtagcatcttcacaccaattgctcaggtcttcgtagccgcgatcactaaacgaaaacagatttgcccatcaaacccaaacatggttcaccaaccttcaacggatcttgttcgtgtcaaacctctcctccattctaataaattcaggtttcttgacaaggcttgcatcaagacgcaaggcaaggcaatggagagtccatggagactctgcacaatcgaacaagtccatcaagtcaagatattgttatcagtcataccgatattcgcgtgtactatcatcttcaacaccatcttagctcagcttcaaactttctctgttcagcaaggaagttccatgaacacacacattacaaaaactttccaaattccaccagcttctcttcaagccattccttacatcattctcatcttctttgtgcctctctacgagacgttcttcgtcccactcgctagaaaactcacgggaaacgattctggaatctctcctcttcagagaattggcactggactgttcttagcaactttctcgatggttgcagccgctttagtggagaagaagagacgagaatcgttcttggaacagaacgtaatgctctcgatcttttggatcgcgccgcagtttctgatatttggtttatcagagatgtttacagccgttggattagtggagtttttttacaaacagtcttcacagagtatgcaatcttttctcacagcaatgacatactgttcttactctttcgggttttatcttagctctgttcttgtctcgaccgtgaatagagttacttctagtaatggttccgggaccaaagaaggttggttaggcgataatgaccttaacaaagatagattagatcacttttactggcttttagcttcattgagtttcatcaacttctttaattatcttttctggtcaagatggtattcgtgtgatccgtccgcgacacatcatagcgccgaagtcaatagcttggaggctttagaaaatggcgaaatcaaggattccacgacggagaagcctagaatttga

SEQ ID NO: 71684 - protein, 596 aa, Arabidopsis thaliana
  peptide (1)..(596): Ceres Seq. ID no. 4804399
  misc_feature (110)..(497): Pfam Name: POT family Pfam Description: POT family
  misc_feature (20)..(561): Homolog of NCBI NO: 15218903 NR Description: oligopeptide transporter, putative; protein id: supported by cDNA: gi_14334727, supported by cDNA: gi_15293214 thaliana] >gi|14334728|gb|AAK59542.1| putative oligopeptide
  misc_feature (117)..(561): Homolog of NCBI NO: 25404224 NR Description: hypothetical protein F23H11.6 [imported] - thaliana >gi|5080808|gb|AAD39317.1|AC007258_6 Similar to nitrate
  misc_feature (41)..(563): Homolog of NCBI NO: 32479675 NR Description: P0076O17.8 [Oryza sativa (japonica
  misc_feature (188)..(585): Homolog of NCBI NO: 38346577 NR Description: OSJNBa0064D20.8 [Oryza sativa (japonica
  misc_feature (27)..(571): Homolog of NCBI NO: 34909514 NR Description: putative nitrate transporter [Oryza sativa
  misc_feature (312)..(562): Homolog of NCBI NO: 17064754 NR Description: nitrate transporter (NTL1) [Arabidopsis thaliana]
  misc_feature (28)..(269): Homolog of NCBI NO: 17064754 NR Description: nitrate transporter (NTL1) [Arabidopsis thaliana]
  misc_feature (312)..(562): Homolog of NCBI NO: 18409382 NR Description: nitrate transporter (NTL1); protein id: supported by cDNA: gi_17064753, supported by cDNA: gi_3377516 thaliana] >gi|23397158|gb|AAN31862.1| putative nitrate
  misc_feature (312)..(562): Homolog of NCBI NO: 25404844 NR Description: nitrate transporter (NTL1), 53025-56402 - Arabidopsis thaliana >gi|12325224|gb|AAG52554.1|AC010675_2
  misc_feature (28)..(269): Homolog of NCBI NO: 18409382 NR Description: nitrate transporter (NTL1); protein id: supported by cDNA: gi_17064753, supported by cDNA: gi_3377516 thaliana] >gi|23397158|gb|AAN31862.1| putative nitrate
MDVHDLSEEAKRGVIHTSEESLDDLCVDFRGRPCRPSKHGGTRAALFVLGFQAFEMMAIAAVGNNLITYVFNEMHFPLSKSANLVTNFIGTVFLLSLLGGFLSDSYLGSFRTMLVFGVIEISVFQAHLPELRPPECNMKSTTIHCVEANGYKAATLYTALCLVALGSGCLKPNIISHGANQFQRKDLRKLSSFFNAAYFAFSMGQLIALTLLVWVQTHSGMDVGFGVSAAVMAAGMISLVAGTSFYRNKPPSGSIFTPIAQVFVAAITKRKQICPSNPNMVHQPSTDLVRVKPLLHSNKFRFLDKACIKTQGKAMESPWRLCTIEQVHQVKILLSVIPIFACTIIFNTILAQLQTFSVQQGSSMNTHITKTFQIPPASLQAIPYIILIFFVPLYETFFVPLARKLTGNDSGISPLQRIGTGLFLATFSMVAAALVEKKRRESFLEQNVMLSIFWIAPQFLIFGLSEMFTAVGLVEFFYKQSSQSMQSFLTAMTYCSYSFGFYLSSVLVSTVNRVTSSNGSGTKEGWLGDNDLNKDRLDHFYWLLASLSFINFFNYLFWSRWYSCDPSATHHSAEVNSLEALENGEIKDSTTEKPRI

SEQ ID NO: 71685 - protein, 541 aa, Arabidopsis thaliana
  peptide (1)..(541): Ceres Seq. ID no. 4804400
  misc_feature (55)..(442): Pfam Name: POT family Pfam Description: POT family
  misc_feature (1)..(506): Homolog of NCBI NO: 15218903 NR Description: oligopeptide transporter, putative; protein id: supported by cDNA: gi_14334727, supported by cDNA: gi_15293214 thaliana] >gi|14334728|gb|AAK59542.1| putative oligopeptide
  misc_feature (62)..(506): Homolog of NCBI NO: 25404224 NR Description: hypothetical protein F23H11.6 [imported] - thaliana >gi|5080808|gb|AAD39317.1|AC007258_6 Similar to nitrate
  misc_feature (1)..(508): Homolog of NCBI NO: 32479675 NR Description: P0076O17.8 [Oryza sativa (japonica
  misc_feature (133)..(530): Homolog of NCBI NO: 38346577 NR Description: OSJNBa0064D20.8 [Oryza sativa (japonica
  misc_feature (1)..(516): Homolog of NCBI NO: 34909514 NR Description: putative nitrate transporter [Oryza sativa
  misc_feature (257)..(507): Homolog of NCBI NO: 17064754 NR Description: nitrate transporter (NTL1) [Arabidopsis thaliana]
  misc_feature (1)..(214): Homolog of NCBI NO: 17064754 NR Description: nitrate transporter (NTL1) [Arabidopsis thaliana]
  misc_feature (257)..(507): Homolog of NCBI NO: 18409382 NR Description: nitrate transporter (NTL1); protein id: supported by cDNA: gi_17064753, supported by cDNA: gi_3377516 thaliana] >gi|23397158|gb|AAN31862.1| putative nitrate
  misc_feature (257)..(507): Homolog of NCBI NO: 25404844 NR Description: nitrate transporter (NTL1), 53025-56402 - Arabidopsis thaliana >gi|12325224|gb|AAG52554.1|AC010675_2
  misc_feature (1)..(214): Homolog of NCBI NO: 18409382 NR Description: nitrate transporter (NTL1); protein id: supported by cDNA: gi_17064753, supported by cDNA: gi_3377516 thaliana] >gi|23397158|gb|AAN31862.1| putative nitrate
MMAIAAVGNNLITYVFNEMHFPLSKSANLVTNFIGTVFLLSLLGGFLSDSYLGSFRTMLVFGVIEISVFQAHLPELRPPECNMKSTTIHCVEANGYKAATLYTALCLVALGSGCLKPNIISHGANQFQRKDLRKLSSFFNAAYFAFSMGQLIALTLLVWVQTHSGMDVGFGVSAAVMAAGMISLVAGTSFYRNKPPSGSIFTPIAQVFVAAITKRKQICPSNPNMVHQPSTDLVRVKPLLHSNKFRFLDKACIKTQGKAMESPWRLCTIEQVHQVKILLSVIPIFACTIIFNTILAQLQTFSVQQGSSMNTHITKTFQIPPASLQAIPYIILIFFVPLYETFFVPLARKLTGNDSGISPLQRIGTGLFLATFSMVAAALVEKKRRESFLEQNVMLSIFWIAPQFLIFGLSEMFTAVGLVEFFYKQSSQSMQSFLTAMTYCSYSFGFYLSSVLVSTVNRVTSSNGSGTKEGWLGDNDLNKDRLDHFYWLLASLSFINFFNYLFWSRWYSCDPSATHHSAEVNSLEALENGEIKDSTTEKPRI

SEQ ID NO: 71686 - protein, 540 aa, Arabidopsis thaliana
  peptide (1)..(540): Ceres Seq. ID no. 4804401
  misc_feature (54)..(441): Pfam Name: POT family Pfam Description: POT family
  misc_feature (1)..(505): Homolog of NCBI NO: 15218903 NR Description: oligopeptide transporter, putative; protein id: supported by cDNA: gi_14334727, supported by cDNA: gi_15293214 thaliana] >gi|14334728|gb|AAK59542.1| putative oligopeptide
  misc_feature (61)..(505): Homolog of NCBI NO: 25404224 NR Description: hypothetical protein F23H11.6 [imported] - thaliana >gi|5080808|gb|AAD39317.1|AC007258_6 Similar to nitrate
  misc_feature (1)..(507): Homolog of NCBI NO: 32479675 NR Description: P0076O17.8 [Oryza sativa (japonica
  misc_feature (132)..(529): Homolog of NCBI NO: 38346577 NR Description: OSJNBa0064D20.8 [Oryza sativa (japonica
  misc_feature (1)..(515): Homolog of NCBI NO: 34909514 NR Description: putative nitrate transporter [Oryza sativa
  misc_feature (256)..(506): Homolog of NCBI NO: 17064754 NR Description: nitrate transporter (NTL1) [Arabidopsis thaliana]
  misc_feature (1)..(213): Homolog of NCBI NO: 17064754 NR Description: nitrate transporter (NTL1) [Arabidopsis thaliana]
  misc_feature (256)..(506): Homolog of NCBI NO: 18409382 NR Description: nitrate transporter (NTL1); protein id: supported by cDNA: gi_17064753, supported by cDNA: gi_3377516 thaliana] >gi|23397158|gb|AAN31862.1| putative nitrate
  misc_feature (256)..(506): Homolog of NCBI NO: 25404844 NR Description: nitrate transporter (NTL1), 53025-56402 - Arabidopsis thaliana >gi|12325224|gb|AAG52554.1|AC010675_2
  misc_feature (1)..(213): Homolog of NCBI NO: 18409382 NR Description: nitrate transporter (NTL1); protein id: supported by cDNA: gi_17064753, supported by cDNA: gi_3377516 thaliana] >gi|23397158|gb|AAN31862.1| putative nitrate
MAIAAVGNNLITYVFNEMHFPLSKSANLVTNFIGTVFLLSLLGGFLSDSYLGSFRTMLVFGVIEISVFQAHLPELRPPECNMKSTTIHCVEANGYKAATLYTALCLVALGSGCLKPNIISHGANQFQRKDLRKLSSFFNAAYFAFSMGQLIALTLLVWVQTHSGMDVGFGVSAAVMAAGMISLVAGTSFYRNKPPSGSIFTPIAQVFVAAITKRKQICPSNPNMVHQPSTDLVRVKPLLHSNKFRFLDKACIKTQGKAMESPWRLCTIEQVHQVKILLSVIPIFACTIIFNTILAQLQTFSVQQGSSMNTHITKTFQIPPASLQAIPYIILIFFVPLYETFFVPLARKLTGNDSGISPLQRIGTGLFLATFSMVAAALVEKKRRESFLEQNVMLSIFWIAPQFLIFGLSEMFTAVGLVEFFYKQSSQSMQSFLTAMTYCSYSFGFYLSSVLVSTVNRVTSSNGSGTKEGWLGDNDLNKDRLDHFYWLLASLSFINFFNYLFWSRWYSCDPSATHHSAEVNSLEALENGEIKDSTTEKPRI

SEQ ID NO: 71687 - DNA, 1806 bp, Arabidopsis thaliana
  misc_feature (1)..(1806): Ceres Seq. ID no. 4804683
atgcttgaatttagggattctccagtttttcaatatattaatgatctctctccaatagagccagtgaagccaggacgcccagagaatatcttgcactcactggtttttacatctccatcatcatcatcatctctattttgttccccgcagttaaactcttaccgagattccagatttttcatcaaaaggcatcgttctctagatctatcgagtccagtagtcctcatcggtgagactctaaaaaactcaccagatgctttatgggaggagaagctaaagtgtaggcctgagaagttggaaaatgtttctgaacccaagccatttaaggagcagataagcttagcaattgagttggcgaattcattgaaacacggaagagatggatgtgatattcagatggtttcttgtgatgaagtacctatggatgctgatgatgaaataggaagcggtggtggatccagagagctgtctgatgagttatgtagacagtcttttgatccacttgactttgatgctgattcagatggagtacttcacactgatgaaatggaagctgagagtgggtttggtaaagaagtaataatgtttgatgttgctgatatccagaactatgagcaacagattccaaggaccacagatcctagattttattctcttgcttctgagcctcaacagttttctatctactgtaataactcaaattatgtcgaagagcgggaaggttcgtgcagtgtacaagttgcagctggagctccagacattaatctcagttgttcctccaaggtagcagctattgattcaactgccgaagctgaagacaaggaagataaagaccttcagcccagtggcaagcaacgaagtgtacgcaggcgctgcttaacttttgacatgggagggtctcacaaaaggatacctttgcgtgattctacaaatgatcttcctcttgattctacctctatcaataaagctcccagtccacaaaattgtttagacaccagtaaacaagacactgatgagattctacccattccacgaacgattggcctgcacttgaatggtttcgtgaacccctcagtctcaagtggccgaaaaaaaaaaaaaatcaaagatggtcaggcttttccttctacaacatttcattataatattgaagatgaattctcaactcctgtctccacaaaaagagatttggtggtattcagtgatgtcaaaatcatggagcctcctgagagatcagtggaaggagaatgttttgaccaactcatggcaatggaaaataggtattgtgaatgtttttccgctggtctattctgtggtgaaccttgttcatgtcaaaattgtttcaataagcccattcatgaagacctagttatgaaaagtcgtgaagtgattaaagcccgcaacccattagcttttgctccaaaagtggtctcaacttctgatactgttatagatttatgggtcgagaacagcaagactcctgcttcagcaagacacaaaagaggatgcaactgcaggaaatcaggctgctcaaagaaatattgtgaatgctttatgatgggcgttggatgctcctctaactgcagatgcatgggatgcaagaatacttttggtcacacaaatgagcaatgtgcgggagattctgatgtggtaacaatcaatgatgaagctaaacactatggtgatcatggcgatgcttcaaggcaaaacgaagaaatcttaaccagtgagagaaaccgcttgttgctccctggttctgtagcattccgttccttaacatcactgtcaaacctgtctgaactttga

SEQ ID NO: 71688 - protein, 601 aa, Arabidopsis thaliana
  peptide (1)..(601): Ceres Seq. ID no. 4804684
  misc_feature (498)..(539): Pfam Name: Tesmin/TSO1-like CXC domain Pfam Description: Tesmin/TSO1-like CXC domain
  misc_feature (2)..(83): Homolog of NCBI NO: 18403510 NR Description: expressed protein; protein id: At3g22760.1, by cDNA: gi_20466373, supported by cDNA: gi_7767426 [Arabidopsis >gi|20466374|gb|AAM20504.1| unknown protein [Arabidopsis
  misc_feature (500)..(535): Homolog of NCBI NO: 28393078 NR Description: unknown protein [Arabidopsis thaliana]
  misc_feature (4)..(189): Homolog of NCBI NO: 15233572 NR Description: hypothetical protein; protein id: At4g14770.1
  misc_feature (3)..(155): Homolog of NCBI NO: 6739821 NR Description: putative DNA binding protein [Arabidopsis >gi|7767425|gb|AAF69124.1|AF204059_1 CXC domain protein TSO1
  misc_feature (396)..(573): Homolog of NCBI NO: 18403510 NR Description: expressed protein; protein id: At3g22760.1, by cDNA: gi_20466373, supported by cDNA: gi_7767426 [Arabidopsis >gi|20466374|gb|AAM20504.1| unknown protein [Arabidopsis
  misc_feature (2)..(83): Homolog of NCBI NO: 7767427 NR Description: CXC domain containing TSO1-like protein 1
  misc_feature (396)..(573): Homolog of NCBI NO: 7767427 NR Description: CXC domain containing TSO1-like protein 1
  misc_feature (288)..(538): Homolog of NCBI NO: 6739821 NR Description: putative DNA binding protein [Arabidopsis >gi|7767425|gb|AAF69124.1|AF204059_1 CXC domain protein TSO1
  misc_feature (321)..(584): Homolog of NCBI NO: 15233572 NR Description: hypothetical protein; protein id: At4g14770.1
  misc_feature (428)..(595): Homolog of NCBI NO: 34393829 NR Description: putative CXC domain protein TSO1 [Oryza sativa
MLEFRDSPVFQYINDLSPIEPVKPGRPENILHSLVFTSPSSSSSLFCSPQLNSYRDSRFFIKRHRSLDLSSPVVLIGETLKNSPDALWEEKLKCRPEKLENVSEPKPFKEQISLAIELANSLKHGRDGCDIQMVSCDEVPMDADDEIGSGGGSRELSDELCRQSFDPLDFDADSDGVLHTDEMEAESGFGKEVIMFDVADIQNYEQQIPRTTDPRFYSLASEPQQFSIYCNNSNYVEEREGSCSVQVAAGAPDINLSCSSKVAAIDSTAEAEDKEDKDLQPSGKQRSVRRRCLTFDMGGSHKRIPLRDSTNDLPLDSTSINKAPSPQNCLDTSKQDTDEILPIPRTIGLHLNGFVNPSVSSGRKKKKIKDGQAFPSTTFHYNIEDEFSTPVSTKRDLVVFSDVKIMEPPERSVEGECFDQLMAMENRYCECFSAGLFCGEPCSCQNCFNKPIHEDLVMKSREVIKARNPLAFAPKVVSTSDTVIDLWVENSKTPASARHKRGCNCRKSGCSKKYCECFMMGVGCSSNCRCMGCKNTFGHTNEQCAGDSDVVTINDEAKHYGDHGDASRQNEEILTSERNRLLLPGSVAFRSLTSLSNLSEL

SEQ ID NO: 71689 - protein, 469 aa, Arabidopsis thaliana
  peptide (1)..(469): Ceres Seq. ID no. 4804685
  misc_feature (366)..(407): Pfam Name: Tesmin/TSO1-like CXC domain Pfam Description: Tesmin/TSO1-like CXC domain
  misc_feature (368)..(403): Homolog of NCBI NO: 28393078 NR Description: unknown protein [Arabidopsis thaliana]
  misc_feature (189)..(452): Homolog of NCBI NO: 15233572 NR Description: hypothetical protein; protein id: At4g14770.1
  misc_feature (1)..(57): Homolog of NCBI NO: 15233572 NR Description: hypothetical protein; protein id: At4g14770.1
  misc_feature (156)..(406): Homolog of NCBI NO: 6739821 NR Description: putative DNA binding protein [Arabidopsis >gi|7767425|gb|AAF69124.1|AF204059_1 CXC domain protein TSO1
  misc_feature (1)..(23): Homolog of NCBI NO: 6739821 NR Description: putative DNA binding protein [Arabidopsis >gi|7767425|gb|AAF69124.1|AF204059_1 CXC domain protein TSO1
  misc_feature (264)..(441): Homolog of NCBI NO: 7767427 NR Description: CXC domain containing TSO1-like protein 1
  misc_feature (264)..(441): Homolog of NCBI NO: 18403510 NR Description: expressed protein; protein id: At3g22760.1, by cDNA: gi_20466373, supported by cDNA: gi_7767426 [Arabidopsis >gi|20466374|gb|AAM20504.1| unknown protein [Arabidopsis
  misc_feature (296)..(463): Homolog of NCBI NO: 34393829 NR Description: putative CXC domain protein TSO1 [Oryza sativa
  misc_feature (156)..(406): Homolog of NCBI NO: 15028139 NR Description: putative DNA binding protein [Arabidopsis
  misc_feature (1)..(406): Homolog of NCBI NO: 30686784 NR Description: DNA binding protein -related [Arabidopsis
MVSCDEVPMDADDEIGSGGGSRELSDELCRQSFDPLDFDADSDGVLHTDEMEAESGFGKEVIMFDVADIQNYEQQIPRTTDPRFYSLASEPQQFSIYCNNSNYVEEREGSCSVQVAAGAPDINLSCSSKVAAIDSTAEAEDKEDKDLQPSGKQRSVRRRCLTFDMGGSHKRIPLRDSTNDLPLDSTSINKAPSPQNCLDTSKQDTDEILPIPRTIGLHLNGFVNPSVSSGRKKKKIKDGQAFPSTTFHYNIEDEFSTPVSTKRDLVVFSDVKIMEPPERSVEGECFDQLMAMENRYCECFSAGLFCGEPCSCQNCFNKPIHEDLVMKSREVIKARNPLAFAPKVVSTSDTVIDLWVENSKTPASARHKRGCNCRKSGCSKKYCECFMMGVGCSSNCRCMGCKNTFGHTNEQCAGDSDVVTINDEAKHYGDHGDASRQNEEILTSERNRLLLPGSVAFRSLTSLSNLSEL

SEQ ID NO: 71690 - protein, 461 aa, Arabidopsis thaliana
  peptide (1)..(461): Ceres Seq. ID no. 4804686
  misc_feature (358)..(399): Pfam Name: Tesmin/TSO1-like CXC domain Pfam Description: Tesmin/TSO1-like CXC domain
  misc_feature (360)..(395): Homolog of NCBI NO: 28393078 NR Description: unknown protein [Arabidopsis thaliana]
  misc_feature (181)..(444): Homolog of NCBI NO: 15233572 NR Description: hypothetical protein; protein id: At4g14770.1
  misc_feature (1)..(49): Homolog of NCBI NO: 15233572 NR Description: hypothetical protein; protein id: At4g14770.1
  misc_feature (148)..(398): Homolog of NCBI NO: 6739821 NR Description: putative DNA binding protein [Arabidopsis >gi|7767425|gb|AAF69124.1|AF204059_1 CXC domain protein TSO1
  misc_feature (1)..(15): Homolog of NCBI NO: 6739821 NR Description: putative DNA binding protein [Arabidopsis >gi|7767425|gb|AAF69124.1|AF204059_1 CXC domain protein TSO1
  misc_feature (256)..(433): Homolog of NCBI NO: 7767427 NR Description: CXC domain containing TSO1-like protein 1
  misc_feature (256)..(433): Homolog of NCBI NO: 18403510 NR Description: expressed protein; protein id: At3g22760.1, by cDNA: gi_20466373, supported by cDNA: gi_7767426 [Arabidopsis >gi|20466374|gb|AAM20504.1| unknown protein [Arabidopsis
  misc_feature (288)..(455): Homolog of NCBI NO: 34393829 NR Description: putative CXC domain protein TSO1 [Oryza sativa
  misc_feature (148)..(398): Homolog of NCBI NO: 15028139 NR Description: putative DNA binding protein [Arabidopsis
  misc_feature (1)..(398): Homolog of NCBI NO: 30686784 NR Description: DNA binding protein -related [Arabidopsis
MDADDEIGSGGGSRELSDELCRQSFDPLDFDADSDGVLHTDEMEAESGFGKEVIMFDVADIQNYEQQIPRTTDPRFYSLASEPQQFSIYCNNSNYVEEREGSCSVQVAAGAPDINLSCSSKVAAIDSTAEAEDKEDKDLQPSGKQRSVRRRCLTFDMGGSHKRIPLRDSTNDLPLDSTSINKAPSPQNCLDTSKQDTDEILPIPRTIGLHLNGFVNPSVSSGRKKKKIKDGQAFPSTTFHYNIEDEFSTPVSTKRDLVVFSDVKIMEPPERSVEGECFDQLMAMENRYCECFSAGLFCGEPCSCQNCFNKPIHEDLVMKSREVIKARNPLAFAPKVVSTSDTVIDLWVENSKTPASARHKRGCNCRKSGCSKKYCECFMMGVGCSSNCRCMGCKNTFGHTNEQCAGDSDVVTINDEAKHYGDHGDASRQNEEILTSERNRLLLPGSVAFRSLTSLSNLSEL

SEQ ID NO: 71691 - DNA, 3588 bp, Arabidopsis thaliana
  misc_feature (1)..(3588): Ceres Seq. ID no. 4805151
  misc_feature: MA Experiment ID: 20000180 Result: Up-regulated in Transcription
  misc_feature: MA Experiment 20000180 PARAMETER Experiment Name: At_Germinating_Seeds_P Parameter: Age (hr) Value: 24 vs. 0
  misc_feature: MA Experiment 20000180 PARAMETER Experiment Name: At_Germinating_Seeds_P Parameter: Tissue Value: Germinating Seeds
  misc_feature: MA Experiment ID: 20000227 Result: Up-regulated in Transcription
  misc_feature: MA Experiment 20000227 PARAMETER Experiment Name: At_Root-Tips-vs-Tops_P Parameter: Tissue Value: Root Tips vs. Root Tops
  misc_feature: MA Experiment ID: 20000234 Result: Up-regulated in Transcription
  misc_feature: MA Experiment 20000234 PARAMETER Experiment Name: At_Siliques_P Parameter: Age (day) Value: 21
  misc_feature: MA Experiment 20000234 PARAMETER Experiment Name: At_Siliques_P Parameter: Organism Value: A. thaliana
  misc_feature: MA Experiment 20000234 PARAMETER Experiment Name: At_Siliques_P Parameter: Plant Line Value: WS
  misc_feature: MA Experiment 20000234 PARAMETER Experiment Name: At_Siliques_P Parameter: Tissue Value: Less Than 5mm Siliques vs. Whole Plant
  misc_feature: MA Experiment ID: 20000286 Result: Up-regulated in Transcription
  misc_feature: MA Experiment 20000286 PARAMETER Experiment Name: At_Open_Flower_P Parameter: Age (day) Value: 21
  misc_feature: MA Experiment 20000286 PARAMETER Experiment Name: At_Open_Flower_P Parameter: Plant Line Value: WS
  misc_feature: MA Experiment 20000286 PARAMETER Experiment Name: At_Open_Flower_P Parameter: Tissue Value: Half Open vs. Whole Plant
  misc_feature: MA Experiment ID: 20000437 Result: Down-regulated in Transcription
  misc_feature: MA Experiment 20000437 PARAMETER Experiment Name: At_Drought_P Parameter: Age (day) Value: 8
  misc_feature: MA Experiment 20000437 PARAMETER Experiment Name: At_Drought_P Parameter: Organism Value: A. thaliana
  misc_feature: MA Experiment 20000437 PARAMETER Experiment Name: At_Drought_P Parameter: Plant Line Value: WS
  misc_feature: MA Experiment 20000437 PARAMETER Experiment Name: At_Drought_P Parameter: Timepoint (hr) Value: 24
  misc_feature: MA Experiment 20000437 PARAMETER Experiment Name: At_Drought_P Parameter: Tissue Value: Whole Plant
  misc_feature: MA Experiment 20000437 PARAMETER Experiment Name: At_Drought_P Parameter: Treatment Value: Drought vs. No Drought
atggaggattgttgtgatccacttctcgcaactgatgcttctccgcgacctgaaagcttctctcgctctgaaaaggatatagcatcgcgctcaaggactgtggcaatggcagatctggattcaaattgcgaattgagtaacgatgttgatatggaacaatcaagcccagatttgatgaaattggaacaatctagtgatcccgtagcgttagatggaaaagttgtattagggttttcattagcatctccagatctagtaaattgtggcgcttcacctgatttacctagaggtagctatgaagattcaccagaattttctaagaaaagaagattttctactgagctttctctagagaatggaattgatggttctactactactacaagacttggccgtaaaagccaagttgtgaaattctcagcaatctgtcagacatttggctatgagttgtctcctgagtcttcttttgagttaccttctccacctggagactttcgggagagtatgactcctgttataagtatcaactctggttctataagcacggatgtgactgtggaggatgtaactttcttgaaggatgagttttttagtggaggtgaaagtattacaactgatgctgttgttggcaatgaagatgagattttgttgtatcaaacagctcgtcttggtaatttcgcttacaagtttcagtcactggatcctggggactacttcatcgatttgcattttgctgaaatcgagttcactaagggtccaccgggagtcatatccggccttgatttgttttcgcaagtaggagcaaatacacctcttgtgatagaggatctaaggatgctcgtaggtagggaaggagagttatctatacgattagaaggagtgacaggagctgcaattctatgtggcatttctattaggaaagagacaacggctacctatgttgaagaaactggaatgctagcggtgaaaggttcaactgacactgttctgtcccagcaaactcaagaaaatcttgtctgcagggcagaagaagaggctgaagggatgagaagtgactgtgagcagcagaggaaagagatggaggatatgaagagaatggttgaggaacttaaactggagaaccaacaaaagactagagaatgcgaagaagcattgaattctctcagtgagattcaaaatgaactaatgcgcaagtcgatgcatgttggttctttggggacaagtcaaagagaagagcagatggttctcttcattaagagatttgacaagaaaattgaagtggagcaaattaagctgttggaggaggcaacaacatacaaacacctagtccaagatatcaacgagttcagttctcacatccagtctagagtgaagcaggacgcagaattgcatgaaaatctcaaagtcaaatttgtagcaggagaaaaagagaggaaagaactatataacaagatactagaactaaaaggtaacatcagggtcttttgcaggtgtcgaccactaaactttgaagaaactgaagcaggagtatcaatgggaattgatgttgagtcaaccaaaaatggagaggtcatagtgatgtcaaatggttttcccaaaaaaagcttcaagttcgattctgtttttggtcctaacgcttcccaagctgatgtttttgaagatactgctccctttgctacgtcagtcattgatggatacaacgtttgcatcttcgcctatggccagactggtactgggaaaacttttaccatggagggaactcaacatgaccgtggtgtaaactatagaacactggaaaatctgtttcgaataatcaaagcacgagaacaccgctacaattatgagatctcggtcagtgtattggaagtttacaatgagcagataagagatttgttggttccagcttcacagagtgcatctgcacccaaaagatttgagataaggcaactgagtgaaggaaaccaccacgtaccaggattggttgaagcacctgtgaaaagcatagaagaggtttgggatgtgttgaaaacaggaagtaatgcaagggctgttgggaaaacgacggctaatgagcacagtagccgatctcactgcattcactgcgtgatggtaaaaggtgagaatttgttgaatggtgaatgcacaaagagcaaactatggttagttgatttagcaggaagcgaacgggttgctaagacagaagtacaaggagaacggctgaaggagactcaaaacatcaacaaatcattatctgctcttggtgatgtcatattcgctcttgccaacaaaagctctcacattcctttcagaaactcaaaactcacgcacttgcttcaggattctctaggaggagattcaaaaaccctcatgtttgtacaaatcagtcctaacgagaatgatcaaagtgagacactatgctcactgaattttgctagcagagtgagagggatagagttgggacctgcaaagaagcagctagacaatactgaactcttgaaatacaagcaaatggttgagaaatggaagcaagatatgaaaggaaaagacgaacagattaggaaaatggaggaaacgatgtatggtttagaagcaaagattaaggaacgagacactaagaacaaaaccctccaagacaaggttaaagaacttgaatcacaactactggtggagaggaagcttgctcgtcaacatgtagacaccaagattgctgaacagcagacaaaacagcagactgaagatgaaaacaacacatcaaagaggccgccactgacaaatatactgttgggatcagcttcgaaagaaatggtgaatctaacacgtccatcactcttggagagcacgaccagctatgatctagctcctttacctagtggtgtccccaagtataatgatctctctgagaaggagaacaatccagaaatggctgatcaagtgcatctacctaataaaacaggaagattctctatctgtgcaaaacgtattccatcagctccagctccaagaaggagttctcttgccccaaccacatcaacttcgagagaaatggtatatctaacccgaccaccactctcagagagcacgaccagctatgatctacctcctttacccaatggtggcctcaagtacagtgacctcattgagaaggtgaacaatcaagaaatggctgagcaagtgcaaattcccaagagaataggagcaggaagatcctccatctgcgcaaaacgtattccaccagctccaagaaggaagagttttgcgccaatgccattcattccaatcacatcaacattaacttctcctgatgaaaagagtggcgctaaccaagtgctctgcaccagtcctaagctacatagaagtaatgggaagacgttgaccagcatactgagacgaagcatacaaaagagaatgcaaatgaaaccttccccgaggcagcaaccaatgagaagaggtggcggcattaatgtagggatggagagagttaggctgtctataggaaacagaggaaggttagctcatagagttctgctaaccaatgctcgtaaggcaggtctgaaggagacaccgcagaaacaagagcgatggatctga

SEQ ID NO: 71692 - protein, 1195 aa, Arabidopsis thaliana
  peptide (1)..(1195): Ceres Seq. ID no. 4805152
  misc_feature (320)..(912): Pfam Name: Myosin tail Pfam Description: Myosin tail
  misc_feature (256)..(918): Homolog of NCBI NO: 27476088 NR Description: Hypothetical protein [Oryza sativa (japonica
  misc_feature (456)..(883): Homolog of NCBI NO: 15240982 NR Description: kinesin-related protein; protein id: At5g27550.1
  misc_feature (261)..(942): Homolog of NCBI NO: 15227252 NR Description: kinesin-related protein; protein id: At2g22610.1
  misc_feature (334)..(941): Homolog of NCBI NO: 12324217 NR Description: kinesin-related protein; 103921-99132
  misc_feature (334)..(941): Homolog of NCBI NO: 22330608 NR Description: kinesin-related protein; protein id: At1g73860.1
  misc_feature (334)..(922): Homolog of NCBI NO: 25406299 NR Description: protein kinesin F2P9.27 [imported] - Arabidopsis
  misc_feature (426)..(855): Homolog of NCBI NO: 30692267 NR Description: kinesin-related protein [Arabidopsis thaliana]
  misc_feature (476)..(882): Homolog of NCBI NO: 28393382 NR Description: putative kinesin [Arabidopsis thaliana]
  misc_feature (426)..(855): Homolog of NCBI NO: 18201934 NR Description: kinesin-like protein heavy chain [Arabidopsis
  misc_feature (476)..(880): Homolog of NCBI NO: 18421069 NR Description: kinesin-related protein; protein id: At5g27000.1
MEDCCDPLLATDASPRPESFSRSEKDIASRSRTVAMADLDSNCELSNDVDMEQSSPDLMKLEQSSDPVALDGKVVLGFSLASPDLVNCGASPDLPRGSYEDSPEFSKKRRFSTELSLENGIDGSTTTTRLGRKSQVVKFSAICQTFGYELSPESSFELPSPPGDFRESMTPVISINSGSISTDVTVEDVTFLKDEFFSGGESITTDAVVGNEDEILLYQTARLGNFAYKFQSLDPGDYFIDLHFAEIEFTKGPPGVISGLDLFSQVGANTPLVIEDLRMLVGREGELSIRLEGVTGAAILCGISIRKETTATYVEETGMLAVKGSTDTVLSQQTQENLVCRAEEEAEGMRSDCEQQRKEMEDMKRMVEELKLENQQKTRECEEALNSLSEIQNELMRKSMHVGSLGTSQREEQMVLFIKRFDKKIEVEQIKLLEEATTYKHLVQDINEFSSHIQSRVKQDAELHENLKVKFVAGEKERKELYNKILELKGNIRVFCRCRPLNFEETEAGVSMGIDVESTKNGEVIVMSNGFPKKSFKFDSVFGPNASQADVFEDTAPFATSVIDGYNVCIFAYGQTGTGKTFTMEGTQHDRGVNYRTLENLFRIIKAREHRYNYEISVSVLEVYNEQIRDLLVPASQSASAPKRFEIRQLSEGNHHVPGLVEAPVKSIEEVWDVLKTGSNARAVGKTTANEHSSRSHCIHCVMVKGENLLNGECTKSKLWLVDLAGSERVAKTEVQGERLKETQNINKSLSALGDVIFALANKSSHIPFRNSKLTHLLQDSLGGDSKTLMFVQISPNENDQSETLCSLNFASRVRGIELGPAKKQLDNTELLKYKQMVEKWKQDMKGKDEQIRKMEETMYGLEAKIKERDTKNKTLQDKVKELESQLLVERKLARQHVDTKIAEQQTKQQTEDENNTSKRPPLTNILLGSASKEMVNLTRPSLLESTTSYDLAPLPSGVPKYNDLSEKENNPEMADQVHLPNKTGRFSICAKRIPSAPAPRRSSLAPTTSTSREMVYLTRPPLSESTTSYDLPPLPNGGLKYSDLIEKVNNQEMAEQVQIPKRIGAGRSSICAKRIPPAPRRKSFAPMPFIPITSTLTSPDEKSGANQVLCTSPKLHRSNGKTLTSILRRSIQKRMQMKPSPRQQPMRRGGGINVGMERVRLSIGNRGRLAHRVLLTNARKAGLKETPQKQERWI

SEQ ID NO: 71693 - protein, 1160 aa, Arabidopsis thaliana
  peptide (1)..(1160): Ceres Seq. ID no. 4805153
  misc_feature (285)..(877): Pfam Name: Myosin tail Pfam Description: Myosin tail
  misc_feature (221)..(883): Homolog of NCBI NO: 27476088 NR Description: Hypothetical protein [Oryza sativa (japonica
  misc_feature (421)..(848): Homolog of NCBI NO: 15240982 NR Description: kinesin-related protein; protein id: At5g27550.1
  misc_feature (226)..(907): Homolog of NCBI NO: 15227252 NR Description: kinesin-related protein; protein id: At2g22610.1
  misc_feature (299)..(906): Homolog of NCBI NO: 12324217 NR Description: kinesin-related protein; 103921-99132
  misc_feature (299)..(906): Homolog of NCBI NO: 22330608 NR Description: kinesin-related protein; protein id: At1g73860.1
  misc_feature (299)..(887): Homolog of NCBI NO: 25406299 NR Description: protein kinesin F2P9.27 [imported] - Arabidopsis
  misc_feature (391)..(820): Homolog of NCBI NO: 30692267 NR Description: kinesin-related protein [Arabidopsis thaliana]
  misc_feature (441)..(847): Homolog of NCBI NO: 28393382 NR Description: putative kinesin [Arabidopsis thaliana]
  misc_feature (391)..(820): Homolog of NCBI NO: 18201934 NR Description: kinesin-like protein heavy chain [Arabidopsis
  misc_feature (441)..(845): Homolog of NCBI NO: 18421069 NR Description: kinesin-related protein; protein id: At5g27000.1
MADLDSNCELSNDVDMEQSSPDLMKLEQSSDPVALDGKVVLGFSLASPDLVNCGASPDLPRGSYEDSPEFSKKRRFSTELSLENGIDGSTTTTRLGRKSQVVKFSAICQTFGYELSPESSFELPSPPGDFRESMTPVISINSGSISTDVTVEDVTFLKDEFFSGGESITTDAVVGNEDEILLYQTARLGNFAYKFQSLDPGDYFIDLHFAEIEFTKGPPGVISGLDLFSQVGANTPLVIEDLRMLVGREGELSIRLEGVTGAAILCGISIRKETTATYVEETGMLAVKGSTDTVLSQQTQENLVCRAEEEAEGMRSDCEQQRKEMEDMKRMVEELKLENQQKTRECEEALNSLSEIQNELMRKSMHVGSLGTSQREEQMVLFIKRFDKKIEVEQIKLLEEATTYKHLVQDINEFSSHIQSRVKQDAELHENLKVKFVAGEKERKELYNKILELKGNIRVFCRCRPLNFEETEAGVSMGIDVESTKNGEVIVMSNGFPKKSFKFDSVFGPNASQADVFEDTAPFATSVIDGYNVCIFAYGQTGTGKTFTMEGTQHDRGVNYRTLENLFRIIKAREHRYNYEISVSVLEVYNEQIRDLLVPASQSASAPKRFEIRQLSEGNHHVPGLVEAPVKSIEEVWDVLKTGSNARAVGKTTANEHSSRSHCIHCVMVKGENLLNGECTKSKLWLVDLAGSERVAKTEVQGERLKETQNINKSLSALGDVIFALANKSSHIPFRNSKLTHLLQDSLGGDSKTLMFVQISPNENDQSETLCSLNFASRVRGIELGPAKKQLDNTELLKYKQMVEKWKQDMKGKDEQIRKMEETMYGLEAKIKERDTKNKTLQDKVKELESQLLVERKLARQHVDTKIAEQQTKQQTEDENNTSKRPPLTNILLGSASKEMVNLTRPSLLESTTSYDLAPLPSGVPKYNDLSEKENNPEMADQVHLPNKTGRFSICAKRIPSAPAPRRSSLAPTTSTSREMVYLTRPPLSESTTSYDLPPLPNGGLKYSDLIEKVNNQEMAEQVQIPKRIGAGRSSICAKRIPPAPRRKSFAPMPFIPITSTLTSPDEKSGANQVLCTSPKLHRSNGKTLTSILRRSIQKRMQMKPSPRQQPMRRGGGINVGMERVRLSIGNRGRLAHRVLLTNARKAGLKETPQKQERWI

SEQ ID NO: 71694 - protein, 1145 aa, Arabidopsis thaliana
  peptide (1)..(1145): Ceres Seq. ID no. 4805154
  misc_feature (270)..(862): Pfam Name: Myosin tail Pfam Description: Myosin tail
  misc_feature (206)..(868): Homolog of NCBI NO: 27476088 NR Description: Hypothetical protein [Oryza sativa (japonica
  misc_feature (406)..(833): Homolog of NCBI NO: 15240982 NR Description: kinesin-related protein; protein id: At5g27550.1
  misc_feature (211)..(892): Homolog of NCBI NO: 15227252 NR Description: kinesin-related protein; protein id: At2g22610.1
  misc_feature (284)..(891): Homolog of NCBI NO: 12324217 NR Description: kinesin-related protein; 103921-99132
  misc_feature (284)..(891): Homolog of NCBI NO: 22330608 NR Description: kinesin-related protein; protein id: At1g73860.1
  misc_feature (284)..(872): Homolog of NCBI NO: 25406299 NR Description: protein kinesin F2P9.27 [imported] - Arabidopsis
  misc_feature (376)..(805): Homolog of NCBI NO: 30692267 NR Description: kinesin-related protein [Arabidopsis thaliana]
  misc_feature (426)..(832): Homolog of NCBI NO: 28393382 NR Description: putative kinesin [Arabidopsis thaliana]
  misc_feature (376)..(805): Homolog of NCBI NO: 18201934 NR Description: kinesin-like protein heavy chain [Arabidopsis
  misc_feature (426)..(830): Homolog of NCBI NO: 18421069 NR Description: kinesin-related protein; protein id: At5g27000.1
MEQSSPDLMKLEQSSDPVALDGKVVLGFSLASPDLVNCGASPDLPRGSYEDSPEFSKKRRFSTELSLENGIDGSTTTTRLGRKSQVVKFSAICQTFGYELSPESSFELPSPPGDFRESMTPVISINSGSISTDVTVEDVTFLKDEFFSGGESITTDAVVGNEDEILLYQTARLGNFAYKFQSLDPGDYFIDLHFAEIEFTKGPPGVISGLDLFSQVGANTPLVIEDLRMLVGREGELSIRLEGVTGAAILCGISIRKETTATYVEETGMLAVKGSTDTVLSQQTQENLVCRAEEEAEGMRSDCEQQRKEMEDMKRMVEELKLENQQKTRECEEALNSLSEIQNELMRKSMHVGSLGTSQREEQMVLFIKRFDKKIEVEQIKLLEEATTYKHLVQDINEFSSHIQSRVKQDAELHENLKVKFVAGEKERKELYNKILELKGNIRVFCRCRPLNFEETEAGVSMGIDVESTKNGEVIVMSNGFPKKSFKFDSVFGPNASQADVFEDTAPFATSVIDGYNVCIFAYGQTGTGKTFTMEGTQHDRGVNYRTLENLFRIIKAREHRYNYEISVSVLEVYNEQIRDLLVPASQSASAPKRFEIRQLSEGNHHVPGLVEAPVKSIEEVWDVLKTGSNARAVGKTTANEHSSRSHCIHCVMVKGENLLNGECTKSKLWLVDLAGSERVAKTEVQGERLKETQNINKSLSALGDVIFALANKSSHIPFRNSKLTHLLQDSLGGDSKTLMFVQISPNENDQSETLCSLNFASRVRGIELGPAKKQLDNTELLKYKQMVEKWKQDMKGKDEQIRKMEETMYGLEAKIKERDTKNKTLQDKVKELESQLLVERKLARQHVDTKIAEQQTKQQTEDENNTSKRPPLTNILLGSASKEMVNLTRPSLLESTTSYDLAPLPSGVPKYNDLSEKENNPEMADQVHLPNKTGRFSICAKRIPSAPAPRRSSLAPTTSTSREMVYLTRPPLSESTTSYDLPPLPNGGLKYSDLIEKVNNQEMAEQVQIPKRIGAGRSSICAKRIPPAPRRKSFAPMPFIPITSTLTSPDEKSGANQVLCTSPKLHRSNGKTLTSILRRSIQKRMQMKPSPRQQPMRRGGGINVGMERVRLSIGNRGRLAHRVLLTNARKAGLKETPQKQERWI

SEQ ID NO: 71695 - DNA, 1029 bp, Arabidopsis thaliana
  misc_feature (1)..(1029): Ceres Seq. ID no. 4805407
  misc_feature: MA Experiment ID: 20000315 Result: Up-regulated in Transcription
  misc_feature: MA Experiment 20000315 PARAMETER Experiment Name: At_14day_Shoots-Roots_Sub_P Parameter: Age (day) Value: 14
  misc_feature: MA Experiment 20000315 PARAMETER Experiment Name: At_14day_Shoots-Roots_Sub_P Parameter: Organism Value: A. thaliana
  misc_feature: MA Experiment 20000315 PARAMETER Experiment Name: At_14day_Shoots-Roots_Sub_P Parameter: Plant Line Value: WS
  misc_feature: MA Experiment 20000315 PARAMETER Experiment Name: At_14day_Shoots-Roots_Sub_P Parameter: Tissue Value: Shoots vs. Whole Plant
  misc_feature: MA Experiment ID: 20000328 Result: Down-regulated in Transcription
  misc_feature: MA Experiment 20000328 PARAMETER Experiment Name: At_42deg_Heat_Sub_P Parameter: Age (day) Value: 14
  misc_feature: MA Experiment 20000328 PARAMETER Experiment Name: At_42deg_Heat_Sub_P Parameter: Organism Value: A. thaliana
  misc_feature: MA Experiment 20000328 PARAMETER Experiment Name: At_42deg_Heat_Sub_P Parameter: Plant Line Value: WS
  misc_feature: MA Experiment 20000328 PARAMETER Experiment Name: At_42deg_Heat_Sub_P Parameter: Temperature (deg C) Value: 42 vs. 22
  misc_feature: MA Experiment 20000328 PARAMETER Experiment Name: At_42deg_Heat_Sub_P Parameter: Timepoint (hr) Value: 6
  misc_feature: MA Experiment 20000328 PARAMETER Experiment Name: At_42deg_Heat_Sub_P Parameter: Tissue Value: Aerial
atgaagcttcaaattctattgcttgctttggttttaatcgctgttgaagcgaatgcagtcaagcaagggataaacgcaacgatcccagcgctaatagtttttggagattcaataatggatacaggaaataacaataatcttccgactcttcttaaatgtaactttcctccatatggtaaagattatcctggaggcgacgccactggaagattttctgatggaagagttccttctgatcttattgcggaaaagttgggattggctaagacattaccagcatatatgaattcatatttgaagcctgaggatcttcttaaaggtgtaacatttgcatctcgaggaactggttatgatccattgacagcaaaaattatgtcagtgatatcggtatgggatcaactcatatatttcaaagaatatatatcaaagatcaagaggcatttcggagaagaaaaagccaaagatatcttggaacatagtttctttcttgtggtgtctagtagcaatgaccttgctcacacttatttagctcaagctcatagatatgaccgtacctcttatgccaatttcttggctgactctgctgtccatttcgtgagagaattacataagcttggagctcgaaaaattggagtgtttagtgcagtccccgttggttgtgttccattacaaagaacagtttttggaggtttttttacaagaggatgtaatgaacctctaaacaacatggcaaaacaattcaacgcaagactttctccagcattagattctttagataaagagttggatggtgttatcctttacattaatgtttatgatactctttttgacatgatccaacaccctaaaaaatacggatgttgcggtaaaggactgctcacaatatcctatttatgtaactcattgaacccatttacgtgttctaattcttcatcatacatattttgggatagctatcatccatctgaaagagcttatcaagttatcgtcgacaatttactcgataaatatttgagcaaagtctattga

SEQ ID NO: 71696 - protein, 342 aa, Arabidopsis thaliana
  peptide (1)..(342): Ceres Seq. ID no. 4805408
  misc_feature (31)..(333): Pfam Name: GDSL-like Lipase/Acylhydrolase Pfam Description: GDSL-like Lipase/Acylhydrolase
  misc_feature (1)..(342): Homolog of NCBI NO: 15217977 NR Description: proline-rich protein, putative; protein id:
  misc_feature (1)..(342): Homolog of NCBI NO: 18406327 NR Description: proline-rich protein, putative; protein id:
  misc_feature (1)..(229): Homolog of NCBI NO: 15229719 NR Description: putative protein; protein id: At3g43570.1 thaliana] >gi|9967506|emb|CAC05631.1| putative protein
  misc_feature (259)..(342): Homolog of NCBI NO: 15229719 NR Description: putative protein; protein id: At3g43570.1 thaliana] >gi|9967506|emb|CAC05631.1| putative protein
  misc_feature (39)..(229): Homolog of NCBI NO: 22330312 NR Description: similar to proline-rich protein, putative;
  misc_feature (259)..(342): Homolog of NCBI NO: 22330312 NR Description: similar to proline-rich protein, putative;
  misc_feature (1)..(202): Homolog of NCBI NO: 15229307 NR Description: putative protein; protein id: At3g43550.1
  misc_feature (39)..(337): Homolog of NCBI NO: 15231934 NR Description: hypothetical protein; protein id: At3g14820.1
  misc_feature (4)..(340): Homolog of NCBI NO: 15222901 NR Description: family II extracellular lipase 3 (EXL3); protein At1g75900.1, supported by cDNA: gi_15054385 [Arabidopsis >gi|15054386|gb|AAK30018.1| family II lipase EXL3 [Arabidopsis
  misc_feature (4)..(340): Homolog of NCBI NO: 26449364 NR Description: putative family II lipase EXL3 [Arabidopsis
MKLQILLLALVLIAVEANAVKQGINATIPALIVFGDSIMDTGNNNNLPTLLKCNFPPYGKDYPGGDATGRFSDGRVPSDLIAEKLGLAKTLPAYMNSYLKPEDLLKGVTFASRGTGYDPLTAKIMSVISVWDQLIYFKEYISKIKRHFGEEKAKDILEHSFFLVVSSSNDLAHTYLAQAHRYDRTSYANFLADSAVHFVRELHKLGARKIGVFSAVPVGCVPLQRTVFGGFFTRGCNEPLNNMAKQFNARLSPALDSLDKELDGVILYINVYDTLFDMIQHPKKYGCCGKGLLTISYLCNSLNPFTCSNSSSYIFWDSYHPSERAYQVIVDNLLDKYLSKVY

SEQ ID NO: 71697 - protein, 304 aa, Arabidopsis thaliana
  peptide (1)..(304): Ceres Seq. ID no. 4805409
  misc_feature (1)..(295): Pfam Name: GDSL-like Lipase/Acylhydrolase Pfam Description: GDSL-like Lipase/Acylhydrolase
  misc_feature (1)..(304): Homolog of NCBI NO: 15217977 NR Description: proline-rich protein, putative; protein id:
  misc_feature (1)..(304): Homolog of NCBI NO: 18406327 NR Description: proline-rich protein, putative; protein id:
  misc_feature (1)..(191): Homolog of NCBI NO: 15229719 NR Description: putative protein; protein id: At3g43570.1 thaliana] >gi|9967506|emb|CAC05631.1| putative protein
  misc_feature (221)..(304): Homolog of NCBI NO: 15229719 NR Description: putative protein; protein id: At3g43570.1 thaliana] >gi|9967506|emb|CAC05631.1| putative protein
  misc_feature (1)..(191): Homolog of NCBI NO: 22330312 NR Description: similar to proline-rich protein, putative;
  misc_feature (221)..(304): Homolog of NCBI NO: 22330312 NR Description: similar to proline-rich protein, putative;
  misc_feature (1)..(164): Homolog of NCBI NO: 15229307 NR Description: putative protein; protein id: At3g43550.1
  misc_feature (1)..(299): Homolog of NCBI NO: 15231934 NR Description: hypothetical protein; protein id: At3g14820.1
  misc_feature (1)..(302): Homolog of NCBI NO: 15222901 NR Description: family II extracellular lipase 3 (EXL3); protein At1g75900.1, supported by cDNA: gi_15054385 [Arabidopsis >gi|15054386|gb|AAK30018.1| family II lipase EXL3 [Arabidopsis
  misc_feature (1)..(302): Homolog of NCBI NO: 26449364 NR Description: putative family II lipase EXL3 [Arabidopsis
MDTGNNNNLPTLLKCNFPPYGKDYPGGDATGRFSDGRVPSDLIAEKLGLAKTLPAYMNSYLKPEDLLKGVTFASRGTGYDPLTAKIMSVISVWDQLIYFKEYISKIKRHFGEEKAKDILEHSFFLVVSSSNDLAHTYLAQAHRYDRTSYANFLADSAVHFVRELHKLGARKIGVFSAVPVGCVPLQRTVFGGFFTRGCNEPLNNMAKQFNARLSPALDSLDKELDGVILYINVYDTLFDMIQHPKKYGCCGKGLLTISYLCNSLNPFTCSNSSSYIFWDSYHPSERAYQVIVDNLLDKYLSKVY

SEQ ID NO: 71698 - protein, 248 aa, Arabidopsis thaliana
  peptide (1)..(248): Ceres Seq. ID no. 4805410
  misc_feature (1)..(239): Pfam Name: GDSL-like Lipase/Acylhydrolase Pfam Description: GDSL-like Lipase/Acylhydrolase
  misc_feature (1)..(248): Homolog of NCBI NO: 15217977 NR Description: proline-rich protein, putative; protein id:
  misc_feature (1)..(248): Homolog of NCBI NO: 18406327 NR Description: proline-rich protein, putative; protein id:
  misc_feature (1)..(135): Homolog of NCBI NO: 15229719 NR Description: putative protein; protein id: At3g43570.1 thaliana] >gi|9967506|emb|CAC05631.1| putative protein
  misc_feature (165)..(248): Homolog of NCBI NO: 15229719 NR Description: putative protein; protein id: At3g43570.1 thaliana] >gi|9967506|emb|CAC05631.1| putative protein
  misc_feature (1)..(135): Homolog of NCBI NO: 22330312 NR Description: similar to proline-rich protein, putative;
  misc_feature (165)..(248): Homolog of NCBI NO: 22330312 NR Description: similar to proline-rich protein, putative;
  misc_feature (1)..(108): Homolog of NCBI NO: 15229307 NR Description: putative protein; protein id: At3g43550.1
  misc_feature (1)..(243): Homolog of NCBI NO: 15231934 NR Description: hypothetical protein; protein id: At3g14820.1
  misc_feature (1)..(246): Homolog of NCBI NO: 15222901 NR Description: family II extracellular lipase 3 (EXL3); protein At1g75900.1, supported by cDNA: gi_15054385 [Arabidopsis >gi|15054386|gb|AAK30018.1| family II lipase EXL3 [Arabidopsis
  misc_feature (1)..(246): Homolog of NCBI NO: 26449364 NR Description: putative family II lipase EXL3 [Arabidopsis
MNSYLKPEDLLKGVTFASRGTGYDPLTAKIMSVISVWDQLIYFKEYISKIKRHFGEEKAKDILEHSFFLVVSSSNDLAHTYLAQAHRYDRTSYANFLADSAVHFVRELHKLGARKIGVFSAVPVGCVPLQRTVFGGFFTRGCNEPLNNMAKQFNARLSPALDSLDKELDGVILYINVYDTLFDMIQHPKKYGCCGKGLLTISYLCNSLNPFTCSNSSSYIFWDSYHPSERAYQVIVDNLLDKYLSKVY

SEQ ID NO: 71699 - DNA, 1080 bp, Arabidopsis thaliana
  misc_feature (1)..(1080): Ceres Seq. ID no. 4806152
  misc_feature: MA Experiment ID: 20000227 Result: Up-regulated in Transcription
  misc_feature: MA Experiment 20000227 PARAMETER Experiment Name: At_Root-Tips-vs-Tops_P Parameter: Tissue Value: Root Tips vs. Root Tops
atgaattcctccgacgtcaacttctccctactccagagccaaccaaatgttccggctgaattcttctggccggagaaagacgttgccccttcagaaggcgacctcgatctcccaatcatcgacttgagtgggttcttgaatggcaatgaggccgagacgcaacttgcagctaaggcagtgaaaaaagcgtgcatggctcacggtacttttctagtggtcaatcatggcttcaagtcgggcttggctgaaaaggcgcttgagatatcgagtttgttctttgggctatccaaggatgagaagctaagggcttataggatcccggggaatatctctggctataccgcaggtcatagccaaagattttcctccaatcttccgtggaatgagactttgactttggccttcaaaaaggggccaccccatgttgttgaagactttctaacctcaaggctaggcaaccatcgtcaagagatcggtcaagtgtttcaagaattttgtgatgcaatgaatggactggttatggatttgatggagctattgggtataagtatgggtttaaaagacaggacatactaccggagattcttcgaagatggaagtggcatcttcagatgcaactattatccgccgtgcaagcagccagagaaagcccttggtgttggcccccataatgacccaacggctataaccgttttgcttcaagacgatgttgtgggcttagaggtctttgccgcaggtagttggcagaccgttcgccctcgtcctggtgctcttgtcgtcaacgttggagacaccttcatggcattgtcaaatggaaactacaggagttgttaccacagggcagtggtaaacaaggagaaagtgagaaggtcattagtattcttctcttgtcctagagaagataaaatcatcgtacctcctcctgaacttgtggaaggtgaagaagcttctagaaagtaccctgactttacttgggctcagcttcagaaatttacccagtccggctatcgagtcgataacaccactctccataacttctcttcgtggctcgtctctaactccgacaagaaatcaacttga

SEQ ID NO: 71700 - protein, 359 aa, Arabidopsis thaliana
  peptide (1)..(359): Ceres Seq. ID no. 4806153
  misc_feature (199)..(298): Pfam Name: 2OG-Fe(II) oxygenase superfamily Pfam Description: 2OG-Fe(II) oxygenase superfamily
  misc_feature (1)..(359): Homolog of NCBI NO: 15219344 NR Description: gibberelin 20-oxidase, putative, 5' partial;
  misc_feature (1)..(359): Homolog of NCBI NO: 25285684 NR Description: probable gibberelin 20-oxidase [imported] -
  misc_feature (65)..(359): Homolog of NCBI NO: 8778664 NR Description: F9C16.33 [Arabidopsis thaliana]
  misc_feature (11)..(350): Homolog of NCBI NO: 19422259 NR Description: gibberellin-20 oxidase [Oryza sativa]
  misc_feature (9)..(350): Homolog of NCBI NO: 4164141 NR Description: gibberelin 20-oxidase [Lactuca sativa]
  misc_feature (9)..(355): Homolog of NCBI NO: 7433210 NR Description: gibberellin 20-oxidase (EC 1.14.11.-) - kidney
  misc_feature (7)..(350): Homolog of NCBI NO: 1581592 NR Description: gibberellin 20-oxidase
  misc_feature (9)..(357): Homolog of NCBI NO: 12231168 NR Description: gibberellin 20-oxidase [Malus x domestica]
  misc_feature (9)..(350): Homolog of NCBI NO: 7433216 NR Description: gibberellin 20-dioxygenase (EC 1.14.11.-) (clone
  misc_feature (9)..(354): Homolog of NCBI NO: 7328337 NR Description: gibberellin 20-oxidase [Solanum dulcamara]
MNSSDVNFSLLQSQPNVPAEFFWPEKDVAPSEGDLDLPIIDLSGFLNGNEAETQLAAKAVKKACMAHGTFLVVNHGFKSGLAEKALEISSLFFGLSKDEKLRAYRIPGNISGYTAGHSQRFSSNLPWNETLTLAFKKGPPHVVEDFLTSRLGNHRQEIGQVFQEFCDAMNGLVMDLMELLGISMGLKDRTYYRRFFEDGSGIFRCNYYPPCKQPEKALGVGPHNDPTAITVLLQDDVVGLEVFAAGSWQTVRPRPGALVVNVGDTFMALSNGNYRSCYHRAVVNKEKVRRSLVFFSCPREDKIIVPPPELVEGEEASRKYPDFTWAQLQKFTQSGYRVDNTTLHNFSSWLVSNSDKKST

SEQ ID NO: 71701 - protein, 295 aa, Arabidopsis thaliana
  peptide (1)..(295): Ceres Seq. ID no. 4806154
  misc_feature (135)..(234): Pfam Name: 2OG-Fe(II) oxygenase superfamily Pfam Description: 2OG-Fe(II) oxygenase superfamily
  misc_feature (1)..(295): Homolog of NCBI NO: 15219344 NR Description: gibberelin 20-oxidase, putative, 5' partial;
  misc_feature (1)..(295): Homolog of NCBI NO: 25285684 NR Description: probable gibberelin 20-oxidase [imported] -
  misc_feature (1)..(295): Homolog of NCBI NO: 8778664 NR Description: F9C16.33 [Arabidopsis thaliana]
  misc_feature (1)..(286): Homolog of NCBI NO: 19422259 NR Description: gibberellin-20 oxidase [Oryza sativa]
  misc_feature (1)..(286): Homolog of NCBI NO: 4164141 NR Description: gibberelin 20-oxidase [Lactuca sativa]
  misc_feature (1)..(291): Homolog of NCBI NO: 7433210 NR Description: gibberellin 20-oxidase (EC 1.14.11.-) - kidney
  misc_feature (1)..(286): Homolog of NCBI NO: 1581592 NR Description: gibberellin 20-oxidase
  misc_feature (1)..(293): Homolog of NCBI NO: 12231168 NR Description: gibberellin 20-oxidase [Malus x domestica]
  misc_feature (1)..(286): Homolog of NCBI NO: 7433216 NR Description: gibberellin 20-dioxygenase (EC 1.14.11.-) (clone
  misc_feature (1)..(290): Homolog of NCBI NO: 7328337 NR Description: gibberellin 20-oxidase [Solanum dulcamara]
MAHGTFLVVNHGFKSGLAEKALEISSLFFGLSKDEKLRAYRIPGNISGYTAGHSQRFSSNLPWNETLTLAFKKGPPHVVEDFLTSRLGNHRQEIGQVFQEFCDAMNGLVMDLMELLGISMGLKDRTYYRRFFEDGSGIFRCNYYPPCKQPEKALGVGPHNDPTAITVLLQDDVVGLEVFAAGSWQTVRPRPGALVVNVGDTFMALSNGNYRSCYHRAVVNKEKVRRSLVFFSCPREDKIIVPPPELVEGEEASRKYPDFTWAQLQKFTQSGYRVDNTTLHNFSSWLVSNSDKKST

SEQ ID NO: 71702 - protein, 191 aa, Arabidopsis thaliana
  peptide (1)..(191): Ceres Seq. ID no. 4806155
  misc_feature (31)..(130): Pfam Name: 2OG-Fe(II) oxygenase superfamily Pfam Description: 2OG-Fe(II) oxygenase superfamily
  misc_feature (1)..(191): Homolog of NCBI NO: 15219344 NR Description: gibberelin 20-oxidase, putative, 5' partial;
  misc_feature (1)..(191): Homolog of NCBI NO: 25285684 NR Description: probable gibberelin 20-oxidase [imported] -
  misc_feature (1)..(191): Homolog of NCBI NO: 8778664 NR Description: F9C16.33 [Arabidopsis thaliana]
  misc_feature (1)..(182): Homolog of NCBI NO: 19422259 NR Description: gibberellin-20 oxidase [Oryza sativa]
  misc_feature (1)..(182): Homolog of NCBI NO: 4164141 NR Description: gibberelin 20-oxidase [Lactuca sativa]
  misc_feature (1)..(187): Homolog of NCBI NO: 7433210 NR Description: gibberellin 20-oxidase (EC 1.14.11.-) - kidney
  misc_feature (1)..(182): Homolog of NCBI NO: 1581592 NR Description: gibberellin 20-oxidase
  misc_feature (1)..(189): Homolog of NCBI NO: 12231168 NR Description: gibberellin 20-oxidase [Malus x domestica]
  misc_feature (1)..(182): Homolog of NCBI NO: 7433216 NR Description: gibberellin 20-dioxygenase (EC 1.14.11.-) (clone
  misc_feature (1)..(186): Homolog of NCBI NO: 7328337 NR Description: gibberellin 20-oxidase [Solanum dulcamara]
MNGLVMDLMELLGISMGLKDRTYYRRFFEDGSGIFRCNYYPPCKQPEKALGVGPHNDPTAITVLLQDDVVGLEVFAAGSWQTVRPRPGALVVNVGDTFMALSNGNYRSCYHRAVVNKEKVRRSLVFFSCPREDKIIVPPPELVEGEEASRKYPDFTWAQLQKFTQSGYRVDNTTLHNFSSWLVSNSDKKST

SEQ ID NO: 71703 - DNA, 690 bp, Arabidopsis thaliana
  misc_feature (1)..(690): Ceres Seq. ID no. 4806277
  misc_feature: MA Experiment ID: 20000307 Result: Up-regulated in Transcription
  misc_feature: MA Experiment 20000307 PARAMETER Experiment Name: At_Germinating_Seeds_Sub_P Parameter: Age (hr) Value: 24 vs. 0
  misc_feature: MA Experiment 20000307 PARAMETER Experiment Name: At_Germinating_Seeds_Sub_P Parameter: Organism Value: A. thaliana
  misc_feature: MA Experiment 20000307 PARAMETER Experiment Name: At_Germinating_Seeds_Sub_P Parameter: Plant Line Value: WS
  misc_feature: MA Experiment 20000307 PARAMETER Experiment Name: At_Germinating_Seeds_Sub_P Parameter: Tissue Value: Germinating Seeds
  misc_feature: MA Experiment ID: 20000355 Result: Up-regulated in Transcription
  misc_feature: MA Experiment 20000355 PARAMETER Experiment Name: At_Siliques_Sub_P Parameter: Age (day) Value: 21
  misc_feature: MA Experiment 20000355 PARAMETER Experiment Name: At_Siliques_Sub_P Parameter: Organism Value: A. thaliana
  misc_feature: MA Experiment 20000355 PARAMETER Experiment Name: At_Siliques_Sub_P Parameter: Plant Line Value: WS
  misc_feature: MA Experiment 20000355 PARAMETER Experiment Name: At_Siliques_Sub_P Parameter: Tissue Value: Less Than 5mm Siliques vs. Whole Plant
  misc_feature: MA Experiment ID: 20000440 Result: Up-regulated in Transcription
  misc_feature: MA Experiment 20000440 PARAMETER Experiment Name: At_Closed-Flower__Sub_P Parameter: Tissue Value: Closed Flower vs. Whole Plant
atggaggaagaatacataagaataataagcataacaacaataagaataatctcatggggtctcattttcatccttgtaagacgaatcttctcaagctactcgttcgacttcagcacccgtatagtctcaacgcttcacgcaacaatcgctgtcactttagcaactctctcgattcaagattggtcttgtcctgtttgtcccattgcttctacatcgtctctccggcagatggaaacgttggcgttttcattgtcgtacatgatctacgatctcatttgtagccactttgatcaagtccttagcattgataatgcggttcatcattctgtttgcattcttggttttgtagctggacttttctaccaaaagtgtggatccgagatggtggcagcaatatggataacagagatctcaagtccgtttcttcacctcagggagattcttaaagagattggttgtagagacaccgacctaaatcttgcagccgatgtgttttttgcaacaattttctcggtggcccgaatggtgggtggaccttacctagtttacgtaacaataccagctgataatcccatcctcatcaaggtaatggggttgggattacaacttgtgagcgcgttctataaattactcaaaatgatgagatacaaatttattaaacgatcaatgtccaccaaaaaatcgacgtag

SEQ ID NO: 71704 - protein, 229 aa, Arabidopsis thaliana
  peptide (1)..(229): Ceres Seq. ID no. 4806278
  misc_feature (1)..(228): Homolog of NCBI NO: 30693154 NR Description: expressed protein [Arabidopsis thaliana]
  misc_feature (1)..(199): Homolog of NCBI NO: 15219511 NR Description: hypothetical protein; protein id: At1g35170.1
  misc_feature (1)..(229): Homolog of NCBI NO: 22330031 NR Description: hypothetical protein; protein id: At1g45010.1, by cDNA: gi_17380925 [Arabidopsis thaliana] unknown protein [Arabidopsis thaliana]
  misc_feature (1)..(164): Homolog of NCBI NO: 25518603 NR Description: hypothetical protein T32G9.28 - Arabidopsis >gi|12320960|gb|AAG50605.1|AC079605_10 hypothetical protein
  misc_feature (19)..(226): Homolog of NCBI NO: 34903030 NR Description: unnamed protein product [Oryza sativa (japonica group)] >gi|7228458|dbj|BAA92418.1| unnamed protein product
  misc_feature (1)..(76): Homolog of NCBI NO: 25405881 NR Description: protein F27F5.9 [imported] - Arabidopsis thaliana
  misc_feature (121)..(164): Homolog of NCBI NO: 25405881 NR Description: protein F27F5.9 [imported] - Arabidopsis thaliana
  misc_feature (34)..(223): Homolog of NCBI NO: 27661880 NR Description: hypothetical protein XP_236191 [Rattus norvegicus]
  misc_feature (16)..(220): Homolog of NCBI NO: 34535216 NR Description: unnamed protein product [Homo sapiens]
MEEEYIRIISITTIRIISWGLIFILVRRIFSSYSFDFSTRIVSTLHATIAVTLATLSIQDWSCPVCPIASTSSLRQMETLAFSLSYMIYDLICSHFDQVLSIDNAVHHSVCILGFVAGLFYQKCGSEMVAAIWITEISSPFLHLREILKEIGCRDTDLNLAADVFFATIFSVARMVGGPYLVYVTIPADNPILIKVMGLGLQLVSAFYKLLKMMRYKFIKRSMSTKKST

SEQ ID NO: 71705 - protein, 153 aa, Arabidopsis thaliana
  peptide (1)..(153): Ceres Seq. ID no. 4806279
  misc_feature (1)..(152): Homolog of NCBI NO: 30693154 NR Description: expressed protein [Arabidopsis thaliana]
  misc_feature (1)..(123): Homolog of NCBI NO: 15219511 NR Description: hypothetical protein; protein id: At1g35170.1
  misc_feature (1)..(153): Homolog of NCBI NO: 22330031 NR Description: hypothetical protein; protein id: At1g45010.1, by cDNA: gi_17380925 [Arabidopsis thaliana] unknown protein [Arabidopsis thaliana]
  misc_feature (1)..(88): Homolog of NCBI NO: 25518603 NR Description: hypothetical protein T32G9.28 - Arabidopsis >gi|12320960|gb|AAG50605.1|AC079605_10 hypothetical protein
  misc_feature (1)..(150): Homolog of NCBI NO: 34903030 NR Description: unnamed protein product [Oryza sativa (japonica group)] >gi|7228458|dbj|BAA92418.1| unnamed protein product
  misc_feature (45)..(88): Homolog of NCBI NO: 25405881 NR Description: protein F27F5.9 [imported] - Arabidopsis thaliana
  misc_feature (1)..(147): Homolog of NCBI NO: 27661880 NR Description: hypothetical protein XP_236191 [Rattus norvegicus]
  misc_feature (1)..(144): Homolog of NCBI NO: 34535216 NR Description: unnamed protein product [Homo sapiens]
METLAFSLSYMIYDLICSHFDQVLSIDNAVHHSVCILGFVAGLFYQKCGSEMVAAIWITEISSPFLHLREILKEIGCRDTDLNLAADVFFATIFSVARMVGGPYLVYVTIPADNPILIKVMGLGLQLVSAFYKLLKMMRYKFIKRSMSTKKST

SEQ ID NO: 71706 - protein, 143 aa, Arabidopsis thaliana
  peptide (1)..(143): Ceres Seq. ID no. 4806280
  misc_feature (1)..(142): Homolog of NCBI NO: 30693154 NR Description: expressed protein [Arabidopsis thaliana]
  misc_feature (1)..(113): Homolog of NCBI NO: 15219511 NR Description: hypothetical protein; protein id: At1g35170.1
  misc_feature (1)..(143): Homolog of NCBI NO: 22330031 NR Description: hypothetical protein; protein id: At1g45010.1, by cDNA: gi_17380925 [Arabidopsis thaliana] unknown protein [Arabidopsis thaliana]
  misc_feature (1)..(78): Homolog of NCBI NO: 25518603 NR Description: hypothetical protein T32G9.28 - Arabidopsis >gi|12320960|gb|AAG50605.1|AC079605_10 hypothetical protein
  misc_feature (1)..(140): Homolog of NCBI NO: 34903030 NR Description: unnamed protein product [Oryza sativa (japonica group)] >gi|7228458|dbj|BAA92418.1| unnamed protein product
  misc_feature (35)..(78): Homolog of NCBI NO: 25405881 NR Description: protein F27F5.9 [imported] - Arabidopsis thaliana
  misc_feature (1)..(137): Homolog of NCBI NO: 27661880 NR Description: hypothetical protein XP_236191 [Rattus norvegicus]
  misc_feature (1)..(134): Homolog of NCBI NO: 34535216 NR Description: unnamed protein product [Homo sapiens]
MIYDLICSHFDQVLSIDNAVHHSVCILGFVAGLFYQKCGSEMVAAIWITEISSPFLHLREILKEIGCRDTDLNLAADVFFATIFSVARMVGGPYLVYVTIPADNPILIKVMGLGLQLVSAFYKLLKMMRYKFIKRSMSTKKST

SEQ ID NO: 71707 - DNA, 1098 bp, Arabidopsis thaliana
  misc_feature (1)..(1098): Ceres Seq. ID no. 4807438
  misc_feature: MA Experiment ID: 20000179 Result: Down-regulated in Transcription
  misc_feature: MA Experiment 20000179 PARAMETER Experiment Name: At_Germinating_Seeds_P Parameter: Age (hr) Value: 6 vs. 0
  misc_feature: MA Experiment 20000179 PARAMETER Experiment Name: At_Germinating_Seeds_P Parameter: Tissue Value: Germinating Seeds
  misc_feature: MA Experiment ID: 20000709 Result: Up-regulated in Transcription
  misc_feature: MA Experiment 20000709 PARAMETER Experiment Name: At_15mM_NH4NO3_L-to-H_P Parameter: Age (hr) Value: 14
  misc_feature: MA Experiment 20000709 PARAMETER Experiment Name: At_15mM_NH4NO3_L-to-H_P Parameter: Organism Value: A. thaliana
  misc_feature: MA Experiment 20000709 PARAMETER Experiment Name: At_15mM_NH4NO3_L-to-H_P Parameter: Plant Line Value: WS
  misc_feature: MA Experiment 20000709 PARAMETER Experiment Name: At_15mM_NH4NO3_L-to-H_P Parameter: Timepoint (hr) Value: 4
  misc_feature: MA Experiment 20000709 PARAMETER Experiment Name: At_15mM_NH4NO3_L-to-H_P Parameter: Tissue Value: Aerial
  misc_feature: MA Experiment 20000709 PARAMETER Experiment Name: At_15mM_NH4NO3_L-to-H_P Parameter: Treatment Value: 15mM NH4NO3 vs. 30mM Mannitol
  misc_feature: MA Experiment ID: 20001247 Result: Down-regulated in Transcription
  misc_feature: MA Experiment 20001247 PARAMETER Experiment Name: At_Far-red-induction_P Parameter: Age (day) Value: 7
  misc_feature: MA Experiment 20001247 PARAMETER Experiment Name: At_Far-red-induction_P Parameter: Light Value: Far-red vs. White
  misc_feature: MA Experiment 20001247 PARAMETER Experiment Name: At_Far-red-induction_P Parameter: Organism Value: A. thaliana
  misc_feature: MA Experiment 20001247 PARAMETER Experiment Name: At_Far-red-induction_P Parameter: Plant Line Value: Columbia
  misc_feature: MA Experiment 20001247 PARAMETER Experiment Name: At_Far-red-induction_P Parameter: Timepoint (hr) Value: 1
  misc_feature: MA Experiment 20001247 PARAMETER Experiment Name: At_Far-red-induction_P Parameter: Tissue Value: Whole Plant
  misc_feature: MA Experiment ID: 20001451 Result: Down-regulated in Transcription
  misc_feature: MA Experiment 20001451 PARAMETER Experiment Name: At_Far-red-induction_P Parameter: Age (day) Value: 7
  misc_feature: MA Experiment 20001451 PARAMETER Experiment Name: At_Far-red-induction_P Parameter: Light Value: Far-red vs. White
  misc_feature: MA Experiment 20001451 PARAMETER Experiment Name: At_Far-red-induction_P Parameter: Organism Value: A. thaliana
  misc_feature: MA Experiment 20001451 PARAMETER Experiment Name: At_Far-red-induction_P Parameter: Plant Line Value: Columbia
  misc_feature: MA Experiment 20001451 PARAMETER Experiment Name: At_Far-red-induction_P Parameter: Timepoint (hr) Value: 24
  misc_feature: MA Experiment 20001451 PARAMETER Experiment Name: At_Far-red-induction_P Parameter: Tissue Value: Whole Plant
  misc_feature: MA Experiment ID: 20001458 Result: Up-regulated in Transcription
  misc_feature: MA Experiment 20001458 PARAMETER Experiment Name: At_50mM_NH4NO3_L-to-H_P Parameter: Age (day) Value: Undefined
  misc_feature: MA Experiment 20001458 PARAMETER Experiment Name: At_50mM_NH4NO3_L-to-H_P Parameter: Organism Value: Undefined
  misc_feature: MA Experiment 20001458 PARAMETER Experiment Name: At_50mM_NH4NO3_L-to-H_P Parameter: Plant Line Value: Undefined
  misc_feature: MA Experiment 20001458 PARAMETER Experiment Name: At_50mM_NH4NO3_L-to-H_P Parameter: Timepoint (hr) Value: 2
  misc_feature: MA Experiment 20001458 PARAMETER Experiment Name: At_50mM_NH4NO3_L-to-H_P Parameter: Tissue Value: Siliques
  misc_feature: MA Experiment 20001458 PARAMETER Experiment Name: At_50mM_NH4NO3_L-to-H_P Parameter: Treatment Value: 50mM NH4NO3 vs. 100mM Manitol
  misc_feature: MA Experiment ID: 20001557 Result: Up-regulated in Transcription
  misc_feature: MA Experiment 20001557 PARAMETER Experiment Name: At_Drought_Soil_Dry_P Parameter: Age (day) Value: 27
  misc_feature: MA Experiment 20001557 PARAMETER Experiment Name: At_Drought_Soil_Dry_P Parameter: Organism Value: A. thaliana
  misc_feature: MA Experiment 20001557 PARAMETER Experiment Name: At_Drought_Soil_Dry_P Parameter: Plant Line Value: WS
  misc_feature: MA Experiment 20001557 PARAMETER Experiment Name: At_Drought_Soil_Dry_P Parameter: Post Timepoint (hr) Value: 3
  misc_feature: MA Experiment 20001557 PARAMETER Experiment Name: At_Drought_Soil_Dry_P Parameter: Post-Treatment Value: Re-Water vs. No Drought
  misc_feature: MA Experiment 20001557 PARAMETER Experiment Name: At_Drought_Soil_Dry_P Parameter: Timepoint (day) Value: 13
  misc_feature: MA Experiment 20001557 PARAMETER Experiment Name: At_Drought_Soil_Dry_P Parameter: Treatment Value: Drought vs. No Drought
  misc_feature: MA Experiment ID: 20001558 Result: Up-regulated in Transcription
  misc_feature: MA Experiment 20001558 PARAMETER Experiment Name: At_Drought_Soil_Dry_P Parameter: Age (day) Value: 27
  misc_feature: MA Experiment 20001558 PARAMETER Experiment Name: At_Drought_Soil_Dry_P Parameter: Organism Value: A. thaliana
  misc_feature: MA Experiment 20001558 PARAMETER Experiment Name: At_Drought_Soil_Dry_P Parameter: Plant Line Value: WS
  misc_feature: MA Experiment 20001558 PARAMETER Experiment Name: At_Drought_Soil_Dry_P Parameter: Post Timepoint (hr) Value: 6
  misc_feature: MA Experiment 20001558 PARAMETER Experiment Name: At_Drought_Soil_Dry_P Parameter: Post-Treatment Value: Re-Water vs. No Drought
  misc_feature: MA Experiment 20001558 PARAMETER Experiment Name: At_Drought_Soil_Dry_P Parameter: Timepoint (day) Value: 13
  misc_feature: MA Experiment 20001558 PARAMETER Experiment Name: At_Drought_Soil_Dry_P Parameter: Treatment Value: Drought vs. No Drought
  misc_feature: MA Experiment ID: 20001560 Result: Up-regulated in Transcription
  misc_feature: MA Experiment 20001560 PARAMETER Experiment Name: At_Drought_Soil_Dry_P Parameter: Age (day) Value: 28
  misc_feature: MA Experiment 20001560 PARAMETER Experiment Name: At_Drought_Soil_Dry_P Parameter: Organism Value: A. thaliana
  misc_feature: MA Experiment 20001560 PARAMETER Experiment Name: At_Drought_Soil_Dry_P Parameter: Plant Line Value: WS
  misc_feature: MA Experiment 20001560 PARAMETER Experiment Name: At_Drought_Soil_Dry_P Parameter: Post Timepoint (hr) Value: None
  misc_feature: MA Experiment 20001560 PARAMETER Experiment Name: At_Drought_Soil_Dry_P Parameter: Post-Treatment Value: None
  misc_feature: MA Experiment 20001560 PARAMETER Experiment Name: At_Drought_Soil_Dry_P Parameter: Timepoint (day) Value: 14
  misc_feature: MA Experiment 20001560 PARAMETER Experiment Name: At_Drought_Soil_Dry_P Parameter: Treatment Value: Drought vs. No Drought
  misc_feature: MA Experiment ID: 20001757 Result: Up-regulated in Transcription
  misc_feature: MA Experiment 20001757 PARAMETER Experiment Name: At_50mM_NH4NO3_L-to-H_P Parameter: Timepoint (hr) Value: 6
  misc_feature: MA Experiment 20001757 PARAMETER Experiment Name: At_50mM_NH4NO3_L-to-H_P Parameter: Tissue Value: Leaf
  misc_feature: MA Experiment 20001757 PARAMETER Experiment Name: At_50mM_NH4NO3_L-to-H_P Parameter: Treatment Value: 50mM NH4NO3 vs 100mM Mannitol
atgagtatcatcgcaggctcctacgagagattcatttggggtttcaagcttaaacccacgaagcacgacgccgaatctcaaaccctaactctctcccctctcttctcctacccttcccacatctccccaatcaccaccgtcgcttgttccggtcccgccgcagcttccggcggctccgacgatacaatccacctctacgaccttccctccgcttcttccctcggctctctccttgaccacaatcacgcagcttcaatcaccgctctctccttctacacaccttcttcactctccttccctcgtaatctaatctccgccgccgcagatggctccgttgctatattcgatactgatccttttgttttgcttaagtcgtttcgtcctcataagaaagcggttaatgatttagcgattcatccttcagggaagcttgctttagctgtttatcgtgatgagttctttgcgatgttgaatttagttagaggaaagaggagtttttgttgtaggttaggtcatgaagctagtcttgtgaaatttgatcctagtggtgaaaggttttacatggttgtgagtaataaagttggagttcatcagtctgaagatgctaagcttcttcttgagctcgagaatccgagccgcaagcgtattctctgtgctactcctggagaggttgtgtttcttactctttggaacccacaattaagattccaccttggaaccttaaaagagagtggaactctgttcacaggtggtgaggatcgggctataacagcttgggatacaaatagtgggaagcttgcatattccatagaagatgctcacccagctcgaatcaaaggtattgttgtgcttaccaggaatgatagtgacggctccttggaagatccatacttgattggttctgcatcgtctgatgggatcatacgtgtttgggacgtgcgaatggcggctaaagaaaatacaaaaccattagccgagacaaatactaaatcaaggcttacttgtcttgccgggtcagctcttaaatctatgagacggccacagattggaaagcaggaacctcagaaggtagacgaagagcatgaggactcagaataa

SEQ ID NO: 71708 - protein, 365 aa, Arabidopsis thaliana
  peptide (1)..(365): Ceres Seq. ID no. 4807439
  misc_feature (1)..(365): Homolog of NCBI NO: 25404514 NR Description: hypothetical protein F16G16.2 [imported] -
  misc_feature (1)..(223): Homolog of NCBI NO: 15217832 NR Description: G-protein beta-subunit (transducin) family;
  misc_feature (225)..(365): Homolog of NCBI NO: 15217832 NR Description: G-protein beta-subunit (transducin) family;
  misc_feature (1)..(223): Homolog of NCBI NO: 23306444 NR Description: Unknown protein [Arabidopsis thaliana]
  misc_feature (225)..(365): Homolog of NCBI NO: 23306444 NR Description: Unknown protein [Arabidopsis thaliana]
  misc_feature (1)..(213): Homolog of NCBI NO: 8923577 NR Description: hypothetical protein FLJ20624 [Homo sapiens]
  misc_feature (241)..(336): Homolog of NCBI NO: 8923577 NR Description: hypothetical protein FLJ20624 [Homo sapiens]
  misc_feature (1)..(213): Homolog of NCBI NO: 14211689 NR Description: PAK/PLC-interacting protein 1 [Homo sapiens]
  misc_feature (241)..(360): Homolog of NCBI NO: 14211689 NR Description: PAK/PLC-interacting protein 1 [Homo sapiens]
  misc_feature (1)..(213): Homolog of NCBI NO: 15012024 NR Description: Unknown (protein for MGC:13426) [Homo sapiens]
MSIIAGSYERFIWGFKLKPTKHDAESQTLTLSPLFSYPSHISPITTVACSGPAAASGGSDDTIHLYDLPSASSLGSLLDHNHAASITALSFYTPSSLSFPRNLISAAADGSVAIFDTDPFVLLKSFRPHKKAVNDLAIHPSGKLALAVYRDEFFAMLNLVRGKRSFCCRLGHEASLVKFDPSGERFYMVVSNKVGVHQSEDAKLLLELENPSRKRILCATPGEVVFLTLWNPQLRFHLGTLKESGTLFTGGEDRAITAWDTNSGKLAYSIEDAHPARIKGIVVLTRNDSDGSLEDPYLIGSASSDGIIRVWDVRMAAKENTKPLAETNTKSRLTCLAGSALKSMRRPQIGKQEPQKVDEEHEDSE

SEQ ID NO: 71709 - protein, 210 aa, Arabidopsis thaliana
  peptide (1)..(210): Ceres Seq. ID no. 4807440
  misc_feature (1)..(210): Homolog of NCBI NO: 25404514 NR Description: hypothetical protein F16G16.2 [imported] -
  misc_feature (1)..(68): Homolog of NCBI NO: 15217832 NR Description: G-protein beta-subunit (transducin) family;
  misc_feature (70)..(210): Homolog of NCBI NO: 15217832 NR Description: G-protein beta-subunit (transducin) family;
  misc_feature (1)..(68): Homolog of NCBI NO: 23306444 NR Description: Unknown protein [Arabidopsis thaliana]
  misc_feature (70)..(210): Homolog of NCBI NO: 23306444 NR Description: Unknown protein [Arabidopsis thaliana]
  misc_feature (1)..(58): Homolog of NCBI NO: 8923577 NR Description: hypothetical protein FLJ20624 [Homo sapiens]
  misc_feature (86)..(181): Homolog of NCBI NO: 8923577 NR Description: hypothetical protein FLJ20624 [Homo sapiens]
  misc_feature (1)..(58): Homolog of NCBI NO: 14211689 NR Description: PAK/PLC-interacting protein 1 [Homo sapiens]
  misc_feature (86)..(205): Homolog of NCBI NO: 14211689 NR Description: PAK/PLC-interacting protein 1 [Homo sapiens]
  misc_feature (1)..(58): Homolog of NCBI NO: 15012024 NR Description: Unknown (protein for MGC:13426) [Homo sapiens]
MLNLVRGKRSFCCRLGHEASLVKFDPSGERFYMVVSNKVGVHQSEDAKLLLELENPSRKRILCATPGEVVFLTLWNPQLRFHLGTLKESGTLFTGGEDRAITAWDTNSGKLAYSIEDAHPARIKGIVVLTRNDSDGSLEDPYLIGSASSDGIIRVWDVRMAAKENTKPLAETNTKSRLTCLAGSALKSMRRPQIGKQEPQKVDEEHEDSE

SEQ ID NO: 71710 - DNA, 2343 bp, Arabidopsis thaliana
  misc_feature (1)..(2343): Ceres Seq. ID no. 4807824
  misc_feature: MA Experiment ID: 20001451 Result: Down-regulated in Transcription
  misc_feature: MA Experiment 20001451 PARAMETER Experiment Name: At_Far-red-induction_P Parameter: Age (day) Value: 7
  misc_feature: MA Experiment 20001451 PARAMETER Experiment Name: At_Far-red-induction_P Parameter: Light Value: Far-red vs. White
  misc_feature: MA Experiment 20001451 PARAMETER Experiment Name: At_Far-red-induction_P Parameter: Organism Value: A. thaliana
  misc_feature: MA Experiment 20001451 PARAMETER Experiment Name: At_Far-red-induction_P Parameter: Plant Line Value: Columbia
  misc_feature: MA Experiment 20001451 PARAMETER Experiment Name: At_Far-red-induction_P Parameter: Timepoint (hr) Value: 24
  misc_feature: MA Experiment 20001451 PARAMETER Experiment Name: At_Far-red-induction_P Parameter: Tissue Value: Whole Plant
atgaaaccacagatgttctttcgatcagtcattcagttctattcaaagccgtcatggatgcaacgttcctactcttccggtaacgccgaattcaatatctccggcgaggtcatcagcattctagctaagaagaaacctatagagcctgctttggagccgcttgttccgtttctctcgaagaatatcatcacatcggtaatcaaagatgaggtcaatagacaattaggattccgtttttttatatgggcgtcgagaagagagcgtctcaggagccgagagtcttttggtttggtcatcgatatgctctctgaagataatggttgcgatctatattggcagacattggaggagcttaaatctggtggcgtctctgtcgattcttattgcttctgtgttttgatctctgcttatgctaagatgggtatggcggaaaaagcagtggaatcgtttggaaggatgaaggagtttgattgcagacccgatgtgttcacgtacaacgtgatattgcgagtcatgatgcgagaggaggtcttctttatgctggcttttgctgtgtacaatgaaatgctcaagtgcaattgttccccaaatctatacacgtttggtatcttgatggatggattgtataagaaagggagaacgagtgatgcacagaagatgttcgacgatatgaccggtagaggaatttcgcctaacagagttacctataccattctcatttcaggtttgtgtcagaggggaagtgctgacgatgcacgaaagctattctacgagatgcaaacgagcggtaactatcctgattccgtcgcacacaatgctttgcttgatgggttttgtaaattgggtcggatggttgaagcatttgagctgttgcggctttttgagaaagatggttttgtgcttggtcttcgaggttatagcagtttaatcgatggattgttcagagctaggagatacactcaggcatttgagctgtatgcaaatatgctgaagaagaatattaaacctgacatcattttgtacacgatattgattcaagggttatctaaagccggtaagattgaggatgcattgaagctgttaagcagcatgccaagtaagggcattagcccagatacctactgttacaatgctgttataaaggctctatgtgggaggggacttttggaagagggtcggtccctccaactcgaaatgtcagaaacggaatccttccctgatgcgtgcacacacacaattcttatctgtagtatgtgcaggaatgggctggttagggaagctgaagaaatttttacggagattgagaagagtggttgttctccttcggttgctacgttcaatgctttaattgatggactgtgcaagtccggtgagctcaaggaagccaggttattgttgcataaaatggaggtcgggagacctgcttccttgtttcttaggctttcgcacagtggaaaccggagttttgacaccatggttgaatccggttcgattctcaaggcatacagggatcttgcacattttgctgataccgggagttcgccagacattgtttcttacaatgttcttataaatgggttctgcagagcaggagacattgacggtgctctcaagcttctcaatgtgcttcaactaaagggattatcccctgatagcgtcacttacaacactctcatcaatggacttcatagagtcggcagagaagaagaagcttttaaactcttttacgctaaagatgattttagacacagtcccgcggtttacagatcgctcatgacatggtcatgtcggaaaagaaaagtcttggtggcttttaatctatggatgaaataccttaagaagatatcttgtctggatgatgaaacagctaatgagattgaacaatgtttcaaggaaggggaaaccgagagagctttaagacgacttattgaattagataccagaaaagacgagttaactttagggccttacacgatatggcttatcgggttatgccaatcagggagatttcacgaggccttgatggtgttttcggttttaagggagaagaagatccttgtaacacctccgagctgtgtcaaactgattcatggactctgcaaaagagaacaacttgatgctgcaatagaggtgttcttatacactctagataacaacttcaagctgatgcctagagtttgcaactacctcctaagctccctcctggaatcaacagaaaagatggagattgtttcgcaacttacaaacagaatggaacgtgcagggtacaatgttgactcgatgcttcgattcgagattttgaaatatcatagacatagaaagcaggtgctgatagatctttag

SEQ ID NO: 71711 - protein, 780 aa, Arabidopsis thaliana
  peptide (1)..(780): Ceres Seq. ID no. 4807825
  misc_feature (163)..(198): Pfam Name: PPR repeat Pfam Description: PPR repeat
  misc_feature (94)..(739): Homolog of NCBI NO: 33859440 NR Description: PPR protein [Oryza sativa (indica cultivar-group)]
  misc_feature (5)..(699): Homolog of NCBI NO: 15231863 NR Description: putative protein; protein id: At3g53700.1, by cDNA: gi_15982930 [Arabidopsis thaliana]
  misc_feature (95)..(580): Homolog of NCBI NO: 15221549 NR Description: PPR-repeat protein; protein id: At1g62670.1
  misc_feature (94)..(736): Homolog of NCBI NO: 37535708 NR Description: putative membrane-associated protein [Oryza
  misc_feature (104)..(592): Homolog of NCBI NO: 15242446 NR Description: putative protein; protein id: At5g39710.1
  misc_feature (122)..(759): Homolog of NCBI NO: 15227371 NR Description: hypothetical protein; protein id: At2g17140.1
  misc_feature (95)..(580): Homolog of NCBI NO: 6630464 NR Description: F23N19.4 [Arabidopsis thaliana]
  misc_feature (95)..(580): Homolog of NCBI NO: 25404377 NR Description: hypothetical protein F16P17.5 [imported] - thaliana >gi|8493578|gb|AAF75801.1|AC011000_4 Contains a RepB protein domain and multiple PPR PF|01535 repeats. [Arabidopsis
  misc_feature (95)..(776): Homolog of NCBI NO: 15221621 NR Description: unknown protein; protein id: At1g62910.1
  misc_feature (97)..(743): Homolog of NCBI NO: 34394343 NR Description: putative fertility restorer homologue [Oryza
MKPQMFFRSVIQFYSKPSWMQRSYSSGNAEFNISGEVISILAKKKPIEPALEPLVPFLSKNIITSVIKDEVNRQLGFRFFIWASRRERLRSRESFGLVIDMLSEDNGCDLYWQTLEELKSGGVSVDSYCFCVLISAYAKMGMAEKAVESFGRMKEFDCRPDVFTYNVILRVMMREEVFFMLAFAVYNEMLKCNCSPNLYTFGILMDGLYKKGRTSDAQKMFDDMTGRGISPNRVTYTILISGLCQRGSADDARKLFYEMQTSGNYPDSVAHNALLDGFCKLGRMVEAFELLRLFEKDGFVLGLRGYSSLIDGLFRARRYTQAFELYANMLKKNIKPDIILYTILIQGLSKAGKIEDALKLLSSMPSKGISPDTYCYNAVIKALCGRGLLEEGRSLQLEMSETESFPDACTHTILICSMCRNGLVREAEEIFTEIEKSGCSPSVATFNALIDGLCKSGELKEARLLLHKMEVGRPASLFLRLSHSGNRSFDTMVESGSILKAYRDLAHFADTGSSPDIVSYNVLINGFCRAGDIDGALKLLNVLQLKGLSPDSVTYNTLINGLHRVGREEEAFKLFYAKDDFRHSPAVYRSLMTWSCRKRKVLVAFNLWMKYLKKISCLDDETANEIEQCFKEGETERALRRLIELDTRKDELTLGPYTIWLIGLCQSGRFHEALMVFSVLREKKILVTPPSCVKLIHGLCKREQLDAAIEVFLYTLDNNFKLMPRVCNYLLSSLLESTEKMEIVSQLTNRMERAGYNVDSMLRFEILKYHRHRKQVLIDL

SEQ ID NO: 71712 - protein, 776 aa, Arabidopsis thaliana
  peptide (1)..(776): Ceres Seq. ID no. 4807826
  misc_feature (159)..(194): Pfam Name: PPR repeat Pfam Description: PPR repeat
  misc_feature (90)..(735): Homolog of NCBI NO: 33859440 NR Description: PPR protein [Oryza sativa (indica cultivar-group)]
  misc_feature (1)..(695): Homolog of NCBI NO: 15231863 NR Description: putative protein; protein id: At3g53700.1, by cDNA: gi_15982930 [Arabidopsis thaliana]
  misc_feature (91)..(576): Homolog of NCBI NO: 15221549 NR Description: PPR-repeat protein; protein id: At1g62670.1
  misc_feature (90)..(732): Homolog of NCBI NO: 37535708 NR Description: putative membrane-associated protein [Oryza
  misc_feature (100)..(588): Homolog of NCBI NO: 15242446 NR Description: putative protein; protein id: At5g39710.1
  misc_feature (118)..(755): Homolog of NCBI NO: 15227371 NR Description: hypothetical protein; protein id: At2g17140.1
  misc_feature (91)..(576): Homolog of NCBI NO: 6630464 NR Description: F23N19.4 [Arabidopsis thaliana]
  misc_feature (91)..(576): Homolog of NCBI NO: 25404377 NR Description: hypothetical protein F16P17.5 [imported] - thaliana >gi|8493578|gb|AAF75801.1|AC011000_4 Contains a RepB protein domain and multiple PPR PF|01535 repeats. [Arabidopsis
  misc_feature (91)..(772): Homolog of NCBI NO: 15221621 NR Description: unknown protein; protein id: At1g62910.1
  misc_feature (93)..(739): Homolog of NCBI NO: 34394343 NR Description: putative fertility restorer homologue [Oryza
MFFRSVIQFYSKPSWMQRSYSSGNAEFNISGEVISILAKKKPIEPALEPLVPFLSKNIITSVIKDEVNRQLGFRFFIWASRRERLRSRESFGLVIDMLSEDNGCDLYWQTLEELKSGGVSVDSYCFCVLISAYAKMGMAEKAVESFGRMKEFDCRPDVFTYNVILRVMMREEVFFMLAFAVYNEMLKCNCSPNLYTFGILMDGLYKKGRTSDAQKMFDDMTGRGISPNRVTYTILISGLCQRGSADDARKLFYEMQTSGNYPDSVAHNALLDGFCKLGRMVEAFELLRLFEKDGFVLGLRGYSSLIDGLFRARRYTQAFELYANMLKKNIKPDIILYTILIQGLSKAGKIEDALKLLSSMPSKGISPDTYCYNAVIKALCGRGLLEEGRSLQLEMSETESFPDACTHTILICSMCRNGLVREAEEIFTEIEKSGCSPSVATFNALIDGLCKSGELKEARLLLHKMEVGRPASLFLRLSHSGNRSFDTMVESGSILKAYRDLAHFADTGSSPDIVSYNVLINGFCRAGDIDGALKLLNVLQLKGLSPDSVTYNTLINGLHRVGREEEAFKLFYAKDDFRHSPAVYRSLMTWSCRKRKVLVAFNLWMKYLKKISCLDDETANEIEQCFKEGETERALRRLIELDTRKDELTLGPYTIWLIGLCQSGRFHEALMVFSVLREKKILVTPPSCVKLIHGLCKREQLDAAIEVFLYTLDNNFKLMPRVCNYLLSSLLESTEKMEIVSQLTNRMERAGYNVDSMLRFEILKYHRHRKQVLIDL

SEQ ID NO: 71713 - protein, 761 aa, Arabidopsis thaliana
  peptide (1)..(761): Ceres Seq. ID no. 4807827
  misc_feature (144)..(179): Pfam Name: PPR repeat Pfam Description: PPR repeat
  misc_feature (75)..(720): Homolog of NCBI NO: 33859440 NR Description: PPR protein [Oryza sativa (indica cultivar-group)]
  misc_feature (1)..(680): Homolog of NCBI NO: 15231863 NR Description: putative protein; protein id: At3g53700.1, by cDNA: gi_15982930 [Arabidopsis thaliana]
  misc_feature (76)..(561): Homolog of NCBI NO: 15221549 NR Description: PPR-repeat protein; protein id: At1g62670.1
  misc_feature (75)..(717): Homolog of NCBI NO: 37535708 NR Description: putative membrane-associated protein [Oryza
  misc_feature (85)..(573): Homolog of NCBI NO: 15242446 NR Description: putative protein; protein id: At5g39710.1
  misc_feature (103)..(740): Homolog of NCBI NO: 15227371 NR Description: hypothetical protein; protein id: At2g17140.1
  misc_feature (76)..(561): Homolog of NCBI NO: 6630464 NR Description: F23N19.4 [Arabidopsis thaliana]
  misc_feature (76)..(561): Homolog of NCBI NO: 25404377 NR Description: hypothetical protein F16P17.5 [imported] - thaliana >gi|8493578|gb|AAF75801.1|AC011000_4 Contains a RepB protein domain and multiple PPR PF|01535 repeats. [Arabidopsis
  misc_feature (76)..(757): Homolog of NCBI NO: 15221621 NR Description: unknown protein; protein id: At1g62910.1
  misc_feature (78)..(724): Homolog of NCBI NO: 34394343 NR Description: putative fertility restorer homologue [Oryza
MQRSYSSGNAEFNISGEVISILAKKKPIEPALEPLVPFLSKNIITSVIKDEVNRQLGFRFFIWASRRERLRSRESFGLVIDMLSEDNGCDLYWQTLEELKSGGVSVDSYCFCVLISAYAKMGMAEKAVESFGRMKEFDCRPDVFTYNVILRVMMREEVFFMLAFAVYNEMLKCNCSPNLYTFGILMDGLYKKGRTSDAQKMFDDMTGRGISPNRVTYTILISGLCQRGSADDARKLFYEMQTSGNYPDSVAHNALLDGFCKLGRMVEAFELLRLFEKDGFVLGLRGYSSLIDGLFRARRYTQAFELYANMLKKNIKPDIILYTILIQGLSKAGKIEDALKLLSSMPSKGISPDTYCYNAVIKALCGRGLLEEGRSLQLEMSETESFPDACTHTILICSMCRNGLVREAEEIFTEIEKSGCSPSVATFNALIDGLCKSGELKEARLLLHKMEVGRPASLFLRLSHSGNRSFDTMVESGSILKAYRDLAHFADTGSSPDIVSYNVLINGFCRAGDIDGALKLLNVLQLKGLSPDSVTYNTLINGLHRVGREEEAFKLFYAKDDFRHSPAVYRSLMTWSCRKRKVLVAFNLWMKYLKKISCLDDETANEIEQCFKEGETERALRRLIELDTRKDELTLGPYTIWLIGLCQSGRFHEALMVFSVLREKKILVTPPSCVKLIHGLCKREQLDAAIEVFLYTLDNNFKLMPRVCNYLLSSLLESTEKMEIVSQLTNRMERAGYNVDSMLRFEILKYHRHRKQVLIDL

SEQ ID NO: 71714 - DNA, 858 bp, Arabidopsis thaliana
  misc_feature (1)..(858): Ceres Seq. ID no. 4808307
  misc_feature: MA Experiment ID: 20000286 Result: Up-regulated in Transcription
  misc_feature: MA Experiment 20000286 PARAMETER Experiment Name: At_Open_Flower_P Parameter: Age (day) Value: 21
  misc_feature: MA Experiment 20000286 PARAMETER Experiment Name: At_Open_Flower_P Parameter: Plant Line Value: WS
  misc_feature: MA Experiment 20000286 PARAMETER Experiment Name: At_Open_Flower_P Parameter: Tissue Value: Half Open vs. Whole Plant
  misc_feature: MA Experiment ID: 20000573 Result: Up-regulated in Transcription
  misc_feature: MA Experiment 20000573 PARAMETER Experiment Name: At_100uM_ABA_Mutants__P Parameter: Organism Value: A. thaliana
  misc_feature: MA Experiment 20000573 PARAMETER Experiment Name: At_100uM_ABA_Mutants__P Parameter: Plant Line Value: CS22 vs. Ler wt
  misc_feature: MA Experiment 20000573 PARAMETER Experiment Name: At_100uM_ABA_Mutants__P Parameter: Timepoint (hr) Value: N/A
  misc_feature: MA Experiment 20000573 PARAMETER Experiment Name: At_100uM_ABA_Mutants__P Parameter: Tissue Value: Whole Plant
  misc_feature: MA Experiment 20000573 PARAMETER Experiment Name: At_100uM_ABA_Mutants__P Parameter: Treatment Value: None
  misc_feature: MA Experiment ID: 20000574 Result: Up-regulated in Transcription
  misc_feature: MA Experiment 20000574 PARAMETER Experiment Name: At_100uM_ABA_Mutants__P Parameter: Organism Value: A. thaliana
  misc_feature: MA Experiment 20000574 PARAMETER Experiment Name: At_100uM_ABA_Mutants__P Parameter: Plant Line Value: CS23 vs. Ler wt
  misc_feature: MA Experiment 20000574 PARAMETER Experiment Name: At_100uM_ABA_Mutants__P Parameter: Timepoint (hr) Value: N/A
  misc_feature: MA Experiment 20000574 PARAMETER Experiment Name: At_100uM_ABA_Mutants__P Parameter: Tissue Value: Whole Plant
  misc_feature: MA Experiment 20000574 PARAMETER Experiment Name: At_100uM_ABA_Mutants__P Parameter: Treatment Value: None
  misc_feature: MA Experiment ID: 20001451 Result: Up-regulated in Transcription
  misc_feature: MA Experiment 20001451 PARAMETER Experiment Name: At_Far-red-induction_P Parameter: Age (day) Value: 7
  misc_feature: MA Experiment 20001451 PARAMETER Experiment Name: At_Far-red-induction_P Parameter: Light Value: Far-red vs. White
  misc_feature: MA Experiment 20001451 PARAMETER Experiment Name: At_Far-red-induction_P Parameter: Organism Value: A. thaliana
  misc_feature: MA Experiment 20001451 PARAMETER Experiment Name: At_Far-red-induction_P Parameter: Plant Line Value: Columbia
  misc_feature: MA Experiment 20001451 PARAMETER Experiment Name: At_Far-red-induction_P Parameter: Timepoint (hr) Value: 24
  misc_feature: MA Experiment 20001451 PARAMETER Experiment Name: At_Far-red-induction_P Parameter: Tissue Value: Whole Plant
  misc_feature: Pfam Name: IF4E Pfam Description: Eukaryotic initiation factor 4E
atggaacaatactgggctttatataaagaactaactctctctcatctccgtctgttatactgggaacggactcgacggagcatagtgaacgggaaaataactgtcaagcgagcgagagagaaagagaaatcagaaatggtggttatggattctccagtttcggggagaatggctgatcagaacatcgatcctaacaccacgacgagccctagtcctatagagaagcatgtttcggcgattaaggctatctccggcgacgagaaagctccgtcgaaggagaaaaagaactacgcgtcgaagaaatcaactaccgtaatccagaaatcgcactgtttccagaattcttggacattttggttcgataatccttcctccaaatcgaatcaagtcatatggggaagctctttgagatctttgtatacattcgctaccatcgaagagttctggagtctttacaataacattcatcctccaaccaagtgggtgtcagggtcggatctctactgcttcaaagataagattgaaccaaaatgggaagatcctatctgtgccaatggaggaaaatggactatgtttttccctagagctacactagaatctaattggcttaacacgttacttgcgttggttggtgagcaatttgaccaaggagatgagatctgtggagcagttttgaacttcagaacgagaggggacaggatctctctatggacaaagaaagctgcaaatgaggaggctcagctaagcattgggaagcagtggaaggaacttcttggctacaatgacacaatcggatttatagttcatgaggatgcaaagactcttgatcgtgatgctaaacgtcgatatactgtatga

SEQ ID NO: 71715 - protein, 285 aa, Arabidopsis thaliana
  peptide (1)..(285): Ceres Seq. ID no. 4808308
  misc_feature: Pfam Name: IF4E Pfam Description: Eukaryotic initiation factor 4E
  misc_feature (1)..(285): Homolog of NCBI NO: 15220489 NR Description: eukaryotic translation initiation factor 4E, protein id: At1g29590.1 [Arabidopsis thaliana]
  misc_feature (46)..(285): Homolog of NCBI NO: 29839395 NR Description: Putative eukaryotic translation initiation factor
  misc_feature (46)..(285): Homolog of NCBI NO: 15220482 NR Description: eukaryotic translation initiation factor 4E, protein id: At1g29550.1 [Arabidopsis thaliana]
  misc_feature (83)..(285): Homolog of NCBI NO: 32698524 NR Description: eukaryotic translation initiation factor 4E
  misc_feature (46)..(284): Homolog of NCBI NO: 15236735 NR Description: translation initiation factor eIF4E; protein id: supported by cDNA: 25447., supported by cDNA: gi_14488075, by cDNA: gi_20147320 [Arabidopsis thaliana]
  misc_feature (98)..(283): Homolog of NCBI NO: 37813067 NR Description: eukaryotic translation initiation factor 4E
  misc_feature (85)..(285): Homolog of NCBI NO: 7862169 NR Description: eIF4E [Lycopersicon esculentum]
  misc_feature (57)..(285): Homolog of NCBI NO: 25176242 NR Description: eucaryotic initiation factor 4E [Capsicum annuum]
  misc_feature (57)..(285): Homolog of NCBI NO: 38565045 NR Description: eukaryotic translation initiation factor 4E
  misc_feature (57)..(285): Homolog of NCBI NO: 25176246 NR Description: eucaryotic initiation factor 4E [Capsicum annuum]
MEQYWALYKELTLSHLRLLYWERTRRSIVNGKITVKRAREKEKSEMVVMDSPVSGRMADQNIDPNTTTSPSPIEKHVSAIKAISGDEKAPSKEKKNYASKKSTTVIQKSHCFQNSWTFWFDNPSSKSNQVIWGSSLRSLYTFATIEEFWSLYNNIHPPTKWVSGSDLYCFKDKIEPKWEDPICANGGKWTMFFPRATLESNWLNTLLALVGEQFDQGDEICGAVLNFRTRGDRISLWTKKAANEEAQLSIGKQWKELLGYNDTIGFIVHEDAKTLDRDAKRRYTV

SEQ ID NO: 71716 - protein, 240 aa, Arabidopsis thaliana
  peptide (1)..(240): Ceres Seq. ID no. 4808309
  misc_feature: Pfam Name: IF4E Pfam Description: Eukaryotic initiation factor 4E
  misc_feature (1)..(240): Homolog of NCBI NO: 15220489 NR Description: eukaryotic translation initiation factor 4E, protein id: At1g29590.1 [Arabidopsis thaliana]
  misc_feature (1)..(240): Homolog of NCBI NO: 29839395 NR Description: Putative eukaryotic translation initiation factor
  misc_feature (1)..(240): Homolog of NCBI NO: 15220482 NR Description: eukaryotic translation initiation factor 4E, protein id: At1g29550.1 [Arabidopsis thaliana]
  misc_feature (38)..(240): Homolog of NCBI NO: 32698524 NR Description: eukaryotic translation initiation factor 4E
  misc_feature (1)..(239): Homolog of NCBI NO: 15236735 NR Description: translation initiation factor eIF4E; protein id: supported by cDNA: 25447., supported by cDNA: gi_14488075, by cDNA: gi_20147320 [Arabidopsis thaliana]
  misc_feature (53)..(238): Homolog of NCBI NO: 37813067 NR Description: eukaryotic translation initiation factor 4E
  misc_feature (40)..(240): Homolog of NCBI NO: 7862169 NR Description: eIF4E [Lycopersicon esculentum]
  misc_feature (12)..(240): Homolog of NCBI NO: 25176242 NR Description: eucaryotic initiation factor 4E [Capsicum annuum]
  misc_feature (12)..(240): Homolog of NCBI NO: 38565045 NR Description: eukaryotic translation initiation factor 4E
  misc_feature (12)..(240): Homolog of NCBI NO: 25176246 NR Description: eucaryotic initiation factor 4E [Capsicum annuum]
MVVMDSPVSGRMADQNIDPNTTTSPSPIEKHVSAIKAISGDEKAPSKEKKNYASKKSTTVIQKSHCFQNSWTFWFDNPSSKSNQVIWGSSLRSLYTFATIEEFWSLYNNIHPPTKWVSGSDLYCFKDKIEPKWEDPICANGGKWTMFFPRATLESNWLNTLLALVGEQFDQGDEICGAVLNFRTRGDRISLWTKKAANEEAQLSIGKQWKELLGYNDTIGFIVHEDAKTLDRDAKRRYTV

SEQ ID NO: 71717 - protein, 237 aa, Arabidopsis thaliana
  peptide (1)..(237): Ceres Seq. ID no. 4808310
  misc_feature: Pfam Name: IF4E Pfam Description: Eukaryotic initiation factor 4E
  misc_feature (1)..(237): Homolog of NCBI NO: 15220489 NR Description: eukaryotic translation initiation factor 4E, protein id: At1g29590.1 [Arabidopsis thaliana]
  misc_feature (1)..(237): Homolog of NCBI NO: 29839395 NR Description: Putative eukaryotic translation initiation factor
  misc_feature (1)..(237): Homolog of NCBI NO: 15220482 NR Description: eukaryotic translation initiation factor 4E, protein id: At1g29550.1 [Arabidopsis thaliana]
  misc_feature (35)..(237): Homolog of NCBI NO: 32698524 NR Description: eukaryotic translation initiation factor 4E
  misc_feature (1)..(236): Homolog of NCBI NO: 15236735 NR Description: translation initiation factor eIF4E; protein id: supported by cDNA: 25447., supported by cDNA: gi_14488075, by cDNA: gi_20147320 [Arabidopsis thaliana]
  misc_feature (50)..(235): Homolog of NCBI NO: 37813067 NR Description: eukaryotic translation initiation factor 4E
  misc_feature (37)..(237): Homolog of NCBI NO: 7862169 NR Description: eIF4E [Lycopersicon esculentum]
  misc_feature (9)..(237): Homolog of NCBI NO: 25176242 NR Description: eucaryotic initiation factor 4E [Capsicum annuum]
  misc_feature (9)..(237): Homolog of NCBI NO: 38565045 NR Description: eukaryotic translation initiation factor 4E
  misc_feature (9)..(237): Homolog of NCBI NO: 25176246 NR Description: eucaryotic initiation factor 4E [Capsicum annuum]
MDSPVSGRMADQNIDPNTTTSPSPIEKHVSAIKAISGDEKAPSKEKKNYASKKSTTVIQKSHCFQNSWTFWFDNPSSKSNQVIWGSSLRSLYTFATIEEFWSLYNNIHPPTKWVSGSDLYCFKDKIEPKWEDPICANGGKWTMFFPRATLESNWLNTLLALVGEQFDQGDEICGAVLNFRTRGDRISLWTKKAANEEAQLSIGKQWKELLGYNDTIGFIVHEDAKTLDRDAKRRYTV

SEQ ID NO: 71718 - DNA, 936 bp, Arabidopsis thaliana
  misc_feature (1)..(936): Ceres Seq. ID no. 4808982
  misc_feature: MA Experiment ID: 20000227 Result: Down-regulated in Transcription
  misc_feature: MA Experiment 20000227 PARAMETER Experiment Name: At_Root-Tips-vs-Tops_P Parameter: Tissue Value: Root Tips vs. Root Tops
atgggatcatttttaggacatgttttgccaggttttgccttcgtagcacttggcttatggcacttattcaacaacataaaactcttttgtctccatccaaacacattcagttcatcaacatggttcccaatttcaaagctcagacacttagagctctacttaatcatgctatcttcaacagcctccatatccatggagctcttcattggacctagaagacaccatccctttgacgtcgatggtaccatcccatcgaaccacctccacaacttcgaacattcttccatctccatgtccttcttagtctatgccgttttggcattagtcctggatcgagcacggcctagagccgccgcttctgaggggctaaccatgctagctgcagccgctgccttcagtcaacagctacttctctttcattttcactctaccgaccacatgggcgttgagggacaatatcatgtgattctacaagtcgttatcttcgtctctctccttaccacaatcatgggtattttcttgcccaagagttttctggtgagccttgtgagatcttcaagcatagcctttcaaggcgtgtggctcattgtgattggttgcatgctttacacaccgagtttgatccccaagggatgttatattcacgatgaaggaagacacataatagttaagtgttccaccgaagaagctcttcacagagctaagtcgttggtcaacctcgaattcagttggctatttgttacaaacacactatttgttgtcacactatatttgattctcgatcgtgtttacggtgaaaacgtagagtactctagtctaaccaccaataatcaaacataccaagatgatgaagaacaacacttcgaatcgaagtcgactcagaaaacaagttttgtccaaatgggtaaactcgttggacatgggcagaaaatgtga

SEQ ID NO: 71719 - protein, 311 aa, Arabidopsis thaliana
  peptide (1)..(311): Ceres Seq. ID no. 4808983
  misc_feature (111)..(268): Pfam Name: Family of unknown function (DUF716) Pfam Description: Family of unknown function (DUF716)
  misc_feature (1)..(311): Homolog of NCBI NO: 30695897 NR Description: expressed protein [Arabidopsis thaliana]
  misc_feature (65)..(311): Homolog of NCBI NO: 25405807 NR Description: unknown protein, 73214-72236 [imported] -
  misc_feature (1)..(298): Homolog of NCBI NO: 15222675 NR Description: unknown protein; protein id: At1g55230.1
  misc_feature (1)..(277): Homolog of NCBI NO: 15241195 NR Description: putative protein; protein id: At5g19870.1
  misc_feature (1)..(260): Homolog of NCBI NO: 18402650 NR Description: expressed protein; protein id: At1g49470.1, by cDNA: 95546. [Arabidopsis thaliana] >gi|25405312|pir||C96531
  misc_feature (1)..(258): Homolog of NCBI NO: 21618061 NR Description: unknown [Arabidopsis thaliana]
  misc_feature (1)..(246): Homolog of NCBI NO: 32470632 NR Description: putative plant viral-response family protein bulbocastanum] >gi|32470663|gb|AAP45189.1| hypothetical protein
  misc_feature (1)..(247): Homolog of NCBI NO: 4680504 NR Description: hypothetical protein [Oryza sativa]
  misc_feature (1)..(265): Homolog of NCBI NO: 22208473 NR Description: hypothetical protein [Sorghum bicolor]
  misc_feature (1)..(247): Homolog of NCBI NO: 4680337 NR Description: hypothetical protein [Oryza sativa subsp. indica]
MGSFLGHVLPGFAFVALGLWHLFNNIKLFCLHPNTFSSSTWFPISKLRHLELYLIMLSSTASISMELFIGPRRHHPFDVDGTIPSNHLHNFEHSSISMSFLVYAVLALVLDRARPRAAASEGLTMLAAAAAFSQQLLLFHFHSTDHMGVEGQYHVILQVVIFVSLLTTIMGIFLPKSFLVSLVRSSSIAFQGVWLIVIGCMLYTPSLIPKGCYIHDEGRHIIVKCSTEEALHRAKSLVNLEFSWLFVTNTLFVVTLYLILDRVYGENVEYSSLTTNNQTYQDDEEQHFESKSTQKTSFVQMGKLVGHGQKM

SEQ ID NO: 71720 - protein, 256 aa, Arabidopsis thaliana
  peptide (1)..(256): Ceres Seq. ID no. 4808984
  misc_feature (56)..(213): Pfam Name: Family of unknown function (DUF716) Pfam Description: Family of unknown function (DUF716)
  misc_feature (1)..(256): Homolog of NCBI NO: 30695897 NR Description: expressed protein [Arabidopsis thaliana]
  misc_feature (10)..(256): Homolog of NCBI NO: 25405807 NR Description: unknown protein, 73214-72236 [imported] -
  misc_feature (1)..(243): Homolog of NCBI NO: 15222675 NR Description: unknown protein; protein id: At1g55230.1
  misc_feature (1)..(222): Homolog of NCBI NO: 15241195 NR Description: putative protein; protein id: At5g19870.1
  misc_feature (1)..(205): Homolog of NCBI NO: 18402650 NR Description: expressed protein; protein id: At1g49470.1, by cDNA: 95546. [Arabidopsis thaliana] >gi|25405312|pir||C96531
  misc_feature (1)..(203): Homolog of NCBI NO: 21618061 NR Description: unknown [Arabidopsis thaliana]
  misc_feature (1)..(191): Homolog of NCBI NO: 32470632 NR Description: putative plant viral-response family protein bulbocastanum] >gi|32470663|gb|AAP45189.1| hypothetical protein
  misc_feature (1)..(192): Homolog of NCBI NO: 4680504 NR Description: hypothetical protein [Oryza sativa]
  misc_feature (1)..(210): Homolog of NCBI NO: 22208473 NR Description: hypothetical protein [Sorghum bicolor]
  misc_feature (1)..(192): Homolog of NCBI NO: 4680337 NR Description: hypothetical protein [Oryza sativa subsp. indica]
MLSSTASISMELFIGPRRHHPFDVDGTIPSNHLHNFEHSSISMSFLVYAVLALVLDRARPRAAASEGLTMLAAAAAFSQQLLLFHFHSTDHMGVEGQYHVILQVVIFVSLLTTIMGIFLPKSFLVSLVRSSSIAFQGVWLIVIGCMLYTPSLIPKGCYIHDEGRHIIVKCSTEEALHRAKSLVNLEFSWLFVTNTLFVVTLYLILDRVYGENVEYSSLTTNNQTYQDDEEQHFESKSTQKTSFVQMGKLVGHGQKM

SEQ ID NO: 71721 - protein, 247 aa, Arabidopsis thaliana
  peptide (1)..(247): Ceres Seq. ID no. 4808985
  misc_feature (47)..(204): Pfam Name: Family of unknown function (DUF716) Pfam Description: Family of unknown function (DUF716)
  misc_feature (1)..(196): Homolog of NCBI NO: 18402650 NR Description: expressed protein; protein id: At1g49470.1, by cDNA: 95546. [Arabidopsis thaliana] >gi|25405312|pir||C96531
  misc_feature (1)..(194): Homolog of NCBI NO: 21618061 NR Description: unknown [Arabidopsis thaliana]
  misc_feature (1)..(182): Homolog of NCBI NO: 32470632 NR Description: putative plant viral-response family protein bulbocastanum] >gi|32470663|gb|AAP45189.1| hypothetical protein
  misc_feature (1)..(247): Homolog of NCBI NO: 30695897 NR Description: expressed protein [Arabidopsis thaliana]
  misc_feature (1)..(234): Homolog of NCBI NO: 15222675 NR Description: unknown protein; protein id: At1g55230.1
  misc_feature (1)..(213): Homolog of NCBI NO: 15241195 NR Description: putative protein; protein id: At5g19870.1
  misc_feature (1)..(247): Homolog of NCBI NO: 25405807 NR Description: unknown protein, 73214-72236 [imported] -
  misc_feature (1)..(183): Homolog of NCBI NO: 4680504 NR Description: hypothetical protein [Oryza sativa]
  misc_feature (1)..(201): Homolog of NCBI NO: 22208473 NR Description: hypothetical protein [Sorghum bicolor]
  misc_feature (1)..(183): Homolog of NCBI NO: 4680337 NR Description: hypothetical protein [Oryza sativa subsp. indica]
MELFIGPRRHHPFDVDGTIPSNHLHNFEHSSISMSFLVYAVLALVLDRARPRAAASEGLTMLAAAAAFSQQLLLFHFHSTDHMGVEGQYHVILQVVIFVSLLTTIMGIFLPKSFLVSLVRSSSIAFQGVWLIVIGCMLYTPSLIPKGCYIHDEGRHIIVKCSTEEALHRAKSLVNLEFSWLFVTNTLFVVTLYLILDRVYGENVEYSSLTTNNQTYQDDEEQHFESKSTQKTSFVQMGKLVGHGQKM

SEQ ID NO: 71722 - DNA, 2079 bp, Arabidopsis thaliana
  misc_feature (1)..(2079): Ceres Seq. ID no. 4809107
  misc_feature: MA Experiment ID: 20000180 Result: Up-regulated in Transcription
  misc_feature: MA Experiment 20000180 PARAMETER Experiment Name: At_Germinating_Seeds_P Parameter: Age (hr) Value: 24 vs. 0
  misc_feature: MA Experiment 20000180 PARAMETER Experiment Name: At_Germinating_Seeds_P Parameter: Tissue Value: Germinating Seeds
  misc_feature: MA Experiment ID: 20000234 Result: Up-regulated in Transcription
  misc_feature: MA Experiment 20000234 PARAMETER Experiment Name: At_Siliques_P Parameter: Age (day) Value: 21
  misc_feature: MA Experiment 20000234 PARAMETER Experiment Name: At_Siliques_P Parameter: Organism Value: A. thaliana
  misc_feature: MA Experiment 20000234 PARAMETER Experiment Name: At_Siliques_P Parameter: Plant Line Value: WS
  misc_feature: MA Experiment 20000234 PARAMETER Experiment Name: At_Siliques_P Parameter: Tissue Value: Less Than 5mm Siliques vs. Whole Plant
  misc_feature: MA Experiment ID: 20000264 Result: Up-regulated in Transcription
  misc_feature: MA Experiment 20000264 PARAMETER Experiment Name: At_Open_Flower_P Parameter: Age (day) Value: 21
  misc_feature: MA Experiment 20000264 PARAMETER Experiment Name: At_Open_Flower_P Parameter: Plant Line Value: WS
  misc_feature: MA Experiment 20000264 PARAMETER Experiment Name: At_Open_Flower_P Parameter: Tissue Value: Open Flower vs. Whole Plant
  misc_feature: MA Experiment ID: 20000265 Result: Up-regulated in Transcription
  misc_feature: MA Experiment 20000265 PARAMETER Experiment Name: At_Open_Flower_P Parameter: Age (day) Value: 21
  misc_feature: MA Experiment 20000265 PARAMETER Experiment Name: At_Open_Flower_P Parameter: Plant Line Value: WS
  misc_feature: MA Experiment 20000265 PARAMETER Experiment Name: At_Open_Flower_P Parameter: Tissue Value: Closed Flower vs. Whole Plant
  misc_feature: MA Experiment ID: 20000286 Result: Up-regulated in Transcription
  misc_feature: MA Experiment 20000286 PARAMETER Experiment Name: At_Open_Flower_P Parameter: Age (day) Value: 21
  misc_feature: MA Experiment 20000286 PARAMETER Experiment Name: At_Open_Flower_P Parameter: Plant Line Value: WS
  misc_feature: MA Experiment 20000286 PARAMETER Experiment Name: At_Open_Flower_P Parameter: Tissue Value: Half Open vs. Whole Plant
  misc_feature: MA Experiment ID: 20000437 Result: Down-regulated in Transcription
  misc_feature: MA Experiment 20000437 PARAMETER Experiment Name: At_Drought_P Parameter: Age (day) Value: 8
  misc_feature: MA Experiment 20000437 PARAMETER Experiment Name: At_Drought_P Parameter: Organism Value: A. thaliana
  misc_feature: MA Experiment 20000437 PARAMETER Experiment Name: At_Drought_P Parameter: Plant Line Value: WS
  misc_feature: MA Experiment 20000437 PARAMETER Experiment Name: At_Drought_P Parameter: Timepoint (hr) Value: 24
  misc_feature: MA Experiment 20000437 PARAMETER Experiment Name: At_Drought_P Parameter: Tissue Value: Whole Plant
  misc_feature: MA Experiment 20000437 PARAMETER Experiment Name: At_Drought_P Parameter: Treatment Value: Drought vs. No Drought
  misc_feature: MA Experiment ID: 20000495 Result: Up-regulated in Transcription
  misc_feature: MA Experiment 20000495 PARAMETER Experiment Name: At_Guard_Cells_P Parameter: Harvest Date Value: 8/2/2002
  misc_feature: MA Experiment 20000495 PARAMETER Experiment Name: At_Guard_Cells_P Parameter: Organism Value: A. thaliana
  misc_feature: MA Experiment 20000495 PARAMETER Experiment Name: At_Guard_Cells_P Parameter: Tissue Value: Guard Cells vs. Leaves
atggcaaaccggaatggtgaaccgggtttacagcaactctcaagtctgtttatccagcaacttcgaggtcgttcttcagtagtctctgttcgtgatgataggatgttggcaggttgttcgagttcatcattgttgtcgcctactcgaagattgaggagtgaagcagtagcagcaacatcagcaacagtatcagcgcattttcccatgaacacacagagattggacttaccatgcagtagtagcttctctcgcaaggaaactccttctagcagaccacttggaagaagcatctctcttgacaacagcaacaacaacaacaacaaaccgatcgagcgcaagacgaagaccagtggttgttcgcttaaacagaacataaagcttccacctttggcaacaacaagaggaaatggagaagggttttcttggaacaacgacaacaacaacagagggaagagtttgaagagattagctgaggaggacgagtcttgtttgagcagagcgaagaggacaaaatgcgaaaacgaaggtggtttctggtttgagcatttcactggccaggattcttcttcaccagcattacctttttctttgacttgttcaggtgatgatgaggaaaaggtttgctttgtgccaagtgaagtcatttctcagcctttaccaaactgggttgattcggtgattacggagctagctggtataggcgataaggacgttgagagtagccttcctgcagcagttaaggaagcatctggaggatcatctacaagcgcatcatccgagagtcgtagcttaagccatagagtaccagaacctacaaatggctcaaggaatccgtactcacaccgcggtgcaacagaggaaaggaccaccggaaacatcaacaacaacaacaacaggaacgatttgcagagggatttcgagcttgtcaatttgcttacgggatgcttagacgcgatcagatcaagaaacatagcagcgattaaccatttcattgcaagaaccggtgatcttgcttctcctagaggaagaacaccaatgactcgcctcatagcttactacattgaagctttggctctaagagtggcgcgtatgtggcctcacatcttccacatcgcaccccctcgtgaattcgatagaactgtcgaagatgaatcaggaaatgcattgaggttcttgaatcaagtaaccccaattccaaagttcattcatttcacagccaacgagatgttactcagagcatttgaagggaaagagagagttcacattattgacttcgacatcaagcaaggtttacagtggcctagcttcttccaaagcttagcttcgagaataaatccaccacaccatgtacgaatcactgggatcggagaatcgaaacttgagctaaacgaaaccggagatcgcctccacggatttgcagaggcgatgaatcttcaattcgagtttcatcctgtagttgatagactcgaagacgttagactatggatgcttcacgtcaaagaaggtgaatcagtagctgtaaactgtgtcatgcagatgcacaagacactctacgatggaaccggagcagcaattagggattttttgggtttaatcagaagcacaaacccaatagctctcgttcttgcggagcaagaagcagaacacaactcagagcaacttgagacacgagtttgtaactcgctaaagtactattcagctatgtttgatgcaattcacacgaatcttgctacagatagcttaatgagagtcaaagttgaggagatgttgtttgggagagagatcaggaacattgttgcgtgtgaaggaagtcatagacaagagaggcatgtgggttttcgtcattggaggaggatgttggagcagttagggtttcggagtcttggagtctcggagagagaggttttgcagagtaagatgttgcttaggatgtacggatctgataatgaagggtttttcaatgtggagaggagcgatgaagacaacggcggtgaaggcggacgcggcggtggagttactttacggtggtcggagcagccactttatacgatctcggcttggactaccggagggaattaa

SEQ ID NO: 71723 - protein, 692 aa, Arabidopsis thaliana
  peptide (1)..(692): Ceres Seq. ID no. 4809108
  misc_feature (282)..(584): Pfam Name: GRAS family transcription factor Pfam Description: GRAS family transcription factor
  misc_feature (307)..(692): Homolog of NCBI NO: 34898036 NR Description: Similar to SCARECROW (U62798) [Oryza sativa
  misc_feature (212)..(687): Homolog of NCBI NO: 15529230 NR Description: At2g01570/F2I9.19 [Arabidopsis thaliana]
  misc_feature (205)..(692): Homolog of NCBI NO: 2569938 NR Description: GAI [Arabidopsis thaliana]
  misc_feature (205)..(692): Homolog of NCBI NO: 15223951 NR Description: signal response protein (GAI); protein id: supported by cDNA: gi_16648833 [Arabidopsis thaliana]
  misc_feature (205)..(692): Homolog of NCBI NO: 2339980 NR Description: RGA2 protein [Arabidopsis thaliana]
  misc_feature (252)..(687): Homolog of NCBI NO: 4160441 NR Description: lateral suppressor protein [Lycopersicon >gi|13620224|emb|CAC36399.1| lateral suppressor [Lycopersicon
  misc_feature (212)..(687): Homolog of NCBI NO: 2569940 NR Description: GRS protein [Arabidopsis thaliana]
  misc_feature (212)..(687): Homolog of NCBI NO: 15226311 NR Description: putative RGA1, giberellin repsonse modulation protein id: At2g01570.1, supported by cDNA: gi_15529229, by cDNA: gi_15809785 [Arabidopsis thaliana]
  misc_feature (243)..(663): Homolog of NCBI NO: 15232451 NR Description: SCARECROW1; protein id: At3g54220.1, supported by gi_19423877, supported by cDNA: gi_21281200 [Arabidopsis
  misc_feature (212)..(687): Homolog of NCBI NO: 2339978 NR Description: RGA1 protein [Arabidopsis thaliana]
MANRNGEPGLQQLSSLFIQQLRGRSSVVSVRDDRMLAGCSSSSLLSPTRRLRSEAVAATSATVSAHFPMNTQRLDLPCSSSFSRKETPSSRPLGRSISLDNSNNNNNKPIERKTKTSGCSLKQNIKLPPLATTRGNGEGFSWNNDNNNRGKSLKRLAEEDESCLSRAKRTKCENEGGFWFEHFTGQDSSSPALPFSLTCSGDDEEKVCFVPSEVISQPLPNWVDSVITELAGIGDKDVESSLPAAVKEASGGSSTSASSESRSLSHRVPEPTNGSRNPYSHRGATEERTTGNINNNNNRNDLQRDFELVNLLTGCLDAIRSRNIAAINHFIARTGDLASPRGRTPMTRLIAYYIEALALRVARMWPHIFHIAPPREFDRTVEDESGNALRFLNQVTPIPKFIHFTANEMLLRAFEGKERVHIIDFDIKQGLQWPSFFQSLASRINPPHHVRITGIGESKLELNETGDRLHGFAEAMNLQFEFHPVVDRLEDVRLWMLHVKEGESVAVNCVMQMHKTLYDGTGAAIRDFLGLIRSTNPIALVLAEQEAEHNSEQLETRVCNSLKYYSAMFDAIHTNLATDSLMRVKVEEMLFGREIRNIVACEGSHRQERHVGFRHWRRMLEQLGFRSLGVSEREVLQSKMLLRMYGSDNEGFFNVERSDEDNGGEGGRGGGVTLRWSEQPLYTISAWTTGGN

SEQ ID NO: 71724 - protein, 658 aa, Arabidopsis thaliana
  peptide (1)..(658): Ceres Seq. ID no. 4809109
  misc_feature (248)..(550): Pfam Name: GRAS family transcription factor Pfam Description: GRAS family transcription factor
  misc_feature (273)..(658): Homolog of NCBI NO: 34898036 NR Description: Similar to SCARECROW (U62798) [Oryza sativa
  misc_feature (178)..(653): Homolog of NCBI NO: 15529230 NR Description: At2g01570/F2I9.19 [Arabidopsis thaliana]
  misc_feature (171)..(658): Homolog of NCBI NO: 2569938 NR Description: GAI [Arabidopsis thaliana]
  misc_feature (171)..(658): Homolog of NCBI NO: 15223951 NR Description: signal response protein (GAI); protein id: supported by cDNA: gi_16648833 [Arabidopsis thaliana]
  misc_feature (171)..(658): Homolog of NCBI NO: 2339980 NR Description: RGA2 protein [Arabidopsis thaliana]
  misc_feature (218)..(653): Homolog of NCBI NO: 4160441 NR Description: lateral suppressor protein [Lycopersicon >gi|13620224|emb|CAC36399.1| lateral suppressor [Lycopersicon
  misc_feature (178)..(653): Homolog of NCBI NO: 2569940 NR Description: GRS protein [Arabidopsis thaliana]
  misc_feature (178)..(653): Homolog of NCBI NO: 15226311 NR Description: putative RGA1, giberellin repsonse modulation protein id: At2g01570.1, supported by cDNA: gi_15529229, by cDNA: gi_15809785 [Arabidopsis thaliana]
  misc_feature (209)..(629): Homolog of NCBI NO: 15232451 NR Description: SCARECROW1; protein id: At3g54220.1, supported by gi_19423877, supported by cDNA: gi_21281200 [Arabidopsis
  misc_feature (178)..(653): Homolog of NCBI NO: 2339978 NR Description: RGA1 protein [Arabidopsis thaliana]
MLAGCSSSSLLSPTRRLRSEAVAATSATVSAHFPMNTQRLDLPCSSSFSRKETPSSRPLGRSISLDNSNNNNNKPIERKTKTSGCSLKQNIKLPPLATTRGNGEGFSWNNDNNNRGKSLKRLAEEDESCLSRAKRTKCENEGGFWFEHFTGQDSSSPALPFSLTCSGDDEEKVCFVPSEVISQPLPNWVDSVITELAGIGDKDVESSLPAAVKEASGGSSTSASSESRSLSHRVPEPTNGSRNPYSHRGATEERTTGNINNNNNRNDLQRDFELVNLLTGCLDAIRSRNIAAINHFIARTGDLASPRGRTPMTRLIAYYIEALALRVARMWPHIFHIAPPREFDRTVEDESGNALRFLNQVTPIPKFIHFTANEMLLRAFEGKERVHIIDFDIKQGLQWPSFFQSLASRINPPHHVRITGIGESKLELNETGDRLHGFAEAMNLQFEFHPVVDRLEDVRLWMLHVKEGESVAVNCVMQMHKTLYDGTGAAIRDFLGLIRSTNPIALVLAEQEAEHNSEQLETRVCNSLKYYSAMFDAIHTNLATDSLMRVKVEEMLFGREIRNIVACEGSHRQERHVGFRHWRRMLEQLGFRSLGVSEREVLQSKMLLRMYGSDNEGFFNVERSDEDNGGEGGRGGGVTLRWSEQPLYTISAWTTGGN

SEQ ID NO: 71725 - protein, 624 aa, Arabidopsis thaliana
  peptide (1)..(624): Ceres Seq. ID no. 4809110
  misc_feature (214)..(516): Pfam Name: GRAS family transcription factor Pfam Description: GRAS family transcription factor
  misc_feature (239)..(624): Homolog of NCBI NO: 34898036 NR Description: Similar to SCARECROW (U62798) [Oryza sativa
  misc_feature (144)..(619): Homolog of NCBI NO: 15529230 NR Description: At2g01570/F2I9.19 [Arabidopsis thaliana]
  misc_feature (137)..(624): Homolog of NCBI NO: 2569938 NR Description: GAI [Arabidopsis thaliana]
  misc_feature (137)..(624): Homolog of NCBI NO: 15223951 NR Description: signal response protein (GAI); protein id: supported by cDNA: gi_16648833 [Arabidopsis thaliana]
  misc_feature (137)..(624): Homolog of NCBI NO: 2339980 NR Description: RGA2 protein [Arabidopsis thaliana]
  misc_feature (184)..(619): Homolog of NCBI NO: 4160441 NR Description: lateral suppressor protein [Lycopersicon >gi|13620224|emb|CAC36399.1| lateral suppressor [Lycopersicon
  misc_feature (144)..(619): Homolog of NCBI NO: 2569940 NR Description: GRS protein [Arabidopsis thaliana]
  misc_feature (144)..(619): Homolog of NCBI NO: 15226311 NR Description: putative RGA1, giberellin repsonse modulation protein id: At2g01570.1, supported by cDNA: gi_15529229, by cDNA: gi_15809785 [Arabidopsis thaliana]
  misc_feature (175)..(595): Homolog of NCBI NO: 15232451 NR Description: SCARECROW1; protein id: At3g54220.1, supported by gi_19423877, supported by cDNA: gi_21281200 [Arabidopsis
  misc_feature (144)..(619): Homolog of NCBI NO: 2339978 NR Description: RGA1 protein [Arabidopsis thaliana]
MNTQRLDLPCSSSFSRKETPSSRPLGRSISLDNSNNNNNKPIERKTKTSGCSLKQNIKLPPLATTRGNGEGFSWNNDNNNRGKSLKRLAEEDESCLSRAKRTKCENEGGFWFEHFTGQDSSSPALPFSLTCSGDDEEKVCFVPSEVISQPLPNWVDSVITELAGIGDKDVESSLPAAVKEASGGSSTSASSESRSLSHRVPEPTNGSRNPYSHRGATEERTTGNINNNNNRNDLQRDFELVNLLTGCLDAIRSRNIAAINHFIARTGDLASPRGRTPMTRLIAYYIEALALRVARMWPHIFHIAPPREFDRTVEDESGNALRFLNQVTPIPKFIHFTANEMLLRAFEGKERVHIIDFDIKQGLQWPSFFQSLASRINPPHHVRITGIGESKLELNETGDRLHGFAEAMNLQFEFHPVVDRLEDVRLWMLHVKEGESVAVNCVMQMHKTLYDGTGAAIRDFLGLIRSTNPIALVLAEQEAEHNSEQLETRVCNSLKYYSAMFDAIHTNLATDSLMRVKVEEMLFGREIRNIVACEGSHRQERHVGFRHWRRMLEQLGFRSLGVSEREVLQSKMLLRMYGSDNEGFFNVERSDEDNGGEGGRGGGVTLRWSEQPLYTISAWTTGGN

SEQ ID NO: 71726 - DNA, 1272 bp, Arabidopsis thaliana
  misc_feature (1)..(1272): Ceres Seq. ID no. 4809357
  misc_feature: MA Experiment ID: 20000437 Result: Down-regulated in Transcription
  misc_feature: MA Experiment 20000437 PARAMETER Experiment Name: At_Drought_P Parameter: Age (day) Value: 8
  misc_feature: MA Experiment 20000437 PARAMETER Experiment Name: At_Drought_P Parameter: Organism Value: A. thaliana
  misc_feature: MA Experiment 20000437 PARAMETER Experiment Name: At_Drought_P Parameter: Plant Line Value: WS
  misc_feature: MA Experiment 20000437 PARAMETER Experiment Name: At_Drought_P Parameter: Timepoint (hr) Value: 24
  misc_feature: MA Experiment 20000437 PARAMETER Experiment Name: At_Drought_P Parameter: Tissue Value: Whole Plant
  misc_feature: MA Experiment 20000437 PARAMETER Experiment Name: At_Drought_P Parameter: Treatment Value: Drought vs. No Drought
  misc_feature: MA Experiment ID: 20001558 Result: Up-regulated in Transcription
  misc_feature: MA Experiment 20001558 PARAMETER Experiment Name: At_Drought_Soil_Dry_P Parameter: Age (day) Value: 27
  misc_feature: MA Experiment 20001558 PARAMETER Experiment Name: At_Drought_Soil_Dry_P Parameter: Organism Value: A. thaliana
  misc_feature: MA Experiment 20001558 PARAMETER Experiment Name: At_Drought_Soil_Dry_P Parameter: Plant Line Value: WS
  misc_feature: MA Experiment 20001558 PARAMETER Experiment Name: At_Drought_Soil_Dry_P Parameter: Post Timepoint (hr) Value: 6
  misc_feature: MA Experiment 20001558 PARAMETER Experiment Name: At_Drought_Soil_Dry_P Parameter: Post-Treatment Value: Re-Water vs. No Drought
  misc_feature: MA Experiment 20001558 PARAMETER Experiment Name: At_Drought_Soil_Dry_P Parameter: Timepoint (day) Value: 13
  misc_feature: MA Experiment 20001558 PARAMETER Experiment Name: At_Drought_Soil_Dry_P Parameter: Treatment Value: Drought vs. No Drought
atgaagaatccagaaaaacccttacttctgtttctaattttagcttcaagcttagcatcaatggcgactgcaaaatccacaatagagccttgctccagtaaagacacttgtaactcattgctaggctacactctctacaccgacctcaaagtcacagaagtcgcttctctcttccaagtagacccagtttcaatgcttttgtctaactccattgatatctcttacccagacgtcgagaaccatgtccttcccgctaagctcttcctcaagatcccaatcacttgctcctgtgtcgacggaatcagaaaatccctctcgactcattacaagactcgtacttctgacacactaggatcgattgctgactctgtttacggtggtctggtctctccggagcagattcaggtcgcgaattcagagactgacctttcggttctcgatgtaggtacaaagcttgtgattccattgccttgcgcttgcttcaatggtaccgatgaatctcttccggcgctttatctatcttacgttgtgagaggaatcgacactatggctggaatcgcaaagagattctcgacctctgttactgatttaacaaacgtgaatgctatgggagctcctgatatcaatcctggtgatatcctcgctgtcccattgctagcttgtagttcaaatttccccaaatacgctacggattacggattaatcattccaaatggaagctatgctctcactgcaggccactgtgtacaatgcagctgtgttctcggaagccgaagtatgtattgtgagcctgcttctatatcagtctcttgttccagtatgagatgtagaaacagcaacttcatgcttggtaacattacttcgcagcagagtagctccggttgtaaacttactacttgtagttacaacggtttcgctagcggcactatcttgaccacgttgtccatgtctcttcaacctcgatgccctggaccgcaacaattagcaccgcttatagccccgcctgataatgttccaaaggaactgatgtatctaccttcaccttcaccttcgccatcaccagagtttgatgatattgctggtggaggatcatctatagccgcagtccccgcggcttcacctggaggagctacggtttcttcaagcaattcaatcccgggtaatccagctaatggtccaggcggaagtatttctatagcttcttgtccattgagctattactcattcattgcgttactcatccccattggttcttgcttttttgttttctaa

SEQ ID NO: 71727 - protein, 423 aa, Arabidopsis thaliana
  peptide (1)..(423): Ceres Seq. ID no. 4809358
  misc_feature (109)..(155): Pfam Name: LysM domain Pfam Description: LysM domain
  misc_feature (1)..(423): Homolog of NCBI NO: 30699276 NR Description: expressed protein [Arabidopsis thaliana]
  misc_feature (1)..(423): Homolog of NCBI NO: 25406518 NR Description: unknown protein T5M16.22 [imported] - Arabidopsis
  misc_feature (1)..(418): Homolog of NCBI NO: 18395044 NR Description: expressed protein; protein id: At1g21880.1, by cDNA: gi_15982869 [Arabidopsis thaliana]
  misc_feature (1)..(312): Homolog of NCBI NO: 30687570 NR Description: expressed protein [Arabidopsis thaliana]
  misc_feature (8)..(329): Homolog of NCBI NO: 28207683 NR Description: Erwinia induced protein 1 [Solanum tuberosum]
  misc_feature (9)..(337): Homolog of NCBI NO: 18398317 NR Description: expressed protein; protein id: At2g17120.1, by cDNA: 6280., supported by cDNA: gi_15810364, supported by
  misc_feature (9)..(333): Homolog of NCBI NO: 21593990 NR Description: unknown [Arabidopsis thaliana]
  misc_feature (1)..(322): Homolog of NCBI NO: 22758281 NR Description: Unknown protein [Oryza sativa (japonica
  misc_feature (8)..(204): Homolog of NCBI NO: 37651074 NR Description: Nod-factor receptor 5 [Lotus corniculatus var.
MKNPEKPLLLFLILASSLASMATAKSTIEPCSSKDTCNSLLGYTLYTDLKVTEVASLFQVDPVSMLLSNSIDISYPDVENHVLPAKLFLKIPITCSCVDGIRKSLSTHYKTRTSDTLGSIADSVYGGLVSPEQIQVANSETDLSVLDVGTKLVIPLPCACFNGTDESLPALYLSYVVRGIDTMAGIAKRFSTSVTDLTNVNAMGAPDINPGDILAVPLLACSSNFPKYATDYGLIIPNGSYALTAGHCVQCSCVLGSRSMYCEPASISVSCSSMRCRNSNFMLGNITSQQSSSGCKLTTCSYNGFASGTILTTLSMSLQPRCPGPQQLAPLIAPPDNVPKELMYLPSPSPSPSPEFDDIAGGGSSIAAVPAASPGGATVSSSNSIPGNPANGPGGSISIASCPLSYYSFIALLIPIGSCFFVF

SEQ ID NO: 71728 - protein, 403 aa, Arabidopsis thaliana
  peptide (1)..(403): Ceres Seq. ID no. 4809359
  misc_feature (89)..(135): Pfam Name: LysM domain Pfam Description: LysM domain
  misc_feature (1)..(403): Homolog of NCBI NO: 30699276 NR Description: expressed protein [Arabidopsis thaliana]
  misc_feature (1)..(403): Homolog of NCBI NO: 25406518 NR Description: unknown protein T5M16.22 [imported] - Arabidopsis
  misc_feature (1)..(398): Homolog of NCBI NO: 18395044 NR Description: expressed protein; protein id: At1g21880.1, by cDNA: gi_15982869 [Arabidopsis thaliana]
  misc_feature (1)..(292): Homolog of NCBI NO: 30687570 NR Description: expressed protein [Arabidopsis thaliana]
  misc_feature (1)..(309): Homolog of NCBI NO: 28207683 NR Description: Erwinia induced protein 1 [Solanum tuberosum]
  misc_feature (1)..(317): Homolog of NCBI NO: 18398317 NR Description: expressed protein; protein id: At2g17120.1, by cDNA: 6280., supported by cDNA: gi_15810364, supported by
  misc_feature (1)..(313): Homolog of NCBI NO: 21593990 NR Description: unknown [Arabidopsis thaliana]
  misc_feature (1)..(302): Homolog of NCBI NO: 22758281 NR Description: Unknown protein [Oryza sativa (japonica
  misc_feature (1)..(184): Homolog of NCBI NO: 37651074 NR Description: Nod-factor receptor 5 [Lotus corniculatus var.
MATAKSTIEPCSSKDTCNSLLGYTLYTDLKVTEVASLFQVDPVSMLLSNSIDISYPDVENHVLPAKLFLKIPITCSCVDGIRKSLSTHYKTRTSDTLGSIADSVYGGLVSPEQIQVANSETDLSVLDVGTKLVIPLPCACFNGTDESLPALYLSYVVRGIDTMAGIAKRFSTSVTDLTNVNAMGAPDINPGDILAVPLLACSSNFPKYATDYGLIIPNGSYALTAGHCVQCSCVLGSRSMYCEPASISVSCSSMRCRNSNFMLGNITSQQSSSGCKLTTCSYNGFASGTILTTLSMSLQPRCPGPQQLAPLIAPPDNVPKELMYLPSPSPSPSPEFDDIAGGGSSIAAVPAASPGGATVSSSNSIPGNPANGPGGSISIASCPLSYYSFIALLIPIGSCFFVF

SEQ ID NO: 71729 - protein, 359 aa, Arabidopsis thaliana
  peptide (1)..(359): Ceres Seq. ID no. 4809360
  misc_feature (45)..(91): Pfam Name: LysM domain Pfam Description: LysM domain
  misc_feature (1)..(359): Homolog of NCBI NO: 30699276 NR Description: expressed protein [Arabidopsis thaliana]
  misc_feature (1)..(359): Homolog of NCBI NO: 25406518 NR Description: unknown protein T5M16.22 [imported] - Arabidopsis
  misc_feature (1)..(354): Homolog of NCBI NO: 18395044 NR Description: expressed protein; protein id: At1g21880.1, by cDNA: gi_15982869 [Arabidopsis thaliana]
  misc_feature (1)..(248): Homolog of NCBI NO: 30687570 NR Description: expressed protein [Arabidopsis thaliana]
  misc_feature (1)..(265): Homolog of NCBI NO: 28207683 NR Description: Erwinia induced protein 1 [Solanum tuberosum]
  misc_feature (1)..(273): Homolog of NCBI NO: 18398317 NR Description: expressed protein; protein id: At2g17120.1, by cDNA: 6280., supported by cDNA: gi_15810364, supported by
  misc_feature (1)..(269): Homolog of NCBI NO: 21593990 NR Description: unknown [Arabidopsis thaliana]
  misc_feature (1)..(258): Homolog of NCBI NO: 22758281 NR Description: Unknown protein [Oryza sativa (japonica
  misc_feature (1)..(140): Homolog of NCBI NO: 37651074 NR Description: Nod-factor receptor 5 [Lotus corniculatus var.
MLLSNSIDISYPDVENHVLPAKLFLKIPITCSCVDGIRKSLSTHYKTRTSDTLGSIADSVYGGLVSPEQIQVANSETDLSVLDVGTKLVIPLPCACFNGTDESLPALYLSYVVRGIDTMAGIAKRFSTSVTDLTNVNAMGAPDINPGDILAVPLLACSSNFPKYATDYGLIIPNGSYALTAGHCVQCSCVLGSRSMYCEPASISVSCSSMRCRNSNFMLGNITSQQSSSGCKLTTCSYNGFASGTILTTLSMSLQPRCPGPQQLAPLIAPPDNVPKELMYLPSPSPSPSPEFDDIAGGGSSIAAVPAASPGGATVSSSNSIPGNPANGPGGSISIASCPLSYYSFIALLIPIGSCFFVF

SEQ ID NO: 71730 - DNA, 585 bp, Arabidopsis thaliana
  misc_feature (1)..(585): Ceres Seq. ID no. 4810231
  misc_feature: MA Experiment ID: 20000184 Result: Up-regulated in Transcription
  misc_feature: MA Experiment 20000184 PARAMETER Experiment Name: At_Shoots__P Parameter: Age (day) Value: 7
  misc_feature: MA Experiment 20000184 PARAMETER Experiment Name: At_Shoots__P Parameter: Tissue Value: Shoots vs. Whole Plant
  misc_feature: MA Experiment ID: 20001910 Result: Up-regulated in Transcription
  misc_feature: MA Experiment 20001910 PARAMETER Experiment Name: At_Drought_Reproduction_P Parameter: Age (day) Value: 37
  misc_feature: MA Experiment 20001910 PARAMETER Experiment Name: At_Drought_Reproduction_P Parameter: Organism Value: A. thaliana
  misc_feature: MA Experiment 20001910 PARAMETER Experiment Name: At_Drought_Reproduction_P Parameter: Plant Line Value: WS
  misc_feature: MA Experiment 20001910 PARAMETER Experiment Name: At_Drought_Reproduction_P Parameter: Timepoint (day) Value: 7
  misc_feature: MA Experiment 20001910 PARAMETER Experiment Name: At_Drought_Reproduction_P Parameter: Tissue Value: Flowers
  misc_feature: MA Experiment 20001910 PARAMETER Experiment Name: At_Drought_Reproduction_P Parameter: Treatment Value: Drought vs. No Drought
atggcgatcgttagccctaatttctgtgcaccgtaccctatcgagttgggaatcgtacggaaggtgatgactttaaccgatggtaacttcgccgtcacggacgttaacggcaatctccttttcaaagtcaaggaacctttgtttagcatcagcgacaaaaggattttattggacgcatacgatactccaatcttgactttgagagaaaataaggtgagcttgcatgataggtggctagtatatagagggaagagtacagaccaaagtgatctattatacacattgaaacgatcttcaatgattcaaataatgaagccaaaactagacatctttttggctcataataaagaaatgaagatttgcgacttccatgttaaaggaagttggatcgaccggtcttgtgtcgtctacgccggcaaatctgatgccattgttgctcagatgcacaagaaacatacggcacaaagcatattaattgggaagagtaatttttcggttactgtctatccgaatgttgactttgcttttatagtttctctcattgtaatcctcgatgacattaaccgagaagattcagaagactag

SEQ ID NO: 71731 - protein, 194 aa, Arabidopsis thaliana
  peptide (1)..(194): Ceres Seq. ID no. 4810232
  misc_feature (3)..(183): Pfam Name: Protein of unknown function (DUF567) Pfam Description: Protein of unknown function (DUF567)
  misc_feature (3)..(191): Homolog of NCBI NO: 30679390 NR Description: expressed protein [Arabidopsis thaliana]
  misc_feature (1)..(187): Homolog of NCBI NO: 15217694 NR Description: unknown protein; protein id: At1g33840.1
  misc_feature (3)..(184): Homolog of NCBI NO: 9665105 NR Description: Hypothetical protein [Arabidopsis thaliana]
  misc_feature (3)..(189): Homolog of NCBI NO: 17979321 NR Description: unknown protein [Arabidopsis thaliana]
  misc_feature (3)..(149): Homolog of NCBI NO: 18413737 NR Description: expressed protein; protein id: At5g01750.1,
  misc_feature (3)..(189): Homolog of NCBI NO: 15225960 NR Description: unknown protein; protein id: At2g14560.1, by cDNA: gi_17979320 [Arabidopsis thaliana]
  misc_feature (3)..(149): Homolog of NCBI NO: 21553506 NR Description: unknown [Arabidopsis thaliana]
  misc_feature (1)..(193): Homolog of NCBI NO: 27818079 NR Description: OSJNBa0086N05.7 [Oryza sativa (japonica
  misc_feature (3)..(150): Homolog of NCBI NO: 25352417 NR Description: hypothetical protein T3M13.14 - Arabidopsis
  misc_feature (106)..(194): Homolog of NCBI NO: 15229837 NR Description: hypothetical protein; protein id: At3g11740.1 thaliana] >gi|6671930|gb|AAF23190.1|AC016795_3 hypothetical
MAIVSPNFCAPYPIELGIVRKVMTLTDGNFAVTDVNGNLLFKVKEPLFSISDKRILLDAYDTPILTLRENKVSLHDRWLVYRGKSTDQSDLLYTLKRSSMIQIMKPKLDIFLAHNKEMKICDFHVKGSWIDRSCVVYAGKSDAIVAQMHKKHTAQSILIGKSNFSVTVYPNVDFAFIVSLIVILDDINREDSED

SEQ ID NO: 71732 - protein, 172 aa, Arabidopsis thaliana
  peptide (1)..(172): Ceres Seq. ID no. 4810233
  misc_feature (1)..(161): Pfam Name: Protein of unknown function (DUF567) Pfam Description: Protein of unknown function (DUF567)
  misc_feature (1)..(169): Homolog of NCBI NO: 30679390 NR Description: expressed protein [Arabidopsis thaliana]
  misc_feature (1)..(165): Homolog of NCBI NO: 15217694 NR Description: unknown protein; protein id: At1g33840.1
  misc_feature (1)..(162): Homolog of NCBI NO: 9665105 NR Description: Hypothetical protein [Arabidopsis thaliana]
  misc_feature (1)..(167): Homolog of NCBI NO: 17979321 NR Description: unknown protein [Arabidopsis thaliana]
  misc_feature (1)..(127): Homolog of NCBI NO: 18413737 NR Description: expressed protein; protein id: At5g01750.1,
  misc_feature (1)..(167): Homolog of NCBI NO: 15225960 NR Description: unknown protein; protein id: At2g14560.1, by cDNA: gi_17979320 [Arabidopsis thaliana]
  misc_feature (1)..(127): Homolog of NCBI NO: 21553506 NR Description: unknown [Arabidopsis thaliana]
  misc_feature (1)..(171): Homolog of NCBI NO: 27818079 NR Description: OSJNBa0086N05.7 [Oryza sativa (japonica
  misc_feature (1)..(128): Homolog of NCBI NO: 25352417 NR Description: hypothetical protein T3M13.14 - Arabidopsis
  misc_feature (84)..(172): Homolog of NCBI NO: 15229837 NR Description: hypothetical protein; protein id: At3g11740.1 thaliana] >gi|6671930|gb|AAF23190.1|AC016795_3 hypothetical
MTLTDGNFAVTDVNGNLLFKVKEPLFSISDKRILLDAYDTPILTLRENKVSLHDRWLVYRGKSTDQSDLLYTLKRSSMIQIMKPKLDIFLAHNKEMKICDFHVKGSWIDRSCVVYAGKSDAIVAQMHKKHTAQSILIGKSNFSVTVYPNVDFAFIVSLIVILDDINREDSED

SEQ ID NO: 71733 - DNA, 1485 bp, Arabidopsis thaliana
  misc_feature (1)..(1485): Ceres Seq. ID no. 4810479
  misc_feature: MA Experiment ID: 20000267 Result: Up-regulated in Transcription
  misc_feature: MA Experiment 20000267 PARAMETER Experiment Name: At_Drought_P Parameter: Age (day) Value: 7
  misc_feature: MA Experiment 20000267 PARAMETER Experiment Name: At_Drought_P Parameter: Organism Value: A. thaliana
  misc_feature: MA Experiment 20000267 PARAMETER Experiment Name: At_Drought_P Parameter: Plant Line Value: WS
  misc_feature: MA Experiment 20000267 PARAMETER Experiment Name: At_Drought_P Parameter: Timepoint (hr) Value: 6
  misc_feature: MA Experiment 20000267 PARAMETER Experiment Name: At_Drought_P Parameter: Tissue Value: Whole Plant
  misc_feature: MA Experiment 20000267 PARAMETER Experiment Name: At_Drought_P Parameter: Treatment Value: Drought vs. No Drought
  misc_feature: MA Experiment ID: 20000436 Result: Up-regulated in Transcription
  misc_feature: MA Experiment 20000436 PARAMETER Experiment Name: At_Drought_P Parameter: Age (day) Value: 7
  misc_feature: MA Experiment 20000436 PARAMETER Experiment Name: At_Drought_P Parameter: Organism Value: A. thaliana
  misc_feature: MA Experiment 20000436 PARAMETER Experiment Name: At_Drought_P Parameter: Plant Line Value: WS
  misc_feature: MA Experiment 20000436 PARAMETER Experiment Name: At_Drought_P Parameter: Timepoint (hr) Value: 12
  misc_feature: MA Experiment 20000436 PARAMETER Experiment Name: At_Drought_P Parameter: Tissue Value: Whole Plant
  misc_feature: MA Experiment 20000436 PARAMETER Experiment Name: At_Drought_P Parameter: Treatment Value: Drought vs. No Drought
  misc_feature: MA Experiment ID: 20000437 Result: Up-regulated in Transcription
  misc_feature: MA Experiment 20000437 PARAMETER Experiment Name: At_Drought_P Parameter: Age (day) Value: 8
  misc_feature: MA Experiment 20000437 PARAMETER Experiment Name: At_Drought_P Parameter: Organism Value: A. thaliana
  misc_feature: MA Experiment 20000437 PARAMETER Experiment Name: At_Drought_P Parameter: Plant Line Value: WS
  misc_feature: MA Experiment 20000437 PARAMETER Experiment Name: At_Drought_P Parameter: Timepoint (hr) Value: 24
  misc_feature: MA Experiment 20000437 PARAMETER Experiment Name: At_Drought_P Parameter: Tissue Value: Whole Plant
  misc_feature: MA Experiment 20000437 PARAMETER Experiment Name: At_Drought_P Parameter: Treatment Value: Drought vs. No Drought
  misc_feature: MA Experiment ID: 20001558 Result: Up-regulated in Transcription
  misc_feature: MA Experiment 20001558 PARAMETER Experiment Name: At_Drought_Soil_Dry_P Parameter: Age (day) Value: 27
  misc_feature: MA Experiment 20001558 PARAMETER Experiment Name: At_Drought_Soil_Dry_P Parameter: Organism Value: A. thaliana
  misc_feature: MA Experiment 20001558 PARAMETER Experiment Name: At_Drought_Soil_Dry_P Parameter: Plant Line Value: WS
  misc_feature: MA Experiment 20001558 PARAMETER Experiment Name: At_Drought_Soil_Dry_P Parameter: Post Timepoint (hr) Value: 6
  misc_feature: MA Experiment 20001558 PARAMETER Experiment Name: At_Drought_Soil_Dry_P Parameter: Post-Treatment Value: Re-Water vs. No Drought
  misc_feature: MA Experiment 20001558 PARAMETER Experiment Name: At_Drought_Soil_Dry_P Parameter: Timepoint (day) Value: 13
  misc_feature: MA Experiment 20001558 PARAMETER Experiment Name: At_Drought_Soil_Dry_P Parameter: Treatment Value: Drought vs. No Drought
atggaggagaggctattacgtgaaggatcagatgctgagggtcagagcaataatagggagagtatctatttgagaacgaaggtctggagtgaagtaaataaaatgtggagaatagcattaccttcttctttgttccgaatgacttcgtttgggagcatcattgtggctcaagccttcattggtcactcctctgagttgggtctagccgcttacgcactcctccaaagcacattcatccgcttcctctacggtttaatgggcggtatgtcaagtgcaacggagacattatgcgggcaagcatacggtgcggaacaatatcacacaatggggatatatctacaacgttcatggatcgtggacatggccgtgaccactttgtttctaccgtttattgtacttgcgggtcccattctccgtctattaggccaaaacgtggagatcacaaagaccgttgatgagatatatccttggatgattccgtatgtatatagcttaattttcactatgactatacaaatgtacctccaagcacagatgaggaacgctattgtaggcgttctttcgacattgtccttggctcttgacctcgtggtcacatggtggtgcgtgagtgttatgggtatgggcattggtggtgctctcctcggacttaatgtgggctcttgggcaatggtattagccgagtttgtgtacatttttggtggatggtgtccttttacttggaccggatttagtattgctgcttttgttgacctaattcctatgctcaagctttccatttcttcaggcttcatgatctgcttagagtattggtacatgagcatccttgtcttaatggcggggtatacaaaagatgcgaaaatcgcaatctctgctttctcaatatgccaatacatatatacatgggaactcaacatatgccttggcttcttgggtgcggcatgcgtccgggtggctaacgagttggggaaaggagatgcacatgcagtgagattttcaataaaagtgatactcacaatatcaacattgatgggagtgatattctcagctctatgcttagctttttgtggtcgaatttcctatttgttttcgaatagcgacgaggtttcggatgcagtgaatgatttatcggtgatccttgctgtttcaatcttactcaacagcatacaacctatactctcaggtgtagcagttggggcagggatgcagagtatagtggcagttgtgaacttagcctcttattatgcaattggtattcctttgggtctcatccttacttatgttttccatcttggtgttaagggactatggtctggaatgttggctggaattgcgatccaaacaataatattatgttatataatttacaaaactgactgggaattagaggttaaaaggacatgtgaacgtatgaaagtgtggagcctgaagccatctaatgaagagtcgaatcccataataagagaagaaagtaggagcaagtga

SEQ ID NO: 71734 - protein, 494 aa, Arabidopsis thaliana
  peptide (1)..(494): Ceres Seq. ID no. 4810480
  misc_feature (1)..(464): Homolog of NCBI NO: 15228595 NR Description: unknown protein; protein id: At3g03620.1 thaliana] >gi|6091760|gb|AAF03470.1|AC009327_9 unknown protein
  misc_feature (1)..(492): Homolog of NCBI NO: 22326870 NR Description: putative protein; protein id: At5g17700.1, by cDNA: gi_20466399 [Arabidopsis thaliana] putative protein [Arabidopsis thaliana]
  misc_feature (1)..(464): Homolog of NCBI NO: 9759047 NR Description: gb|AAF03470.1~gene_id:MVA3.5~strong similarity to
  misc_feature (3)..(490): Homolog of NCBI NO: 22329916 NR Description: hypothetical protein; protein id: At1g33080.1, by cDNA: gi_19423993 [Arabidopsis thaliana] unknown protein [Arabidopsis thaliana]
  misc_feature (12)..(490): Homolog of NCBI NO: 15223402 NR Description: unknown protein; protein id: At1g33110.1, by cDNA: gi_17065359 [Arabidopsis thaliana] Unknown protein [Arabidopsis thaliana]
  misc_feature (5)..(490): Homolog of NCBI NO: 15223391 NR Description: hypothetical protein; protein id: At1g33090.1
  misc_feature (5)..(481): Homolog of NCBI NO: 15240080 NR Description: putative protein; protein id: At5g44050.1 thaliana] >gi|9758564|dbj|BAB09065.1|
  misc_feature (20)..(481): Homolog of NCBI NO: 15223394 NR Description: unknown protein; protein id: At1g33100.1
  misc_feature (24)..(475): Homolog of NCBI NO: 15238439 NR Description: putative protein; protein id: At5g65380.1, by cDNA: gi_14030730 [Arabidopsis thaliana] emb|CAB89401.1~gene_id:MNA5.11~strong similarity to unknown
  misc_feature (24)..(355): Homolog of NCBI NO: 15238161 NR Description: putative protein; protein id: At5g10420.1
MEERLLREGSDAEGQSNNRESIYLRTKVWSEVNKMWRIALPSSLFRMTSFGSIIVAQAFIGHSSELGLAAYALLQSTFIRFLYGLMGGMSSATETLCGQAYGAEQYHTMGIYLQRSWIVDMAVTTLFLPFIVLAGPILRLLGQNVEITKTVDEIYPWMIPYVYSLIFTMTIQMYLQAQMRNAIVGVLSTLSLALDLVVTWWCVSVMGMGIGGALLGLNVGSWAMVLAEFVYIFGGWCPFTWTGFSIAAFVDLIPMLKLSISSGFMICLEYWYMSILVLMAGYTKDAKIAISAFSICQYIYTWELNICLGFLGAACVRVANELGKGDAHAVRFSIKVILTISTLMGVIFSALCLAFCGRISYLFSNSDEVSDAVNDLSVILAVSILLNSIQPILSGVAVGAGMQSIVAVVNLASYYAIGIPLGLILTYVFHLGVKGLWSGMLAGIAIQTIILCYIIYKTDWELEVKRTCERMKVWSLKPSNEESNPIIREESRSK

SEQ ID NO: 71735 - protein, 460 aa, Arabidopsis thaliana
  peptide (1)..(460): Ceres Seq. ID no. 4810481
  misc_feature (1)..(430): Homolog of NCBI NO: 15228595 NR Description: unknown protein; protein id: At3g03620.1 thaliana] >gi|6091760|gb|AAF03470.1|AC009327_9 unknown protein
  misc_feature (1)..(458): Homolog of NCBI NO: 22326870 NR Description: putative protein; protein id: At5g17700.1, by cDNA: gi_20466399 [Arabidopsis thaliana] putative protein [Arabidopsis thaliana]
  misc_feature (1)..(430): Homolog of NCBI NO: 9759047 NR Description: gb|AAF03470.1~gene_id:MVA3.5~strong similarity to
  misc_feature (1)..(456): Homolog of NCBI NO: 22329916 NR Description: hypothetical protein; protein id: At1g33080.1, by cDNA: gi_19423993 [Arabidopsis thaliana] unknown protein [Arabidopsis thaliana]
  misc_feature (1)..(456): Homolog of NCBI NO: 15223402 NR Description: unknown protein; protein id: At1g33110.1, by cDNA: gi_17065359 [Arabidopsis thaliana] Unknown protein [Arabidopsis thaliana]
  misc_feature (1)..(456): Homolog of NCBI NO: 15223391 NR Description: hypothetical protein; protein id: At1g33090.1
  misc_feature (1)..(447): Homolog of NCBI NO: 15240080 NR Description: putative protein; protein id: At5g44050.1 thaliana] >gi|9758564|dbj|BAB09065.1|
  misc_feature (1)..(447): Homolog of NCBI NO: 15223394 NR Description: unknown protein; protein id: At1g33100.1
  misc_feature (1)..(441): Homolog of NCBI NO: 15238439 NR Description: putative protein; protein id: At5g65380.1, by cDNA: gi_14030730 [Arabidopsis thaliana] emb|CAB89401.1~gene_id:MNA5.11~strong similarity to unknown
  misc_feature (1)..(321): Homolog of NCBI NO: 15238161 NR Description: putative protein; protein id: At5g10420.1
MWRIALPSSLFRMTSFGSIIVAQAFIGHSSELGLAAYALLQSTFIRFLYGLMGGMSSATETLCGQAYGAEQYHTMGIYLQRSWIVDMAVTTLFLPFIVLAGPILRLLGQNVEITKTVDEIYPWMIPYVYSLIFTMTIQMYLQAQMRNAIVGVLSTLSLALDLVVTWWCVSVMGMGIGGALLGLNVGSWAMVLAEFVYIFGGWCPFTWTGFSIAAFVDLIPMLKLSISSGFMICLEYWYMSILVLMAGYTKDAKIAISAFSICQYIYTWELNICLGFLGAACVRVANELGKGDAHAVRFSIKVILTISTLMGVIFSALCLAFCGRISYLFSNSDEVSDAVNDLSVILAVSILLNSIQPILSGVAVGAGMQSIVAVVNLASYYAIGIPLGLILTYVFHLGVKGLWSGMLAGIAIQTIILCYIIYKTDWELEVKRTCERMKVWSLKPSNEESNPIIREESRSK

SEQ ID NO: 71736 - protein, 448 aa, Arabidopsis thaliana
  peptide (1)..(448): Ceres Seq. ID no. 4810482
  misc_feature (1)..(444): Homolog of NCBI NO: 22329916 NR Description: hypothetical protein; protein id: At1g33080.1, by cDNA: gi_19423993 [Arabidopsis thaliana] unknown protein [Arabidopsis thaliana]
  misc_feature (1)..(444): Homolog of NCBI NO: 15223402 NR Description: unknown protein; protein id: At1g33110.1, by cDNA: gi_17065359 [Arabidopsis thaliana] Unknown protein [Arabidopsis thaliana]
  misc_feature (1)..(444): Homolog of NCBI NO: 15223391 NR Description: hypothetical protein; protein id: At1g33090.1
  misc_feature (1)..(435): Homolog of NCBI NO: 15240080 NR Description: putative protein; protein id: At5g44050.1 thaliana] >gi|9758564|dbj|BAB09065.1|
  misc_feature (1)..(435): Homolog of NCBI NO: 15223394 NR Description: unknown protein; protein id: At1g33100.1
  misc_feature (1)..(429): Homolog of NCBI NO: 15238439 NR Description: putative protein; protein id: At5g65380.1, by cDNA: gi_14030730 [Arabidopsis thaliana] emb|CAB89401.1~gene_id:MNA5.11~strong similarity to unknown
  misc_feature (1)..(309): Homolog of NCBI NO: 15238161 NR Description: putative protein; protein id: At5g10420.1
  misc_feature (1)..(418): Homolog of NCBI NO: 15228595 NR Description: unknown protein; protein id: At3g03620.1 thaliana] >gi|6091760|gb|AAF03470.1|AC009327_9 unknown protein
  misc_feature (1)..(446): Homolog of NCBI NO: 22326870 NR Description: putative protein; protein id: At5g17700.1, by cDNA: gi_20466399 [Arabidopsis thaliana] putative protein [Arabidopsis thaliana]
  misc_feature (1)..(418): Homolog of NCBI NO: 9759047 NR Description: gb|AAF03470.1~gene_id:MVA3.5~strong similarity to
MTSFGSIIVAQAFIGHSSELGLAAYALLQSTFIRFLYGLMGGMSSATETLCGQAYGAEQYHTMGIYLQRSWIVDMAVTTLFLPFIVLAGPILRLLGQNVEITKTVDEIYPWMIPYVYSLIFTMTIQMYLQAQMRNAIVGVLSTLSLALDLVVTWWCVSVMGMGIGGALLGLNVGSWAMVLAEFVYIFGGWCPFTWTGFSIAAFVDLIPMLKLSISSGFMICLEYWYMSILVLMAGYTKDAKIAISAFSICQYIYTWELNICLGFLGAACVRVANELGKGDAHAVRFSIKVILTISTLMGVIFSALCLAFCGRISYLFSNSDEVSDAVNDLSVILAVSILLNSIQPILSGVAVGAGMQSIVAVVNLASYYAIGIPLGLILTYVFHLGVKGLWSGMLAGIAIQTIILCYIIYKTDWELEVKRTCERMKVWSLKPSNEESNPIIREESRSK

SEQ ID NO: 71737 - DNA, 1692 bp, Arabidopsis thaliana
  misc_feature (1)..(1692): Ceres Seq. ID no. 4811190
  misc_feature: MA Experiment ID: 20000166 Result: Up-regulated in Transcription
  misc_feature: MA Experiment 20000166 PARAMETER Experiment Name: At_100uM_ABA_P Parameter: Age (day) Value: 14
  misc_feature: MA Experiment 20000166 PARAMETER Experiment Name: At_100uM_ABA_P Parameter: Organism Value: A. thaliana
  misc_feature: MA Experiment 20000166 PARAMETER Experiment Name: At_100uM_ABA_P Parameter: Plant Line Value: WS
  misc_feature: MA Experiment 20000166 PARAMETER Experiment Name: At_100uM_ABA_P Parameter: Timepoint (hr) Value: 1
  misc_feature: MA Experiment 20000166 PARAMETER Experiment Name: At_100uM_ABA_P Parameter: Tissue Value: Aerial
  misc_feature: MA Experiment 20000166 PARAMETER Experiment Name: At_100uM_ABA_P Parameter: Treatment Value: 100uM ABA vs. No Treatment
  misc_feature: MA Experiment ID: 20000185 Result: Up-regulated in Transcription
  misc_feature: MA Experiment 20000185 PARAMETER Experiment Name: At_Roots__P Parameter: Age (day) Value: 7 vs. 21
  misc_feature: MA Experiment 20000185 PARAMETER Experiment Name: At_Roots__P Parameter: Organism Value: A. thaliana
  misc_feature: MA Experiment 20000185 PARAMETER Experiment Name: At_Roots__P Parameter: Tissue Value: Roots vs. Whole Plant
  misc_feature: MA Experiment ID: 20000227 Result: Down-regulated in Transcription
  misc_feature: MA Experiment 20000227 PARAMETER Experiment Name: At_Root-Tips-vs-Tops_P Parameter: Tissue Value: Root Tips vs. Root Tops
  misc_feature: MA Experiment ID: 20000439 Result: Up-regulated in Transcription
  misc_feature: MA Experiment 20000439 PARAMETER Experiment Name: At_Roots__P Parameter: Age (day) Value: 14 vs. 21
  misc_feature: MA Experiment 20000439 PARAMETER Experiment Name: At_Roots__P Parameter: Organism Value: A. thaliana
  misc_feature: MA Experiment 20000439 PARAMETER Experiment Name: At_Roots__P Parameter: Tissue Value: Roots vs. Whole Plant
  misc_feature: MA Experiment ID: 20000460 Result: Up-regulated in Transcription
  misc_feature: MA Experiment 20000460 PARAMETER Experiment Name: At_10percent_PEG_P Parameter: Age (day) Value: 12
  misc_feature: MA Experiment 20000460 PARAMETER Experiment Name: At_10percent_PEG_P Parameter: Organism Value: A. thaliana
  misc_feature: MA Experiment 20000460 PARAMETER Experiment Name: At_10percent_PEG_P Parameter: Plant Line Value: WS
  misc_feature: MA Experiment 20000460 PARAMETER Experiment Name: At_10percent_PEG_P Parameter: Timepoint (day) Value: 12
  misc_feature: MA Experiment 20000460 PARAMETER Experiment Name: At_10percent_PEG_P Parameter: Tissue Value: Whole Plant
  misc_feature: MA Experiment 20000460 PARAMETER Experiment Name: At_10percent_PEG_P Parameter: Treatment Value: 10percent PEG vs. No Treatment
  misc_feature: MA Experiment ID: 20000495 Result: Up-regulated in Transcription
  misc_feature: MA Experiment 20000495 PARAMETER Experiment Name: At_Guard_Cells_P Parameter: Harvest Date Value: 8/2/2002
  misc_feature: MA Experiment 20000495 PARAMETER Experiment Name: At_Guard_Cells_P Parameter: Organism Value: A. thaliana
  misc_feature: MA Experiment 20000495 PARAMETER Experiment Name: At_Guard_Cells_P Parameter: Tissue Value: Guard Cells vs. Leaves
  misc_feature: MA Experiment ID: 20000794 Result: Up-regulated in Transcription
  misc_feature: MA Experiment 20000794 PARAMETER Experiment Name: At_Petals_P Parameter: Age (day) Value: 23-25 days
  misc_feature: MA Experiment 20000794 PARAMETER Experiment Name: At_Petals_P Parameter: Plant Line Value: WS
  misc_feature: MA Experiment 20000794 PARAMETER Experiment Name: At_Petals_P Parameter: Tissue Value: Petals vs. Whole plant
  misc_feature: MA Experiment ID: 20001451 Result: Down-regulated in Transcription
  misc_feature: MA Experiment 20001451 PARAMETER Experiment Name: At_Far-red-induction_P Parameter: Age (day) Value: 7
  misc_feature: MA Experiment 20001451 PARAMETER Experiment Name: At_Far-red-induction_P Parameter: Light Value: Far-red vs. White
  misc_feature: MA Experiment 20001451 PARAMETER Experiment Name: At_Far-red-induction_P Parameter: Organism Value: A. thaliana
  misc_feature: MA Experiment 20001451 PARAMETER Experiment Name: At_Far-red-induction_P Parameter: Plant Line Value: Columbia
  misc_feature: MA Experiment 20001451 PARAMETER Experiment Name: At_Far-red-induction_P Parameter: Timepoint (hr) Value: 24
  misc_feature: MA Experiment 20001451 PARAMETER Experiment Name: At_Far-red-induction_P Parameter: Tissue Value: Whole Plant
  misc_feature: MA Experiment ID: 20001554 Result: Up-regulated in Transcription
  misc_feature: MA Experiment 20001554 PARAMETER Experiment Name: At_Drought_Soil_Dry_P Parameter: Age (day) Value: 21
  misc_feature: MA Experiment 20001554 PARAMETER Experiment Name: At_Drought_Soil_Dry_P Parameter: Organism Value: A. thaliana
  misc_feature: MA Experiment 20001554 PARAMETER Experiment Name: At_Drought_Soil_Dry_P Parameter: Plant Line Value: WS
  misc_feature: MA Experiment 20001554 PARAMETER Experiment Name: At_Drought_Soil_Dry_P Parameter: Post Timepoint (hr) Value: None
  misc_feature: MA Experiment 20001554 PARAMETER Experiment Name: At_Drought_Soil_Dry_P Parameter: Post-Treatment Value: None
  misc_feature: MA Experiment 20001554 PARAMETER Experiment Name: At_Drought_Soil_Dry_P Parameter: Timepoint (day) Value: 7
  misc_feature: MA Experiment 20001554 PARAMETER Experiment Name: At_Drought_Soil_Dry_P Parameter: Treatment Value: Drought vs. No Drought
atggatttagaacagaagacaagaggacttagcaagtcatgtgcccttctcatagtgattgcgggaatggagagatatgcattcaaaggagttgcatcaaacttagtgacatatctaacagatgtagtgaagatgagtaattcaagagcagccaaaactgttaacacttgggctggtttcacttctatgttgcctctcttctctgctcctttggctgatacttattgggacagattcttcaccatccttgcttcttcttccgtctactttgtgggactagtgggattgacatggacggcatttgctgggtcacgttcagctactaagactatctcttcttactttctctactcttcactatgtcttgtctcaatcggtttaggcgtcttaaacccttctcttcaagcctttggtgcagaccaactcgaccacgacctcgataagaatttcgatctttcctcgggtgatcaaaaggacgcgaaagctacccgaaagactcagtttttccaattgtggtactttggcgtctgcaccggcagccttatgggtgtcacagtcatggcttatattcaagacacttttggttgggttctcggtttcgccattcctggtatcgtgatattcctgtcgattttggtgttcatgtcgggttgtggaatttatgtttatgctccgggcgcccgtctgaagaagaaaacaactactacaccttttgagaagattcttaaattcattaaagggagagtagtgaagcagagaagcatatatacacttgcagatgagaaagatttggatgctatggagcttgagctagaggagaggcctctctgtaaatgtgagaccgaagacattgagactccttcaacaacctccaaaggattggaagatgacgagagctcgaaaacggttttctctggaattgataatgttaagttagtgattcgccttttccccatatggatgatgcttctcatgttcgcggttatcttccagctaccagcaacctttttcaccaaacaaggtgtgactatgaagagaaacattgggtccaacttcaaaatcccacctgcaaccctgcaaagcacgatcacattatcaatcatcctgcttatgccattatatgataagattttgatacctattaccaagagaatcaagaaaaacggtacaggtatctctgtgatggagagaatgggagtcggaatgtttctatccatcattgccattgttattgcggcaatagtcgaaaggaaaagactagccataagccaaaagatgaagactttacctgattatgatccagaaaccgtcccactgagcatcttctggctgctgcctcagtacatcctcttgggaatctcagatatattcacagtcgttgggatgcaagagtttttctacagtgaggttcctgtaagaatgagaacaatgggatttgctctctacacaagtgtttttggtgttggaagctttgtgagcgccgcactgatctcaattgtcgaggcttactcgagctcaacaggtgaccgacaaaactggtttgcagatgatatgtcggaagctcggcttgacaaatactactggcttcttgctcttacaagtacaataagctttgtagtctacatatttctatgcaagtttttcaagagtagcagtgatcaaggcgatgaaaaagaagaagcccctaaatga

SEQ ID NO: 71738 - protein, 563 aa, Arabidopsis thaliana
  peptide (1)..(563): Ceres Seq. ID no. 4811191
  misc_feature (79)..(486): Pfam Name: POT family Pfam Description: POT family
  misc_feature (1)..(563): Homolog of NCBI NO: 15232096 NR Description: putative peptide transporter; protein id: [Arabidopsis thaliana] >gi|6094559|gb|AAF03501.1|AC010676_11
  misc_feature (5)..(557): Homolog of NCBI NO: 15242171 NR Description: oligopeptide transporter -like protein; protein At5g14940.1 [Arabidopsis thaliana] >gi|11358595|pir||T51439
  misc_feature (1)..(285): Homolog of NCBI NO: 25406147 NR Description: probable peptide transporter PTR2-B T9N14.15 - Arabidopsis thaliana >gi|12323655|gb|AAG51788.1|AC067754_4
  misc_feature (307)..(550): Homolog of NCBI NO: 25406147 NR Description: probable peptide transporter PTR2-B T9N14.15 - Arabidopsis thaliana >gi|12323655|gb|AAG51788.1|AC067754_4
  misc_feature (1)..(285): Homolog of NCBI NO: 22330582 NR Description: oligopeptide transporter, putative; protein id: supported by cDNA: gi_19699295 [Arabidopsis thaliana] At1g72130/F28P5.1 [Arabidopsis thaliana]
  misc_feature (307)..(548): Homolog of NCBI NO: 22330582 NR Description: oligopeptide transporter, putative; protein id: supported by cDNA: gi_19699295 [Arabidopsis thaliana] At1g72130/F28P5.1 [Arabidopsis thaliana]
  misc_feature (12)..(550): Homolog of NCBI NO: 25402970 NR Description: Similar to peptide transporter [imported] - thaliana >gi|6587835|gb|AAF18524.1|AC006551_10 Similar to peptide
  misc_feature (5)..(285): Homolog of NCBI NO: 15218381 NR Description: peptide transporter PTR2-B, putative; protein id:
  misc_feature (307)..(552): Homolog of NCBI NO: 15218381 NR Description: peptide transporter PTR2-B, putative; protein id:
  misc_feature (1)..(285): Homolog of NCBI NO: 12322195 NR Description: oligopeptide transporter, putative [Arabidopsis
MDLEQKTRGLSKSCALLIVIAGMERYAFKGVASNLVTYLTDVVKMSNSRAAKTVNTWAGFTSMLPLFSAPLADTYWDRFFTILASSSVYFVGLVGLTWTAFAGSRSATKTISSYFLYSSLCLVSIGLGVLNPSLQAFGADQLDHDLDKNFDLSSGDQKDAKATRKTQFFQLWYFGVCTGSLMGVTVMAYIQDTFGWVLGFAIPGIVIFLSILVFMSGCGIYVYAPGARLKKKTTTTPFEKILKFIKGRVVKQRSIYTLADEKDLDAMELELEERPLCKCETEDIETPSTTSKGLEDDESSKTVFSGIDNVKLVIRLFPIWMMLLMFAVIFQLPATFFTKQGVTMKRNIGSNFKIPPATLQSTITLSIILLMPLYDKILIPITKRIKKNGTGISVMERMGVGMFLSIIAIVIAAIVERKRLAISQKMKTLPDYDPETVPLSIFWLLPQYILLGISDIFTVVGMQEFFYSEVPVRMRTMGFALYTSVFGVGSFVSAALISIVEAYSSSTGDRQNWFADDMSEARLDKYYWLLALTSTISFVVYIFLCKFFKSSSDQGDEKEEAPK

SEQ ID NO: 71739 - protein, 541 aa, Arabidopsis thaliana
  peptide (1)..(541): Ceres Seq. ID no. 4811192
  misc_feature (57)..(464): Pfam Name: POT family Pfam Description: POT family
  misc_feature (1)..(541): Homolog of NCBI NO: 15232096 NR Description: putative peptide transporter; protein id: [Arabidopsis thaliana] >gi|6094559|gb|AAF03501.1|AC010676_11
  misc_feature (1)..(535): Homolog of NCBI NO: 15242171 NR Description: oligopeptide transporter -like protein; protein At5g14940.1 [Arabidopsis thaliana] >gi|11358595|pir||T51439
  misc_feature (1)..(263): Homolog of NCBI NO: 25406147 NR Description: probable peptide transporter PTR2-B T9N14.15 - Arabidopsis thaliana >gi|12323655|gb|AAG51788.1|AC067754_4
  misc_feature (285)..(528): Homolog of NCBI NO: 25406147 NR Description: probable peptide transporter PTR2-B T9N14.15 - Arabidopsis thaliana >gi|12323655|gb|AAG51788.1|AC067754_4
  misc_feature (1)..(263): Homolog of NCBI NO: 22330582 NR Description: oligopeptide transporter, putative; protein id: supported by cDNA: gi_19699295 [Arabidopsis thaliana] At1g72130/F28P5.1 [Arabidopsis thaliana]
  misc_feature (285)..(526): Homolog of NCBI NO: 22330582 NR Description: oligopeptide transporter, putative; protein id: supported by cDNA: gi_19699295 [Arabidopsis thaliana] At1g72130/F28P5.1 [Arabidopsis thaliana]
  misc_feature (1)..(528): Homolog of NCBI NO: 25402970 NR Description: Similar to peptide transporter [imported] - thaliana >gi|6587835|gb|AAF18524.1|AC006551_10 Similar to peptide
  misc_feature (1)..(263): Homolog of NCBI NO: 15218381 NR Description: peptide transporter PTR2-B, putative; protein id:
  misc_feature (285)..(530): Homolog of NCBI NO: 15218381 NR Description: peptide transporter PTR2-B, putative; protein id:
  misc_feature (1)..(263): Homolog of NCBI NO: 12322195 NR Description: oligopeptide transporter, putative [Arabidopsis
MERYAFKGVASNLVTYLTDVVKMSNSRAAKTVNTWAGFTSMLPLFSAPLADTYWDRFFTILASSSVYFVGLVGLTWTAFAGSRSATKTISSYFLYSSLCLVSIGLGVLNPSLQAFGADQLDHDLDKNFDLSSGDQKDAKATRKTQFFQLWYFGVCTGSLMGVTVMAYIQDTFGWVLGFAIPGIVIFLSILVFMSGCGIYVYAPGARLKKKTTTTPFEKILKFIKGRVVKQRSIYTLADEKDLDAMELELEERPLCKCETEDIETPSTTSKGLEDDESSKTVFSGIDNVKLVIRLFPIWMMLLMFAVIFQLPATFFTKQGVTMKRNIGSNFKIPPATLQSTITLSIILLMPLYDKILIPITKRIKKNGTGISVMERMGVGMFLSIIAIVIAAIVERKRLAISQKMKTLPDYDPETVPLSIFWLLPQYILLGISDIFTVVGMQEFFYSEVPVRMRTMGFALYTSVFGVGSFVSAALISIVEAYSSSTGDRQNWFADDMSEARLDKYYWLLALTSTISFVVYIFLCKFFKSSSDQGDEKEEAPK

SEQ ID NO: 71740 - protein, 519 aa, Arabidopsis thaliana
  peptide (1)..(519): Ceres Seq. ID no. 4811193
  misc_feature (35)..(442): Pfam Name: POT family Pfam Description: POT family
  misc_feature (1)..(519): Homolog of NCBI NO: 15232096 NR Description: putative peptide transporter; protein id: [Arabidopsis thaliana] >gi|6094559|gb|AAF03501.1|AC010676_11
  misc_feature (1)..(513): Homolog of NCBI NO: 15242171 NR Description: oligopeptide transporter -like protein; protein At5g14940.1 [Arabidopsis thaliana] >gi|11358595|pir||T51439
  misc_feature (1)..(241): Homolog of NCBI NO: 25406147 NR Description: probable peptide transporter PTR2-B T9N14.15 - Arabidopsis thaliana >gi|12323655|gb|AAG51788.1|AC067754_4
  misc_feature (263)..(506): Homolog of NCBI NO: 25406147 NR Description: probable peptide transporter PTR2-B T9N14.15 - Arabidopsis thaliana >gi|12323655|gb|AAG51788.1|AC067754_4
  misc_feature (1)..(241): Homolog of NCBI NO: 22330582 NR Description: oligopeptide transporter, putative; protein id: supported by cDNA: gi_19699295 [Arabidopsis thaliana] At1g72130/F28P5.1 [Arabidopsis thaliana]
  misc_feature (263)..(504): Homolog of NCBI NO: 22330582 NR Description: oligopeptide transporter, putative; protein id: supported by cDNA: gi_19699295 [Arabidopsis thaliana] At1g72130/F28P5.1 [Arabidopsis thaliana]
  misc_feature (1)..(506): Homolog of NCBI NO: 25402970 NR Description: Similar to peptide transporter [imported] - thaliana >gi|6587835|gb|AAF18524.1|AC006551_10 Similar to peptide
  misc_feature (1)..(241): Homolog of NCBI NO: 15218381 NR Description: peptide transporter PTR2-B, putative; protein id:
  misc_feature (263)..(508): Homolog of NCBI NO: 15218381 NR Description: peptide transporter PTR2-B, putative; protein id:
  misc_feature (1)..(241): Homolog of NCBI NO: 12322195 NR Description: oligopeptide transporter, putative [Arabidopsis
MSNSRAAKTVNTWAGFTSMLPLFSAPLADTYWDRFFTILASSSVYFVGLVGLTWTAFAGSRSATKTISSYFLYSSLCLVSIGLGVLNPSLQAFGADQLDHDLDKNFDLSSGDQKDAKATRKTQFFQLWYFGVCTGSLMGVTVMAYIQDTFGWVLGFAIPGIVIFLSILVFMSGCGIYVYAPGARLKKKTTTTPFEKILKFIKGRVVKQRSIYTLADEKDLDAMELELEERPLCKCETEDIETPSTTSKGLEDDESSKTVFSGIDNVKLVIRLFPIWMMLLMFAVIFQLPATFFTKQGVTMKRNIGSNFKIPPATLQSTITLSIILLMPLYDKILIPITKRIKKNGTGISVMERMGVGMFLSIIAIVIAAIVERKRLAISQKMKTLPDYDPETVPLSIFWLLPQYILLGISDIFTVVGMQEFFYSEVPVRMRTMGFALYTSVFGVGSFVSAALISIVEAYSSSTGDRQNWFADDMSEARLDKYYWLLALTSTISFVVYIFLCKFFKSSSDQGDEKEEAPK

SEQ ID NO: 71741 - DNA, 915 bp, Arabidopsis thaliana
  misc_feature (1)..(915): Ceres Seq. ID no. 4811427
  misc_feature: MA Experiment ID: 20000173 Result: Down-regulated in Transcription
  misc_feature: MA Experiment 20000173 PARAMETER Experiment Name: At_42deg_Heat_P Parameter: Age (day) Value: 14
  misc_feature: MA Experiment 20000173 PARAMETER Experiment Name: At_42deg_Heat_P Parameter: Organism Value: A. thaliana
  misc_feature: MA Experiment 20000173 PARAMETER Experiment Name: At_42deg_Heat_P Parameter: Plant Line Value: WS
  misc_feature: MA Experiment 20000173 PARAMETER Experiment Name: At_42deg_Heat_P Parameter: Temperature (deg C) Value: 42 vs. 22
  misc_feature: MA Experiment 20000173 PARAMETER Experiment Name: At_42deg_Heat_P Parameter: Timepoint (hr) Value: 6
  misc_feature: MA Experiment 20000173 PARAMETER Experiment Name: At_42deg_Heat_P Parameter: Tissue Value: Aerial
  misc_feature: MA Experiment ID: 20000180 Result: Down-regulated in Transcription
  misc_feature: MA Experiment 20000180 PARAMETER Experiment Name: At_Germinating_Seeds_P Parameter: Age (hr) Value: 24 vs. 0
  misc_feature: MA Experiment 20000180 PARAMETER Experiment Name: At_Germinating_Seeds_P Parameter: Tissue Value: Germinating Seeds
  misc_feature: MA Experiment ID: 20000437 Result: Up-regulated in Transcription
  misc_feature: MA Experiment 20000437 PARAMETER Experiment Name: At_Drought_P Parameter: Age (day) Value: 8
  misc_feature: MA Experiment 20000437 PARAMETER Experiment Name: At_Drought_P Parameter: Organism Value: A. thaliana
  misc_feature: MA Experiment 20000437 PARAMETER Experiment Name: At_Drought_P Parameter: Plant Line Value: WS
  misc_feature: MA Experiment 20000437 PARAMETER Experiment Name: At_Drought_P Parameter: Timepoint (hr) Value: 24
  misc_feature: MA Experiment 20000437 PARAMETER Experiment Name: At_Drought_P Parameter: Tissue Value: Whole Plant
  misc_feature: MA Experiment 20000437 PARAMETER Experiment Name: At_Drought_P Parameter: Treatment Value: Drought vs. No Drought
atgatgaaaggaagcaaggcgaatctctctgccttagcggagaaatgcaaaactgtaatcgtttcgaactggcaagggtacctaaataccgtcaaacctgaagataaagctagtataatacatacttcaaagattaagtatgtgatgagaagaggaaagccatatctctgggtaccagaaagtgaaccacacaatgtcaacataatgtttgatgaacgtggatccttttctattgcccatccgtatcctggtccccttgcagctttattcaagtctataggaaagcttccagaaagggttgcttttactggagagattgttcctgttaaagagaaaagggttgatgcggtgaagaaatatgtcgaggaagctatacagtcagagatgaaagcgattagcgataccccaaattctgtccgtagtattttgaattcttccgatcagatgtatgcctcccggtgtgacagtcttagagccctgatcaatgatgcaaaggaaaaatacgttatctataagttcgttccaagctcatgtatgtttattgacccaaatggtacgaaagaaatagacttgaaggttttggaactgtcaaaaccagatccattagggacttggtcgacaaaacttgtggatggaatcaataagaacgaatcaagaagacgagctttgattcttttctgtttatattttcttgatataaacgcaagggatgcttatatggtatcagtggataggaaaggtttccacttgttggggaaggtaccgagtgaacaagaagctggagatgagtatcagtggagagagtttaggtttgagtttgaagaagaggtgaaagacgttgaagctttttgccaccaacttgtggaaatggaacaagaggttgtaagcaagtttactgaccataccggtttgtga

SEQ ID NO: 71742 - protein, 304 aa, Arabidopsis thaliana
  peptide (1)..(304): Ceres Seq. ID no. 4811428
  misc_feature (69)..(304): Homolog of NCBI NO: 15229211 NR Description: unknown protein; protein id: At3g04020.1 thaliana] >gi|6223647|gb|AAF05861.1|AC011698_12 unknown protein
MMKGSKANLSALAEKCKTVIVSNWQGYLNTVKPEDKASIIHTSKIKYVMRRGKPYLWVPESEPHNVNIMFDERGSFSIAHPYPGPLAALFKSIGKLPERVAFTGEIVPVKEKRVDAVKKYVEEAIQSEMKAISDTPNSVRSILNSSDQMYASRCDSLRALINDAKEKYVIYKFVPSSCMFIDPNGTKEIDLKVLELSKPDPLGTWSTKLVDGINKNESRRRALILFCLYFLDINARDAYMVSVDRKGFHLLGKVPSEQEAGDEYQWREFRFEFEEEVKDVEAFCHQLVEMEQEVVSKFTDHTGL

SEQ ID NO: 71743 - protein, 303 aa, Arabidopsis thaliana
  peptide (1)..(303): Ceres Seq. ID no. 4811429
  misc_feature (68)..(303): Homolog of NCBI NO: 15229211 NR Description: unknown protein; protein id: At3g04020.1 thaliana] >gi|6223647|gb|AAF05861.1|AC011698_12 unknown protein
MKGSKANLSALAEKCKTVIVSNWQGYLNTVKPEDKASIIHTSKIKYVMRRGKPYLWVPESEPHNVNIMFDERGSFSIAHPYPGPLAALFKSIGKLPERVAFTGEIVPVKEKRVDAVKKYVEEAIQSEMKAISDTPNSVRSILNSSDQMYASRCDSLRALINDAKEKYVIYKFVPSSCMFIDPNGTKEIDLKVLELSKPDPLGTWSTKLVDGINKNESRRRALILFCLYFLDINARDAYMVSVDRKGFHLLGKVPSEQEAGDEYQWREFRFEFEEEVKDVEAFCHQLVEMEQEVVSKFTDHTGL

SEQ ID NO: 71744 - protein, 256 aa, Arabidopsis thaliana
  peptide (1)..(256): Ceres Seq. ID no. 4811430
  misc_feature (21)..(256): Homolog of NCBI NO: 15229211 NR Description: unknown protein; protein id: At3g04020.1 thaliana] >gi|6223647|gb|AAF05861.1|AC011698_12 unknown protein
MRRGKPYLWVPESEPHNVNIMFDERGSFSIAHPYPGPLAALFKSIGKLPERVAFTGEIVPVKEKRVDAVKKYVEEAIQSEMKAISDTPNSVRSILNSSDQMYASRCDSLRALINDAKEKYVIYKFVPSSCMFIDPNGTKEIDLKVLELSKPDPLGTWSTKLVDGINKNESRRRALILFCLYFLDINARDAYMVSVDRKGFHLLGKVPSEQEAGDEYQWREFRFEFEEEVKDVEAFCHQLVEMEQEVVSKFTDHTGL

SEQ ID NO: 71745 - DNA, 387 bp, Arabidopsis thaliana
  misc_feature (1)..(387): Ceres Seq. ID no. 4811532
  misc_feature: MA Experiment ID: 20000227 Result: Down-regulated in Transcription
  misc_feature: MA Experiment 20000227 PARAMETER Experiment Name: At_Root-Tips-vs-Tops_P Parameter: Tissue Value: Root Tips vs. Root Tops
  misc_feature: MA Experiment ID: 20000265 Result: Up-regulated in Transcription
  misc_feature: MA Experiment 20000265 PARAMETER Experiment Name: At_Open_Flower_P Parameter: Age (day) Value: 21
  misc_feature: MA Experiment 20000265 PARAMETER Experiment Name: At_Open_Flower_P Parameter: Plant Line Value: WS
  misc_feature: MA Experiment 20000265 PARAMETER Experiment Name: At_Open_Flower_P Parameter: Tissue Value: Closed Flower vs. Whole Plant
  misc_feature: MA Experiment ID: 20000286 Result: Up-regulated in Transcription
  misc_feature: MA Experiment 20000286 PARAMETER Experiment Name: At_Open_Flower_P Parameter: Age (day) Value: 21
  misc_feature: MA Experiment 20000286 PARAMETER Experiment Name: At_Open_Flower_P Parameter: Plant Line Value: WS
  misc_feature: MA Experiment 20000286 PARAMETER Experiment Name: At_Open_Flower_P Parameter: Tissue Value: Half Open vs. Whole Plant
  misc_feature: MA Experiment ID: 20000439 Result: Up-regulated in Transcription
  misc_feature: MA Experiment 20000439 PARAMETER Experiment Name: At_Roots__P Parameter: Age (day) Value: 14 vs. 21
  misc_feature: MA Experiment 20000439 PARAMETER Experiment Name: At_Roots__P Parameter: Organism Value: A. thaliana
  misc_feature: MA Experiment 20000439 PARAMETER Experiment Name: At_Roots__P Parameter: Tissue Value: Roots vs. Whole Plant
atgggaagactattcgtgatagacctcgaaggactggtttatagctgcaagtattgtcagacacatttcgcagttactaatgatattatctcaaagtcatttcactgcaaacacggaagggcttatcttttcgacaatgttgtcaatgtgacggttggagagaaggagcatcgcgtcatgataactggttggcacactgtagctgacatcttctgtgttagctgtggctctcttgtcggctggaaatacgaaatcgcttacgataagtctcagaaatacaaggaaggaaaattcatcttagaaaggtttaaggtgcttgggccctatggaggaggatacgacatgaaccagaacgagcctatgactggaagcgatgatgaagaataa

SEQ ID NO: 71746 - protein, 128 aa, Arabidopsis thaliana
  peptide (1)..(128): Ceres Seq. ID no. 4811533
  misc_feature (1)..(103): Pfam Name: Yippee putative zinc-binding protein Pfam Description: Yippee putative zinc-binding protein
  misc_feature (1)..(103): Homolog of NCBI NO: 15232001 NR Description: Yippee-like protein; protein id: At3g08990.1
  misc_feature (1)..(128): Homolog of NCBI NO: 28273361 NR Description: putative zinc binding protein [Oryza sativa
  misc_feature (1)..(128): Homolog of NCBI NO: 15225631 NR Description: unknown protein; protein id: At2g40110.1, by cDNA: 16208. [Arabidopsis thaliana] >gi|25367152|pir||D84825
  misc_feature (1)..(128): Homolog of NCBI NO: 27923880 NR Description: Yippee-like protein >gi|24745964|dbj|BAC23053.1|
  misc_feature (1)..(109): Homolog of NCBI NO: 15228759 NR Description: Yippee-like protein; protein id: At3g55890.1, by cDNA: gi_15293034, supported by cDNA: gi_20259292 [Arabidopsis
  misc_feature (1)..(128): Homolog of NCBI NO: 18399156 NR Description: expressed protein; protein id: At3g11230.1,
  misc_feature (1)..(128): Homolog of NCBI NO: 21617953 NR Description: yippee-like protein [Arabidopsis thaliana]
  misc_feature (32)..(103): Homolog of NCBI NO: 27923900 NR Description: Yippee-like protein At3g08995
  misc_feature (1)..(106): Homolog of NCBI NO: 15238881 NR Description: zinc-binding protein-like; protein id:
  misc_feature (1)..(106): Homolog of NCBI NO: 34393694 NR Description: Yippee-like protein [Oryza sativa (japonica
MGRLFVIDLEGLVYSCKYCQTHFAVTNDIISKSFHCKHGRAYLFDNVVNVTVGEKEHRVMITGWHTVADIFCVSCGSLVGWKYEIAYDKSQKYKEGKFILERFKVLGPYGGGYDMNQNEPMTGSDDEE

SEQ ID NO: 71747 - protein, 69 aa, Arabidopsis thaliana
  peptide (1)..(69): Ceres Seq. ID no. 4811534
  misc_feature (1)..(44): Homolog of NCBI NO: 15232001 NR Description: Yippee-like protein; protein id: At3g08990.1
  misc_feature (1)..(69): Homolog of NCBI NO: 28273361 NR Description: putative zinc binding protein [Oryza sativa
  misc_feature (1)..(69): Homolog of NCBI NO: 15225631 NR Description: unknown protein; protein id: At2g40110.1, by cDNA: 16208. [Arabidopsis thaliana] >gi|25367152|pir||D84825
  misc_feature (1)..(69): Homolog of NCBI NO: 27923880 NR Description: Yippee-like protein >gi|24745964|dbj|BAC23053.1|
  misc_feature (1)..(50): Homolog of NCBI NO: 15228759 NR Description: Yippee-like protein; protein id: At3g55890.1, by cDNA: gi_15293034, supported by cDNA: gi_20259292 [Arabidopsis
  misc_feature (1)..(69): Homolog of NCBI NO: 18399156 NR Description: expressed protein; protein id: At3g11230.1,
  misc_feature (1)..(69): Homolog of NCBI NO: 21617953 NR Description: yippee-like protein [Arabidopsis thaliana]
  misc_feature (1)..(44): Homolog of NCBI NO: 27923900 NR Description: Yippee-like protein At3g08995
  misc_feature (1)..(47): Homolog of NCBI NO: 15238881 NR Description: zinc-binding protein-like; protein id:
  misc_feature (1)..(47): Homolog of NCBI NO: 34393694 NR Description: Yippee-like protein [Oryza sativa (japonica
MITGWHTVADIFCVSCGSLVGWKYEIAYDKSQKYKEGKFILERFKVLGPYGGGYDMNQNEPMTGSDDEE

SEQ ID NO: 71748 - DNA, 1062 bp, Arabidopsis thaliana
  misc_feature (1)..(1062): Ceres Seq. ID no. 4811686
  misc_feature: MA Experiment ID: 20000180 Result: Up-regulated in Transcription
  misc_feature: MA Experiment 20000180 PARAMETER Experiment Name: At_Germinating_Seeds_P Parameter: Age (hr) Value: 24 vs. 0
  misc_feature: MA Experiment 20000180 PARAMETER Experiment Name: At_Germinating_Seeds_P Parameter: Tissue Value: Germinating Seeds
  misc_feature: MA Experiment ID: 20000185 Result: Down-regulated in Transcription
  misc_feature: MA Experiment 20000185 PARAMETER Experiment Name: At_Roots__P Parameter: Age (day) Value: 7 vs. 21
  misc_feature: MA Experiment 20000185 PARAMETER Experiment Name: At_Roots__P Parameter: Organism Value: A. thaliana
  misc_feature: MA Experiment 20000185 PARAMETER Experiment Name: At_Roots__P Parameter: Tissue Value: Roots vs. Whole Plant
  misc_feature: MA Experiment ID: 20000234 Result: Up-regulated in Transcription
  misc_feature: MA Experiment 20000234 PARAMETER Experiment Name: At_Siliques_P Parameter: Age (day) Value: 21
  misc_feature: MA Experiment 20000234 PARAMETER Experiment Name: At_Siliques_P Parameter: Organism Value: A. thaliana
  misc_feature: MA Experiment 20000234 PARAMETER Experiment Name: At_Siliques_P Parameter: Plant Line Value: WS
  misc_feature: MA Experiment 20000234 PARAMETER Experiment Name: At_Siliques_P Parameter: Tissue Value: Less Than 5mm Siliques vs. Whole Plant
  misc_feature: MA Experiment ID: 20000265 Result: Up-regulated in Transcription
  misc_feature: MA Experiment 20000265 PARAMETER Experiment Name: At_Open_Flower_P Parameter: Age (day) Value: 21
  misc_feature: MA Experiment 20000265 PARAMETER Experiment Name: At_Open_Flower_P Parameter: Plant Line Value: WS
  misc_feature: MA Experiment 20000265 PARAMETER Experiment Name: At_Open_Flower_P Parameter: Tissue Value: Closed Flower vs. Whole Plant
  misc_feature: MA Experiment ID: 20000286 Result: Up-regulated in Transcription
  misc_feature: MA Experiment 20000286 PARAMETER Experiment Name: At_Open_Flower_P Parameter: Age (day) Value: 21
  misc_feature: MA Experiment 20000286 PARAMETER Experiment Name: At_Open_Flower_P Parameter: Plant Line Value: WS
  misc_feature: MA Experiment 20000286 PARAMETER Experiment Name: At_Open_Flower_P Parameter: Tissue Value: Half Open vs. Whole Plant
  misc_feature: MA Experiment ID: 20000437 Result: Down-regulated in Transcription
  misc_feature: MA Experiment 20000437 PARAMETER Experiment Name: At_Drought_P Parameter: Age (day) Value: 8
  misc_feature: MA Experiment 20000437 PARAMETER Experiment Name: At_Drought_P Parameter: Organism Value: A. thaliana
  misc_feature: MA Experiment 20000437 PARAMETER Experiment Name: At_Drought_P Parameter: Plant Line Value: WS
  misc_feature: MA Experiment 20000437 PARAMETER Experiment Name: At_Drought_P Parameter: Timepoint (hr) Value: 24
  misc_feature: MA Experiment 20000437 PARAMETER Experiment Name: At_Drought_P Parameter: Tissue Value: Whole Plant
  misc_feature: MA Experiment 20000437 PARAMETER Experiment Name: At_Drought_P Parameter: Treatment Value: Drought vs. No Drought
  misc_feature: MA Experiment ID: 20000439 Result: Down-regulated in Transcription
  misc_feature: MA Experiment 20000439 PARAMETER Experiment Name: At_Roots__P Parameter: Age (day) Value: 14 vs. 21
  misc_feature: MA Experiment 20000439 PARAMETER Experiment Name: At_Roots__P Parameter: Organism Value: A. thaliana
  misc_feature: MA Experiment 20000439 PARAMETER Experiment Name: At_Roots__P Parameter: Tissue Value: Roots vs. Whole Plant
  misc_feature: MA Experiment ID: 20000495 Result: Up-regulated in Transcription
  misc_feature: MA Experiment 20000495 PARAMETER Experiment Name: At_Guard_Cells_P Parameter: Harvest Date Value: 8/2/2002
  misc_feature: MA Experiment 20000495 PARAMETER Experiment Name: At_Guard_Cells_P Parameter: Organism Value: A. thaliana
  misc_feature: MA Experiment 20000495 PARAMETER Experiment Name: At_Guard_Cells_P Parameter: Tissue Value: Guard Cells vs. Leaves
  misc_feature: MA Experiment ID: 20001248 Result: Down-regulated in Transcription
  misc_feature: MA Experiment 20001248 PARAMETER Experiment Name: At_Far-red-induction_P Parameter: Age (day) Value: 7
  misc_feature: MA Experiment 20001248 PARAMETER Experiment Name: At_Far-red-induction_P Parameter: Light Value: Far-red vs. White
  misc_feature: MA Experiment 20001248 PARAMETER Experiment Name: At_Far-red-induction_P Parameter: Organism Value: A. thaliana
  misc_feature: MA Experiment 20001248 PARAMETER Experiment Name: At_Far-red-induction_P Parameter: Plant Line Value: Columbia
  misc_feature: MA Experiment 20001248 PARAMETER Experiment Name: At_Far-red-induction_P Parameter: Timepoint (hr) Value: 4
  misc_feature: MA Experiment 20001248 PARAMETER Experiment Name: At_Far-red-induction_P Parameter: Tissue Value: Whole Plant
  misc_feature: MA Experiment ID: 20001555 Result: Down-regulated in Transcription
  misc_feature: MA Experiment 20001555 PARAMETER Experiment Name: At_Drought_Soil_Dry_P Parameter: Age (day) Value: 24
  misc_feature: MA Experiment 20001555 PARAMETER Experiment Name: At_Drought_Soil_Dry_P Parameter: Organism Value: A. thaliana
  misc_feature: MA Experiment 20001555 PARAMETER Experiment Name: At_Drought_Soil_Dry_P Parameter: Plant Line Value: WS
  misc_feature: MA Experiment 20001555 PARAMETER Experiment Name: At_Drought_Soil_Dry_P Parameter: Post Timepoint (hr) Value: None
  misc_feature: MA Experiment 20001555 PARAMETER Experiment Name: At_Drought_Soil_Dry_P Parameter: Post-Treatment Value: None
  misc_feature: MA Experiment 20001555 PARAMETER Experiment Name: At_Drought_Soil_Dry_P Parameter: Timepoint (day) Value: 10
  misc_feature: MA Experiment 20001555 PARAMETER Experiment Name: At_Drought_Soil_Dry_P Parameter: Treatment Value: Drought vs. No Drought
atggaaggaatcgatcatagaatggtgagtgtcaatggcataacaatgcacattgccgagaaaggtcccaaagaaggacctgtggtgcttctcctccatggattccctgatctctggtacacgtggcgtcaccagattagtgggttatcatctctaggttaccgcgctgtagctccagacctccgaggctacggagactctgattcgccggagtctttctccgagtacacgtgtcttaacgtcgttggggacctcgtagctcttctggacagtgttgctggaaatcaagagaaggtgtttctggtcggtcatgattggggagccattatcggatggtttctctgtttgtttcgacctgaaaagattaacggctttgtgtgtttgagtgtgccgtatagatcaagaaaccctaaagtcaagcccgttcaagggttcaaggctgtatttggagatgattactacatttgtagatttcaggaaccggggaagattgaaggagagattgcaagtgcagatccaagaatatttctgaggaacctcttcacagggaggacactcggtccgccgattttacctaaggataatccctttggggaaaaacctaaccctaatagcgaaaacattgaattgcctgaatggttttctaagaaagatctcgatttctatgtctccaaattcgagaaggcaggatttaccggtggattgaactactacagagccatggatctgaattgggagctcactgcaccatggaccggagctaagattcaagttccagtgaagttcatgacaggtgacttcgacatggtgtacaccacaccagggatgaaagagtacattcacggtggtggatttgctgcagatgttccaactcttcaagagatagtgatgctggtcacttcgttaaccaagagaaacctcaagaggtcactgctcacatcaatgacttcttcaccaagcttcgggacaacaacaaaagcttttagagttctcgtttggttctattatgttggctctcaaaacaagttggttcttgcatgtgttgtttcgacaagattttga

SEQ ID NO: 71749 - protein, 353 aa, Arabidopsis thaliana
  peptide (1)..(353): Ceres Seq. ID no. 4811687
  misc_feature (54)..(298): Pfam Name: alpha/beta hydrolase fold Pfam Description: alpha/beta hydrolase fold
  misc_feature (1)..(298): Homolog of NCBI NO: 15230018 NR Description: putative epoxide hydrolase; protein id: supported by cDNA: 1355., supported by cDNA: gi_17979164 thaliana] >gi|6714450|gb|AAF26137.1|AC011620_13 putative epoxide
MEGIDHRMVSVNGITMHIAEKGPKEGPVVLLLHGFPDLWYTWRHQISGLSSLGYRAVAPDLRGYGDSDSPESFSEYTCLNVVGDLVALLDSVAGNQEKVFLVGHDWGAIIGWFLCLFRPEKINGFVCLSVPYRSRNPKVKPVQGFKAVFGDDYYICRFQEPGKIEGEIASADPRIFLRNLFTGRTLGPPILPKDNPFGEKPNPNSENIELPEWFSKKDLDFYVSKFEKAGFTGGLNYYRAMDLNWELTAPWTGAKIQVPVKFMTGDFDMVYTTPGMKEYIHGGGFAADVPTLQEIVMLVTSLTKRNLKRSLLTSMTSSPSFGTTTKAFRVLVWFYYVGSQNKLVLACVVSTRF

SEQ ID NO: 71750 - protein, 346 aa, Arabidopsis thaliana
  peptide (1)..(346): Ceres Seq. ID no. 4811688
  misc_feature (47)..(291): Pfam Name: alpha/beta hydrolase fold Pfam Description: alpha/beta hydrolase fold
  misc_feature (1)..(291): Homolog of NCBI NO: 15230018 NR Description: putative epoxide hydrolase; protein id: supported by cDNA: 1355., supported by cDNA: gi_17979164 thaliana] >gi|6714450|gb|AAF26137.1|AC011620_13 putative epoxide
MVSVNGITMHIAEKGPKEGPVVLLLHGFPDLWYTWRHQISGLSSLGYRAVAPDLRGYGDSDSPESFSEYTCLNVVGDLVALLDSVAGNQEKVFLVGHDWGAIIGWFLCLFRPEKINGFVCLSVPYRSRNPKVKPVQGFKAVFGDDYYICRFQEPGKIEGEIASADPRIFLRNLFTGRTLGPPILPKDNPFGEKPNPNSENIELPEWFSKKDLDFYVSKFEKAGFTGGLNYYRAMDLNWELTAPWTGAKIQVPVKFMTGDFDMVYTTPGMKEYIHGGGFAADVPTLQEIVMLVTSLTKRNLKRSLLTSMTSSPSFGTTTKAFRVLVWFYYVGSQNKLVLACVVSTRF

SEQ ID NO: 71751 - protein, 338 aa, Arabidopsis thaliana
  peptide (1)..(338): Ceres Seq. ID no. 4811689
  misc_feature (39)..(283): Pfam Name: alpha/beta hydrolase fold Pfam Description: alpha/beta hydrolase fold
  misc_feature (1)..(283): Homolog of NCBI NO: 15230018 NR Description: putative epoxide hydrolase; protein id: supported by cDNA: 1355., supported by cDNA: gi_17979164 thaliana] >gi|6714450|gb|AAF26137.1|AC011620_13 putative epoxide
MHIAEKGPKEGPVVLLLHGFPDLWYTWRHQISGLSSLGYRAVAPDLRGYGDSDSPESFSEYTCLNVVGDLVALLDSVAGNQEKVFLVGHDWGAIIGWFLCLFRPEKINGFVCLSVPYRSRNPKVKPVQGFKAVFGDDYYICRFQEPGKIEGEIASADPRIFLRNLFTGRTLGPPILPKDNPFGEKPNPNSENIELPEWFSKKDLDFYVSKFEKAGFTGGLNYYRAMDLNWELTAPWTGAKIQVPVKFMTGDFDMVYTTPGMKEYIHGGGFAADVPTLQEIVMLVTSLTKRNLKRSLLTSMTSSPSFGTTTKAFRVLVWFYYVGSQNKLVLACVVSTRF

SEQ ID NO: 71752 - DNA, 1002 bp, Arabidopsis thaliana
  misc_feature (1)..(1002): Ceres Seq. ID no. 4811895
  misc_feature: MA Experiment ID: 20000352 Result: Up-regulated in Transcription
  misc_feature: MA Experiment 20000352 PARAMETER Experiment Name: At_Drought_Sub_P Parameter: Age (day) Value: 7
  misc_feature: MA Experiment 20000352 PARAMETER Experiment Name: At_Drought_Sub_P Parameter: Organism Value: A. thaliana
  misc_feature: MA Experiment 20000352 PARAMETER Experiment Name: At_Drought_Sub_P Parameter: Plant Line Value: WS
  misc_feature: MA Experiment 20000352 PARAMETER Experiment Name: At_Drought_Sub_P Parameter: Timepoint (hr) Value: 6
  misc_feature: MA Experiment 20000352 PARAMETER Experiment Name: At_Drought_Sub_P Parameter: Tissue Value: Whole Plant
  misc_feature: MA Experiment 20000352 PARAMETER Experiment Name: At_Drought_Sub_P Parameter: Treatment Value: Drought vs. No Drought
atggtgcttctacttgtgattgtgggattaataagctattatgtctacaagtccataacaccgccgccaccgattccactgccggaaaatgtttccgagatatctccaagaatcaagctcaatgatggaaggcatttagcgtacaaggaattagggtttccaaaggacaaagccaaaaacaaaataataatcgtccacggaaatggaaattccaaagacgtcgatttatacatcacacaggaaatgattgatgaattcaagatatactttttgttcttcgatagagctggttatggagaaagcgatcctaatccaacacgaacgctgaaaacagatacatacgatatcgaagaacttgctgacaaattgcaagtcggtccaaagttccacgttataggcatgtcacttggagcttaccctgtttacggttgcctcaaatacattcctaataggctcagtggagcttcgttggttgttccgttagtgaatttttggtggagccgtgtgcctcaaaacttattgaatgcagcgatgaagaaattgccaattggatttcaattgacacttcgagtcgcacactactctccatggttgttatattggtggatgactcagaaatggttcccgaatagtcgaaatcccaaagatactatgaccgagcgcgacctagaactcgcggaaaagcataccaaacactcttatatcaaggagtctgctttacgacaaggtggatatgtgaccacacaacaagacatcatagcgggttacgggaattgggaatttgatccaaccgaattgaagaatccgttttcggatagtaacaaagggtcggttcatatgtggtgtgcactcgaagacaaacaaatttcacgcgatgttttactctatatatgcgataaactgccatggataaagctccatgaggtccctgatggtggacattatattatccatgagaagcggcattttgaagccattatcaaagccgcttgtagtgactag

SEQ ID NO: 71753 - protein, 333 aa, Arabidopsis thaliana
  peptide (1)..(333): Ceres Seq. ID no. 4811896
  misc_feature (88)..(329): Pfam Name: alpha/beta hydrolase fold Pfam Description: alpha/beta hydrolase fold
  misc_feature (1)..(333): Homolog of NCBI NO: 15228496 NR Description: hypothetical protein; protein id: At3g03230.1 thaliana] >gi|6714415|gb|AAF26103.1|AC012328_6 hypothetical
  misc_feature (1)..(332): Homolog of NCBI NO: 30678800 NR Description: esterase/lipase/thioesterase family [Arabidopsis
  misc_feature (1)..(332): Homolog of NCBI NO: 6714434 NR Description: hypothetical protein [Arabidopsis thaliana]
  misc_feature (2)..(329): Homolog of NCBI NO: 15242253 NR Description: putative protein; protein id: At5g22460.1, by cDNA: gi_15292740, supported by cDNA: gi_20465594 [Arabidopsis
  misc_feature (4)..(330): Homolog of NCBI NO: 21592662 NR Description: unknown [Arabidopsis thaliana]
  misc_feature (4)..(330): Homolog of NCBI NO: 18410582 NR Description: expressed protein; protein id: At1g74300.1, by cDNA: 31039. [Arabidopsis thaliana] >gi|25406334|pir||E96771
  misc_feature (2)..(314): Homolog of NCBI NO: 34908462 NR Description: P0683F02.22 [Oryza sativa (japonica
  misc_feature (2)..(329): Homolog of NCBI NO: 15228377 NR Description: putative protein; protein id: At3g48410.1, by cDNA: gi_17529095 [Arabidopsis thaliana]
  misc_feature (3)..(329): Homolog of NCBI NO: 21537089 NR Description: unknown [Arabidopsis thaliana]
  misc_feature (3)..(329): Homolog of NCBI NO: 18410575 NR Description: expressed protein; protein id: At1g74280.1, by cDNA: 119889. [Arabidopsis thaliana] >gi|25406331|pir||C96771
MVLLLVIVGLISYYVYKSITPPPPIPLPENVSEISPRIKLNDGRHLAYKELGFPKDKAKNKIIIVHGNGNSKDVDLYITQEMIDEFKIYFLFFDRAGYGESDPNPTRTLKTDTYDIEELADKLQVGPKFHVIGMSLGAYPVYGCLKYIPNRLSGASLVVPLVNFWWSRVPQNLLNAAMKKLPIGFQLTLRVAHYSPWLLYWWMTQKWFPNSRNPKDTMTERDLELAEKHTKHSYIKESALRQGGYVTTQQDIIAGYGNWEFDPTELKNPFSDSNKGSVHMWCALEDKQISRDVLLYICDKLPWIKLHEVPDGGHYIIHEKRHFEAIIKAACSD

SEQ ID NO: 71754 - protein, 252 aa, Arabidopsis thaliana
  peptide (1)..(252): Ceres Seq. ID no. 4811897
  misc_feature (7)..(248): Pfam Name: alpha/beta hydrolase fold Pfam Description: alpha/beta hydrolase fold
  misc_feature (1)..(252): Homolog of NCBI NO: 15228496 NR Description: hypothetical protein; protein id: At3g03230.1 thaliana] >gi|6714415|gb|AAF26103.1|AC012328_6 hypothetical
  misc_feature (1)..(251): Homolog of NCBI NO: 30678800 NR Description: esterase/lipase/thioesterase family [Arabidopsis
  misc_feature (1)..(251): Homolog of NCBI NO: 6714434 NR Description: hypothetical protein [Arabidopsis thaliana]
  misc_feature (1)..(248): Homolog of NCBI NO: 15242253 NR Description: putative protein; protein id: At5g22460.1, by cDNA: gi_15292740, supported by cDNA: gi_20465594 [Arabidopsis
  misc_feature (1)..(249): Homolog of NCBI NO: 21592662 NR Description: unknown [Arabidopsis thaliana]
  misc_feature (1)..(249): Homolog of NCBI NO: 18410582 NR Description: expressed protein; protein id: At1g74300.1, by cDNA: 31039. [Arabidopsis thaliana] >gi|25406334|pir||E96771
  misc_feature (1)..(233): Homolog of NCBI NO: 34908462 NR Description: P0683F02.22 [Oryza sativa (japonica
  misc_feature (1)..(248): Homolog of NCBI NO: 15228377 NR Description: putative protein; protein id: At3g48410.1, by cDNA: gi_17529095 [Arabidopsis thaliana]
  misc_feature (1)..(248): Homolog of NCBI NO: 21537089 NR Description: unknown [Arabidopsis thaliana]
  misc_feature (1)..(248): Homolog of NCBI NO: 18410575 NR Description: expressed protein; protein id: At1g74280.1, by cDNA: 119889. [Arabidopsis thaliana] >gi|25406331|pir||C96771
MIDEFKIYFLFFDRAGYGESDPNPTRTLKTDTYDIEELADKLQVGPKFHVIGMSLGAYPVYGCLKYIPNRLSGASLVVPLVNFWWSRVPQNLLNAAMKKLPIGFQLTLRVAHYSPWLLYWWMTQKWFPNSRNPKDTMTERDLELAEKHTKHSYIKESALRQGGYVTTQQDIIAGYGNWEFDPTELKNPFSDSNKGSVHMWCALEDKQISRDVLLYICDKLPWIKLHEVPDGGHYIIHEKRHFEAIIKAACSD

SEQ ID NO: 71755 - protein, 200 aa, Arabidopsis thaliana
  peptide (1)..(200): Ceres Seq. ID no. 4811898
  misc_feature (1)..(196): Pfam Name: alpha/beta hydrolase fold Pfam Description: alpha/beta hydrolase fold
  misc_feature (1)..(197): Homolog of NCBI NO: 18410582 NR Description: expressed protein; protein id: At1g74300.1, by cDNA: 31039. [Arabidopsis thaliana] >gi|25406334|pir||E96771
  misc_feature (1)..(181): Homolog of NCBI NO: 34908462 NR Description: P0683F02.22 [Oryza sativa (japonica
  misc_feature (1)..(196): Homolog of NCBI NO: 15228377 NR Description: putative protein; protein id: At3g48410.1, by cDNA: gi_17529095 [Arabidopsis thaliana]
  misc_feature (1)..(199): Homolog of NCBI NO: 30678800 NR Description: esterase/lipase/thioesterase family [Arabidopsis
  misc_feature (1)..(196): Homolog of NCBI NO: 15242253 NR Description: putative protein; protein id: At5g22460.1, by cDNA: gi_15292740, supported by cDNA: gi_20465594 [Arabidopsis
  misc_feature (1)..(197): Homolog of NCBI NO: 21592662 NR Description: unknown [Arabidopsis thaliana]
  misc_feature (1)..(199): Homolog of NCBI NO: 6714434 NR Description: hypothetical protein [Arabidopsis thaliana]
  misc_feature (1)..(200): Homolog of NCBI NO: 15228496 NR Description: hypothetical protein; protein id: At3g03230.1 thaliana] >gi|6714415|gb|AAF26103.1|AC012328_6 hypothetical
  misc_feature (1)..(196): Homolog of NCBI NO: 21537089 NR Description: unknown [Arabidopsis thaliana]
  misc_feature (1)..(196): Homolog of NCBI NO: 18410575 NR Description: expressed protein; protein id: At1g74280.1, by cDNA: 119889. [Arabidopsis thaliana] >gi|25406331|pir||C96771
MSLGAYPVYGCLKYIPNRLSGASLVVPLVNFWWSRVPQNLLNAAMKKLPIGFQLTLRVAHYSPWLLYWWMTQKWFPNSRNPKDTMTERDLELAEKHTKHSYIKESALRQGGYVTTQQDIIAGYGNWEFDPTELKNPFSDSNKGSVHMWCALEDKQISRDVLLYICDKLPWIKLHEVPDGGHYIIHEKRHFEAIIKAACSD

SEQ ID NO: 71756 - DNA, 2292 bp, Arabidopsis thaliana
  misc_feature (1)..(2292): Ceres Seq. ID no. 4812114
  misc_feature: MA Experiment ID: 20000307 Result: Down-regulated in Transcription
  misc_feature: MA Experiment 20000307 PARAMETER Experiment Name: At_Germinating_Seeds_Sub_P Parameter: Age (hr) Value: 24 vs. 0
  misc_feature: MA Experiment 20000307 PARAMETER Experiment Name: At_Germinating_Seeds_Sub_P Parameter: Organism Value: A. thaliana
  misc_feature: MA Experiment 20000307 PARAMETER Experiment Name: At_Germinating_Seeds_Sub_P Parameter: Plant Line Value: WS
  misc_feature: MA Experiment 20000307 PARAMETER Experiment Name: At_Germinating_Seeds_Sub_P Parameter: Tissue Value: Germinating Seeds
  misc_feature: MA Experiment ID: 20000315 Result: Down-regulated in Transcription
  misc_feature: MA Experiment 20000315 PARAMETER Experiment Name: At_14day_Shoots-Roots_Sub_P Parameter: Age (day) Value: 14
  misc_feature: MA Experiment 20000315 PARAMETER Experiment Name: At_14day_Shoots-Roots_Sub_P Parameter: Organism Value: A. thaliana
  misc_feature: MA Experiment 20000315 PARAMETER Experiment Name: At_14day_Shoots-Roots_Sub_P Parameter: Plant Line Value: WS
  misc_feature: MA Experiment 20000315 PARAMETER Experiment Name: At_14day_Shoots-Roots_Sub_P Parameter: Tissue Value: Shoots vs. Whole Plant
  misc_feature: MA Experiment ID: 20000355 Result: Down-regulated in Transcription
  misc_feature: MA Experiment 20000355 PARAMETER Experiment Name: At_Siliques_Sub_P Parameter: Age (day) Value: 21
  misc_feature: MA Experiment 20000355 PARAMETER Experiment Name: At_Siliques_Sub_P Parameter: Organism Value: A. thaliana
  misc_feature: MA Experiment 20000355 PARAMETER Experiment Name: At_Siliques_Sub_P Parameter: Plant Line Value: WS
  misc_feature: MA Experiment 20000355 PARAMETER Experiment Name: At_Siliques_Sub_P Parameter: Tissue Value: Less Than 5mm Siliques vs. Whole Plant
atggttaagcttcttcaagacccgattacacctaacaaggagctgctgaagaagatgatagagctagagaaaagtcaggagcatctaatgcaggagatgtctcggctcaaggtctccacggagcttcggaaggagagccgtatccagtgttccatgaatctgagaccatcgccctggaagttcactcataaacagtatctcaatattttgcagtccatggcacaatctgttcatgccttcgatctcaatatgcgaattatcttttggaatgctatggcggaaaaggtttatgggtactctgctgcagaagcagttggacagaaccctattgacgttatggtagatgatcgggatgctccctttgccatgactattgctcaactttgttccaatggagagagctggactggcaagtttcctgtcaagcgcagaacaggagagaaattctcagctgtcactacgtgttcccccttctatgctgatgacggttctcttattgggatcgtttctatcacaagtgacgtagcaccatatctgaacccaacaatctctttggctaaattaaaggcttcagaagtcgaaaccagctctacccctgcaaggaatagttttgcctttaaacttgggttggacaccaaaggagctgttgtatcgaaacttggccttgattctgatcagcctatacaagttgctatagcatcaaagatatctgatttggcatccaaggtgagaaacaaggtcaggtcgaaaatgccagcaggtgatagtagtgtcacagtatttgagggtgaaactggggatagtcatcattcagatcatggagtcttcggtgctactctctctgaccacatggatgatgcagcatcaagtggtgctagcacaccaagaggggactttatccaatctccttttggtgtattcacatgtaacgatgacaagttttcttccgaacccttcatagattccagtgatggatatcctataacccttttcacctcaaaagctgaagaatggatggtaaagaaaggtttgtcttggccatggaaagggaatgagcaggaaggttcaagagtaaagcctacttattctgtatggccttgtgtacagaatgaacaaaagaaagataagtctcaccagatcaaccgctattctggtgttaagtctaaaagccatgcctctgaaagtaataagcctaccaataacaaggcttctggtttgcggtcttcttgtataaatgcgaacagcgctattagccgtggaattatcagtcacagtactatgaacaaggtggatacaaatagtaattgcttggagtatgaaattttgtgggatgatttgacaatcggagaacaaatcggacaaggctcatgtggaactgtctatcacggtctttggtttggatctgatgtagctgtaaaattgatctccaaacaagaatattcagaagaggtcatacaatcttttagacaagaggtatcgttgatgcaaagacttagacatcctaacgttctgctgtttatgggagctgtgactttacctcagggtctctgtatagtgtcagagttccttccacgtggaagtctatttcgtctactgcagagaaatatgtcaaaacttgattggaggcggcgtatcaatatggccttggacattgctcgcggcatgaattatcttcaccgctgtagtccccccatcatccatcgtgatttgaagtcatcaaatctgctggtagacaagaacttgaccgttaaggtagctgactttggtctatcgcgtattaagcatcatacatacctaaccagcaagtcgggaaagggaatgcctcaatggatggcaccagaagttcttcgaaatgagtctgctgatgagaagtctgacatttacagctttggagtagtactatgggagcttgccacagagaagatcccatgggaaaatctcaactcgatgcaggtgatcggagctgtggggttcatgaaccagaggctggaaattccaaaggacattgatcctgattggatctcactaatagagagctgttggcacagggatgcaaagctgagacccacattccaagaactgatggagagactaagagacctgcaaagaaagtatacaatacagttccaagcgactcgtgctgcgttatctgacaaaaacaaagaaagagagaaagagagagttggtctttttgaacaacaacaattggtggaaacatgctgtgctggtgtgccaatgtcttccaccattgaacaaggttatggcattgaaaatatcatgaaggttggttga

SEQ ID NO: 71757 - protein, 763 aa, Arabidopsis thaliana
  peptide (1)..(763): Ceres Seq. ID no. 4812115
  misc_feature (446)..(698): Pfam Name: Protein kinase domain Pfam Description: Protein kinase domain
  misc_feature (39)..(720): Homolog of NCBI NO: 15230753 NR Description: protein kinase, putative; protein id:
  misc_feature (5)..(46): Homolog of NCBI NO: 15230753 NR Description: protein kinase, putative; protein id:
  misc_feature (13)..(683): Homolog of NCBI NO: 15230754 NR Description: protein kinase, putative; protein id: At3g06630.1
  misc_feature (39)..(725): Homolog of NCBI NO: 18408889 NR Description: putative protein kinase; protein id: At1g67890.1,
  misc_feature (5)..(57): Homolog of NCBI NO: 18408889 NR Description: putative protein kinase; protein id: At1g67890.1,
  misc_feature (39)..(725): Homolog of NCBI NO: 16604649 NR Description: putative protein kinase [Arabidopsis thaliana]
  misc_feature (5)..(57): Homolog of NCBI NO: 16604649 NR Description: putative protein kinase [Arabidopsis thaliana]
  misc_feature (39)..(683): Homolog of NCBI NO: 25404682 NR Description: hypothetical protein T23K23.26 [imported] -
  misc_feature (5)..(57): Homolog of NCBI NO: 25404682 NR Description: hypothetical protein T23K23.26 [imported] -
  misc_feature (251)..(725): Homolog of NCBI NO: 22327668 NR Description: protein kinase; protein id: At5g49470.1,
MVKLLQDPITPNKELLKKMIELEKSQEHLMQEMSRLKVSTELRKESRIQCSMNLRPSPWKFTHKQYLNILQSMAQSVHAFDLNMRIIFWNAMAEKVYGYSAAEAVGQNPIDVMVDDRDAPFAMTIAQLCSNGESWTGKFPVKRRTGEKFSAVTTCSPFYADDGSLIGIVSITSDVAPYLNPTISLAKLKASEVETSSTPARNSFAFKLGLDTKGAVVSKLGLDSDQPIQVAIASKISDLASKVRNKVRSKMPAGDSSVTVFEGETGDSHHSDHGVFGATLSDHMDDAASSGASTPRGDFIQSPFGVFTCNDDKFSSEPFIDSSDGYPITLFTSKAEEWMVKKGLSWPWKGNEQEGSRVKPTYSVWPCVQNEQKKDKSHQINRYSGVKSKSHASESNKPTNNKASGLRSSCINANSAISRGIISHSTMNKVDTNSNCLEYEILWDDLTIGEQIGQGSCGTVYHGLWFGSDVAVKLISKQEYSEEVIQSFRQEVSLMQRLRHPNVLLFMGAVTLPQGLCIVSEFLPRGSLFRLLQRNMSKLDWRRRINMALDIARGMNYLHRCSPPIIHRDLKSSNLLVDKNLTVKVADFGLSRIKHHTYLTSKSGKGMPQWMAPEVLRNESADEKSDIYSFGVVLWELATEKIPWENLNSMQVIGAVGFMNQRLEIPKDIDPDWISLIESCWHRDAKLRPTFQELMERLRDLQRKYTIQFQATRAALSDKNKEREKERVGLFEQQQLVETCCAGVPMSSTIEQGYGIENIMKVG

SEQ ID NO: 71758 - protein, 745 aa, Arabidopsis thaliana
  peptide (1)..(745): Ceres Seq. ID no. 4812116
  misc_feature (428)..(680): Pfam Name: Protein kinase domain Pfam Description: Protein kinase domain
  misc_feature (21)..(702): Homolog of NCBI NO: 15230753 NR Description: protein kinase, putative; protein id:
  misc_feature (1)..(28): Homolog of NCBI NO: 15230753 NR Description: protein kinase, putative; protein id:
  misc_feature (1)..(665): Homolog of NCBI NO: 15230754 NR Description: protein kinase, putative; protein id: At3g06630.1
  misc_feature (21)..(707): Homolog of NCBI NO: 18408889 NR Description: putative protein kinase; protein id: At1g67890.1,
  misc_feature (1)..(39): Homolog of NCBI NO: 18408889 NR Description: putative protein kinase; protein id: At1g67890.1,
  misc_feature (21)..(707): Homolog of NCBI NO: 16604649 NR Description: putative protein kinase [Arabidopsis thaliana]
  misc_feature (1)..(39): Homolog of NCBI NO: 16604649 NR Description: putative protein kinase [Arabidopsis thaliana]
  misc_feature (21)..(665): Homolog of NCBI NO: 25404682 NR Description: hypothetical protein T23K23.26 [imported] -
  misc_feature (1)..(39): Homolog of NCBI NO: 25404682 NR Description: hypothetical protein T23K23.26 [imported] -
  misc_feature (233)..(707): Homolog of NCBI NO: 22327668 NR Description: protein kinase; protein id: At5g49470.1,
MIELEKSQEHLMQEMSRLKVSTELRKESRIQCSMNLRPSPWKFTHKQYLNILQSMAQSVHAFDLNMRIIFWNAMAEKVYGYSAAEAVGQNPIDVMVDDRDAPFAMTIAQLCSNGESWTGKFPVKRRTGEKFSAVTTCSPFYADDGSLIGIVSITSDVAPYLNPTISLAKLKASEVETSSTPARNSFAFKLGLDTKGAVVSKLGLDSDQPIQVAIASKISDLASKVRNKVRSKMPAGDSSVTVFEGETGDSHHSDHGVFGATLSDHMDDAASSGASTPRGDFIQSPFGVFTCNDDKFSSEPFIDSSDGYPITLFTSKAEEWMVKKGLSWPWKGNEQEGSRVKPTYSVWPCVQNEQKKDKSHQINRYSGVKSKSHASESNKPTNNKASGLRSSCINANSAISRGIISHSTMNKVDTNSNCLEYEILWDDLTIGEQIGQGSCGTVYHGLWFGSDVAVKLISKQEYSEEVIQSFRQEVSLMQRLRHPNVLLFMGAVTLPQGLCIVSEFLPRGSLFRLLQRNMSKLDWRRRINMALDIARGMNYLHRCSPPIIHRDLKSSNLLVDKNLTVKVADFGLSRIKHHTYLTSKSGKGMPQWMAPEVLRNESADEKSDIYSFGVVLWELATEKIPWENLNSMQVIGAVGFMNQRLEIPKDIDPDWISLIESCWHRDAKLRPTFQELMERLRDLQRKYTIQFQATRAALSDKNKEREKERVGLFEQQQLVETCCAGVPMSSTIEQGYGIENIMKVG

SEQ ID NO: 71759 - protein, 734 aa, Arabidopsis thaliana
  peptide (1)..(734): Ceres Seq. ID no. 4812117
  misc_feature (417)..(669): Pfam Name: Protein kinase domain Pfam Description: Protein kinase domain
  misc_feature (10)..(691): Homolog of NCBI NO: 15230753 NR Description: protein kinase, putative; protein id:
  misc_feature (1)..(17): Homolog of NCBI NO: 15230753 NR Description: protein kinase, putative; protein id:
  misc_feature (1)..(654): Homolog of NCBI NO: 15230754 NR Description: protein kinase, putative; protein id: At3g06630.1
  misc_feature (10)..(696): Homolog of NCBI NO: 18408889 NR Description: putative protein kinase; protein id: At1g67890.1,
  misc_feature (1)..(28): Homolog of NCBI NO: 18408889 NR Description: putative protein kinase; protein id: At1g67890.1,
  misc_feature (10)..(696): Homolog of NCBI NO: 16604649 NR Description: putative protein kinase [Arabidopsis thaliana]
  misc_feature (1)..(28): Homolog of NCBI NO: 16604649 NR Description: putative protein kinase [Arabidopsis thaliana]
  misc_feature (10)..(654): Homolog of NCBI NO: 25404682 NR Description: hypothetical protein T23K23.26 [imported] -
  misc_feature (1)..(28): Homolog of NCBI NO: 25404682 NR Description: hypothetical protein T23K23.26 [imported] -
  misc_feature (222)..(696): Homolog of NCBI NO: 22327668 NR Description: protein kinase; protein id: At5g49470.1,
MQEMSRLKVSTELRKESRIQCSMNLRPSPWKFTHKQYLNILQSMAQSVHAFDLNMRIIFWNAMAEKVYGYSAAEAVGQNPIDVMVDDRDAPFAMTIAQLCSNGESWTGKFPVKRRTGEKFSAVTTCSPFYADDGSLIGIVSITSDVAPYLNPTISLAKLKASEVETSSTPARNSFAFKLGLDTKGAVVSKLGLDSDQPIQVAIASKISDLASKVRNKVRSKMPAGDSSVTVFEGETGDSHHSDHGVFGATLSDHMDDAASSGASTPRGDFIQSPFGVFTCNDDKFSSEPFIDSSDGYPITLFTSKAEEWMVKKGLSWPWKGNEQEGSRVKPTYSVWPCVQNEQKKDKSHQINRYSGVKSKSHASESNKPTNNKASGLRSSCINANSAISRGIISHSTMNKVDTNSNCLEYEILWDDLTIGEQIGQGSCGTVYHGLWFGSDVAVKLISKQEYSEEVIQSFRQEVSLMQRLRHPNVLLFMGAVTLPQGLCIVSEFLPRGSLFRLLQRNMSKLDWRRRINMALDIARGMNYLHRCSPPIIHRDLKSSNLLVDKNLTVKVADFGLSRIKHHTYLTSKSGKGMPQWMAPEVLRNESADEKSDIYSFGVVLWELATEKIPWENLNSMQVIGAVGFMNQRLEIPKDIDPDWISLIESCWHRDAKLRPTFQELMERLRDLQRKYTIQFQATRAALSDKNKEREKERVGLFEQQQLVETCCAGVPMSSTIEQGYGIENIMKVG

SEQ ID NO: 71760 - DNA, 3765 bp, Arabidopsis thaliana
  misc_feature (1)..(3765): Ceres Seq. ID no. 4812743
  misc_feature: MA Experiment ID: 20000306 Result: Down-regulated in Transcription
  misc_feature: MA Experiment 20000306 PARAMETER Experiment Name: At_Germinating_Seeds_Sub_P Parameter: Age (hr) Value: 6 vs. 0
  misc_feature: MA Experiment 20000306 PARAMETER Experiment Name: At_Germinating_Seeds_Sub_P Parameter: Organism Value: A. thaliana
  misc_feature: MA Experiment 20000306 PARAMETER Experiment Name: At_Germinating_Seeds_Sub_P Parameter: Plant Line Value: WS
  misc_feature: MA Experiment 20000306 PARAMETER Experiment Name: At_Germinating_Seeds_Sub_P Parameter: Tissue Value: Germinating Seeds
  misc_feature: MA Experiment ID: 20000327 Result: Down-regulated in Transcription
  misc_feature: MA Experiment 20000327 PARAMETER Experiment Name: At_42deg_Heat_Sub_P Parameter: Age (day) Value: 14
  misc_feature: MA Experiment 20000327 PARAMETER Experiment Name: At_42deg_Heat_Sub_P Parameter: Organism Value: A. thaliana
  misc_feature: MA Experiment 20000327 PARAMETER Experiment Name: At_42deg_Heat_Sub_P Parameter: Plant Line Value: WS
  misc_feature: MA Experiment 20000327 PARAMETER Experiment Name: At_42deg_Heat_Sub_P Parameter: Temperature (deg C) Value: 42 vs. 22
  misc_feature: MA Experiment 20000327 PARAMETER Experiment Name: At_42deg_Heat_Sub_P Parameter: Timepoint (hr) Value: 1
  misc_feature: MA Experiment 20000327 PARAMETER Experiment Name: At_42deg_Heat_Sub_P Parameter: Tissue Value: Aerial
  misc_feature: MA Experiment ID: 20000328 Result: Down-regulated in Transcription
  misc_feature: MA Experiment 20000328 PARAMETER Experiment Name: At_42deg_Heat_Sub_P Parameter: Age (day) Value: 14
  misc_feature: MA Experiment 20000328 PARAMETER Experiment Name: At_42deg_Heat_Sub_P Parameter: Organism Value: A. thaliana
  misc_feature: MA Experiment 20000328 PARAMETER Experiment Name: At_42deg_Heat_Sub_P Parameter: Plant Line Value: WS
  misc_feature: MA Experiment 20000328 PARAMETER Experiment Name: At_42deg_Heat_Sub_P Parameter: Temperature (deg C) Value: 42 vs. 22
  misc_feature: MA Experiment 20000328 PARAMETER Experiment Name: At_42deg_Heat_Sub_P Parameter: Timepoint (hr) Value: 6
  misc_feature: MA Experiment 20000328 PARAMETER Experiment Name: At_42deg_Heat_Sub_P Parameter: Tissue Value: Aerial
atggataacatagaaccaccctttagtggaaacatccatgctgagaccgaagtaaagaaggaggagaagaaaaagatgaagaaggaatcggtgtcattgatgggtttgtttagtgcagctgataatgttgattactttctgatgtttcttgggggtttaggcacgtgtattcatggcggtacgcttccgctcttcttcgtgttcttcgggggaatgctagattctcttgggaagctttctacagacccgaatgccatatcttctcgcgtttcacagaatgctctgtacttggtctacttaggattggtcaatttggtatcagcctggattggttcaaatggtatattggcaggagttgcttgttggatgcaaacaggggaaagacaaacagcgcgattgcgtataaattatctcaaatcaatcttagcaaaagatattactttctttgatactgaagctagagattcaaacttcattttccacatctcaagcgacgcaatcttggttcaagatgccattggcgataagaccggccatgttttgcggtacctatgtcagttcatcgcgggatttgtcatcggttttttgtcagtatggcaactaacgttgcttacgttaggagtggttccactgatagcaattgcaggaggagggtatgctatagtcatgtctacaatatcagagaagagtgaggctgcttatgctgatgcaggaaaagttgcagaagaggtcatgtcacaggtgagaacagtgtatgcatttgtaggagaagagaaagctgtaaaatcttactcaaattctctcaagaaagctctgaaactcagtaaaagaagtggtcttgctaaaggtttaggagttggattaacatatagcctcttgttctgtgcttgggcattgcttttttggtatgcaagtcttcttgtacgccatggcaaaaccaacggcgcaaaagccttcacaacaatcctcaatgtcatttacagcggattcgccttaggtcaagccgtgcctagcttatccgcaatttctaaaggcagagttgctgctgcaaatattttcaaaatgataggaaacaacaatcttgaaagctctgagagattagaaaacggaacaacattgcaaaacgtagttggcaagattgagttttgtggagtttcgttcgcatatccttcgagaccaaacatggtttttgagaatcttagtttcacgatacattcaggcaagacttttgcatttgtcggtccaagtggttcggggaaaagcacaatcatatcaatggtgcaacgtttctatgaacctagatcaggggagattctcttggatggaaatgacatcaagaacctgaagctgaaatggttgagagaacagatgggattagtgagtcaagaaccagcattattcgccacaacaatagcttctaatattcttctcggtaaagagaaagccaatatggatcagatcatagaagctgctaaagcagccaacgcagattctttcattaaatcattacctaatggttacaatactcaggttggagaaggaggaactcaactttcaggagggcagaaacagaggattgctattgctcgggcggttctaagaaatccaaagatattacttttagatgaagcaacaagcgctcttgatgccgaatcagagaagattgttcagcaagcacttgacaatgtcatggaaaaaagaacaacaatcgtcattgcacatagattatccaccattcgaaatgttgacaagattgttgtcttgagagatggtcaagttagggaaaccggaagtcactcagaactgatatcaagaggaggagattatgccactcttgtaaattgtcaagacacagaacctcaagaaaacttgagatcagtcatgtatgaatcttgtaggtctcaagctggatcatatagttcaagaagagtttttagctcaagaaggacttcaagcttcagggaagaccaagagaagactgaaaaagattcaaaaggcgaagatttaataagctcgtcctcaatgatatgggaactaataaagttgaatgctccagaatggctttatgcattacttggctcaattggtgccgttcttgccggatcacaaccggcattgttctccatggggcttgcttacgtgttaaccacgttttattcaccttttcctagtctgatcaagcgtgaagtcgataaggtagctattatctttgttggagctggaatagtaacagcgcctatatacattctccaacattacttctatacactaatgggagagcgtcttacttctcgggttcgcttatccttgttctcagcgattctttcaaatgagattggatggtttgatctggatgagaacaacactggctcactcacttcaatcttagctgctgatgcaaccttggtgaggagtgctatagcggatcgtctatcgacaatagtccaaaacttgtctcttacaatcacagccttagcacttgcctttttctacagttggcgtgttgcagctgtcgtaacagcttgttttcctcttctcattgccgcttcacttaccgagcaattatttctaaaaggctttggaggagattacacaagggcttactctagggcaacttcattggcgcgtgaagcgatttcgaatataagaaccgtcgctgcatttagtgctgaaaagcaaatctcagaacagtttacttgtgaactaagcaaacccaccaagagtgccttactcagaggtcatatctcgggatttggatacggtttgtcacagtgtctcgcgttctgttcctacgcacttggtctctggtatatctcagttctgattaagcgcaacgagaccaactttgaggatagtatcaaatctttcatggtattgctcgtcactgcttactccgtagcggaaacgcttgcgttaaccccagatatcgtgaagggcacacaagcactcgggtccgtatttagggttttacatagagagactgaaatacctccagaccagcctaactcaagattggtcactcatatcaaaggagatatagagtttagaaacgtgagctttgcgtatcccactagacccgaaatcgccattttcaaaaatctaaatctccgagtttcagccgggaagagtcttgcggtcgtgggacctagtggttcgggaaagagcacagtgatcggactaatcatgagattctacgatccgagcaacggaaatctctgtatcgatgggcatgatataaaatctgtaaacctacgtagcttgcgcaagaagctagcgttagttcagcaagaaccggctctgttttcaacatccatacacgagaacatcaagtatgggaacgagaacgcgtcagaggcagagatcattgaagccgcaaaagccgcgaacgcgcacgagttcataagcaggatggaagaagggtacatgactcacgtgggtgataagggagtgcagttatcaggtgggcaaaaacagagagtggctatcgcacgggcagttctaaaagatccttcagtgcttctccttgatgaggcaacaagtgctttggatacgagcgcagagaaacaggtccaagaggcgctagacaagttgatgaagggacgaaccacgattctggtggctcacaggctctcgaccataagaaaagcagacacaatcgttgtattgcataaaggaaaagttgtggagaaaggaagtcacagagaacttgtatctaaatccgatgggttttataagaaattgacgagtcttcaagaagcggtgtga

SEQ ID NO: 71761 - protein, 1254 aa, Arabidopsis thaliana
  peptide (1)..(1254): Ceres Seq. ID no. 4812744
  misc_feature (686)..(966): Pfam Name: ABC transporter transmembrane region Pfam Description: ABC transporter transmembrane region
  misc_feature (673)..(1251): Homolog of NCBI NO: 27368845 NR Description: MDR-like ABC transporter [Oryza sativa (japonica
  misc_feature (36)..(517): Homolog of NCBI NO: 27368845 NR Description: MDR-like ABC transporter [Oryza sativa (japonica
  misc_feature (510)..(722): Homolog of NCBI NO: 27368845 NR Description: MDR-like ABC transporter [Oryza sativa (japonica
  misc_feature (5)..(672): Homolog of NCBI NO: 38049160 NR Description: P-glycoprotein 1 [Sorghum bicolor]
  misc_feature (595)..(1251): Homolog of NCBI NO: 38049160 NR Description: P-glycoprotein 1 [Sorghum bicolor]
  misc_feature (527)..(1253): Homolog of NCBI NO: 34913530 NR Description: putative multidrug resistance protein [Oryza
  misc_feature (31)..(659): Homolog of NCBI NO: 34913530 NR Description: putative multidrug resistance protein [Oryza
  misc_feature (30)..(617): Homolog of NCBI NO: 27368853 NR Description: MDR-like ABC transporter [Oryza sativa (japonica
  misc_feature (677)..(1247): Homolog of NCBI NO: 27368853 NR Description: MDR-like ABC transporter [Oryza sativa (japonica
  misc_feature (12)..(942): Homolog of NCBI NO: 18496818 NR Description: ABC transporter AbcB3 [Dictyostelium discoideum]
MDNIEPPFSGNIHAETEVKKEEKKKMKKESVSLMGLFSAADNVDYFLMFLGGLGTCIHGGTLPLFFVFFGGMLDSLGKLSTDPNAISSRVSQNALYLVYLGLVNLVSAWIGSNGILAGVACWMQTGERQTARLRINYLKSILAKDITFFDTEARDSNFIFHISSDAILVQDAIGDKTGHVLRYLCQFIAGFVIGFLSVWQLTLLTLGVVPLIAIAGGGYAIVMSTISEKSEAAYADAGKVAEEVMSQVRTVYAFVGEEKAVKSYSNSLKKALKLSKRSGLAKGLGVGLTYSLLFCAWALLFWYASLLVRHGKTNGAKAFTTILNVIYSGFALGQAVPSLSAISKGRVAAANIFKMIGNNNLESSERLENGTTLQNVVGKIEFCGVSFAYPSRPNMVFENLSFTIHSGKTFAFVGPSGSGKSTIISMVQRFYEPRSGEILLDGNDIKNLKLKWLREQMGLVSQEPALFATTIASNILLGKEKANMDQIIEAAKAANADSFIKSLPNGYNTQVGEGGTQLSGGQKQRIAIARAVLRNPKILLLDEATSALDAESEKIVQQALDNVMEKRTTIVIAHRLSTIRNVDKIVVLRDGQVRETGSHSELISRGGDYATLVNCQDTEPQENLRSVMYESCRSQAGSYSSRRVFSSRRTSSFREDQEKTEKDSKGEDLISSSSMIWELIKLNAPEWLYALLGSIGAVLAGSQPALFSMGLAYVLTTFYSPFPSLIKREVDKVAIIFVGAGIVTAPIYILQHYFYTLMGERLTSRVRLSLFSAILSNEIGWFDLDENNTGSLTSILAADATLVRSAIADRLSTIVQNLSLTITALALAFFYSWRVAAVVTACFPLLIAASLTEQLFLKGFGGDYTRAYSRATSLAREAISNIRTVAAFSAEKQISEQFTCELSKPTKSALLRGHISGFGYGLSQCLAFCSYALGLWYISVLIKRNETNFEDSIKSFMVLLVTAYSVAETLALTPDIVKGTQALGSVFRVLHRETEIPPDQPNSRLVTHIKGDIEFRNVSFAYPTRPEIAIFKNLNLRVSAGKSLAVVGPSGSGKSTVIGLIMRFYDPSNGNLCIDGHDIKSVNLRSLRKKLALVQQEPALFSTSIHENIKYGNENASEAEIIEAAKAANAHEFISRMEEGYMTHVGDKGVQLSGGQKQRVAIARAVLKDPSVLLLDEATSALDTSAEKQVQEALDKLMKGRTTILVAHRLSTIRKADTIVVLHKGKVVEKGSHRELVSKSDGFYKKLTSLQEAV

SEQ ID NO: 71762 - protein, 1229 aa, Arabidopsis thaliana
  peptide (1)..(1229): Ceres Seq. ID no. 4812745
  misc_feature (661)..(941): Pfam Name: ABC transporter transmembrane region Pfam Description: ABC transporter transmembrane region
  misc_feature (648)..(1226): Homolog of NCBI NO: 27368845 NR Description: MDR-like ABC transporter [Oryza sativa (japonica
  misc_feature (11)..(492): Homolog of NCBI NO: 27368845 NR Description: MDR-like ABC transporter [Oryza sativa (japonica
  misc_feature (485)..(697): Homolog of NCBI NO: 27368845 NR Description: MDR-like ABC transporter [Oryza sativa (japonica
  misc_feature (1)..(647): Homolog of NCBI NO: 38049160 NR Description: P-glycoprotein 1 [Sorghum bicolor]
  misc_feature (570)..(1226): Homolog of NCBI NO: 38049160 NR Description: P-glycoprotein 1 [Sorghum bicolor]
  misc_feature (502)..(1228): Homolog of NCBI NO: 34913530 NR Description: putative multidrug resistance protein [Oryza
  misc_feature (6)..(634): Homolog of NCBI NO: 34913530 NR Description: putative multidrug resistance protein [Oryza
  misc_feature (5)..(592): Homolog of NCBI NO: 27368853 NR Description: MDR-like ABC transporter [Oryza sativa (japonica
  misc_feature (652)..(1222): Homolog of NCBI NO: 27368853 NR Description: MDR-like ABC transporter [Oryza sativa (japonica
  misc_feature (1)..(917): Homolog of NCBI NO: 18496818 NR Description: ABC transporter AbcB3 [Dictyostelium discoideum]
MKKESVSLMGLFSAADNVDYFLMFLGGLGTCIHGGTLPLFFVFFGGMLDSLGKLSTDPNAISSRVSQNALYLVYLGLVNLVSAWIGSNGILAGVACWMQTGERQTARLRINYLKSILAKDITFFDTEARDSNFIFHISSDAILVQDAIGDKTGHVLRYLCQFIAGFVIGFLSVWQLTLLTLGVVPLIAIAGGGYAIVMSTISEKSEAAYADAGKVAEEVMSQVRTVYAFVGEEKAVKSYSNSLKKALKLSKRSGLAKGLGVGLTYSLLFCAWALLFWYASLLVRHGKTNGAKAFTTILNVIYSGFALGQAVPSLSAISKGRVAAANIFKMIGNNNLESSERLENGTTLQNVVGKIEFCGVSFAYPSRPNMVFENLSFTIHSGKTFAFVGPSGSGKSTIISMVQRFYEPRSGEILLDGNDIKNLKLKWLREQMGLVSQEPALFATTIASNILLGKEKANMDQIIEAAKAANADSFIKSLPNGYNTQVGEGGTQLSGGQKQRIAIARAVLRNPKILLLDEATSALDAESEKIVQQALDNVMEKRTTIVIAHRLSTIRNVDKIVVLRDGQVRETGSHSELISRGGDYATLVNCQDTEPQENLRSVMYESCRSQAGSYSSRRVFSSRRTSSFREDQEKTEKDSKGEDLISSSSMIWELIKLNAPEWLYALLGSIGAVLAGSQPALFSMGLAYVLTTFYSPFPSLIKREVDKVAIIFVGAGIVTAPIYILQHYFYTLMGERLTSRVRLSLFSAILSNEIGWFDLDENNTGSLTSILAADATLVRSAIADRLSTIVQNLSLTITALALAFFYSWRVAAVVTACFPLLIAASLTEQLFLKGFGGDYTRAYSRATSLAREAISNIRTVAAFSAEKQISEQFTCELSKPTKSALLRGHISGFGYGLSQCLAFCSYALGLWYISVLIKRNETNFEDSIKSFMVLLVTAYSVAETLALTPDIVKGTQALGSVFRVLHRETEIPPDQPNSRLVTHIKGDIEFRNVSFAYPTRPEIAIFKNLNLRVSAGKSLAVVGPSGSGKSTVIGLIMRFYDPSNGNLCIDGHDIKSVNLRSLRKKLALVQQEPALFSTSIHENIKYGNENASEAEIIEAAKAANAHEFISRMEEGYMTHVGDKGVQLSGGQKQRVAIARAVLKDPSVLLLDEATSALDTSAEKQVQEALDKLMKGRTTILVAHRLSTIRKADTIVVLHKGKVVEKGSHRELVSKSDGFYKKLTSLQEAV

SEQ ID NO: 71763 - protein, 1221 aa, Arabidopsis thaliana
  peptide (1)..(1221): Ceres Seq. ID no. 4812746
  misc_feature (653)..(933): Pfam Name: ABC transporter transmembrane region Pfam Description: ABC transporter transmembrane region
  misc_feature (640)..(1218): Homolog of NCBI NO: 27368845 NR Description: MDR-like ABC transporter [Oryza sativa (japonica
  misc_feature (3)..(484): Homolog of NCBI NO: 27368845 NR Description: MDR-like ABC transporter [Oryza sativa (japonica
  misc_feature (477)..(689): Homolog of NCBI NO: 27368845 NR Description: MDR-like ABC transporter [Oryza sativa (japonica
  misc_feature (1)..(639): Homolog of NCBI NO: 38049160 NR Description: P-glycoprotein 1 [Sorghum bicolor]
  misc_feature (562)..(1218): Homolog of NCBI NO: 38049160 NR Description: P-glycoprotein 1 [Sorghum bicolor]
  misc_feature (494)..(1220): Homolog of NCBI NO: 34913530 NR Description: putative multidrug resistance protein [Oryza
  misc_feature (1)..(626): Homolog of NCBI NO: 34913530 NR Description: putative multidrug resistance protein [Oryza
  misc_feature (1)..(584): Homolog of NCBI NO: 27368853 NR Description: MDR-like ABC transporter [Oryza sativa (japonica
  misc_feature (644)..(1214): Homolog of NCBI NO: 27368853 NR Description: MDR-like ABC transporter [Oryza sativa (japonica
  misc_feature (1)..(909): Homolog of NCBI NO: 18496818 NR Description: ABC transporter AbcB3 [Dictyostelium discoideum]
MGLFSAADNVDYFLMFLGGLGTCIHGGTLPLFFVFFGGMLDSLGKLSTDPNAISSRVSQNALYLVYLGLVNLVSAWIGSNGILAGVACWMQTGERQTARLRINYLKSILAKDITFFDTEARDSNFIFHISSDAILVQDAIGDKTGHVLRYLCQFIAGFVIGFLSVWQLTLLTLGVVPLIAIAGGGYAIVMSTISEKSEAAYADAGKVAEEVMSQVRTVYAFVGEEKAVKSYSNSLKKALKLSKRSGLAKGLGVGLTYSLLFCAWALLFWYASLLVRHGKTNGAKAFTTILNVIYSGFALGQAVPSLSAISKGRVAAANIFKMIGNNNLESSERLENGTTLQNVVGKIEFCGVSFAYPSRPNMVFENLSFTIHSGKTFAFVGPSGSGKSTIISMVQRFYEPRSGEILLDGNDIKNLKLKWLREQMGLVSQEPALFATTIASNILLGKEKANMDQIIEAAKAANADSFIKSLPNGYNTQVGEGGTQLSGGQKQRIAIARAVLRNPKILLLDEATSALDAESEKIVQQALDNVMEKRTTIVIAHRLSTIRNVDKIVVLRDGQVRETGSHSELISRGGDYATLVNCQDTEPQENLRSVMYESCRSQAGSYSSRRVFSSRRTSSFREDQEKTEKDSKGEDLISSSSMIWELIKLNAPEWLYALLGSIGAVLAGSQPALFSMGLAYVLTTFYSPFPSLIKREVDKVAIIFVGAGIVTAPIYILQHYFYTLMGERLTSRVRLSLFSAILSNEIGWFDLDENNTGSLTSILAADATLVRSAIADRLSTIVQNLSLTITALALAFFYSWRVAAVVTACFPLLIAASLTEQLFLKGFGGDYTRAYSRATSLAREAISNIRTVAAFSAEKQISEQFTCELSKPTKSALLRGHISGFGYGLSQCLAFCSYALGLWYISVLIKRNETNFEDSIKSFMVLLVTAYSVAETLALTPDIVKGTQALGSVFRVLHRETEIPPDQPNSRLVTHIKGDIEFRNVSFAYPTRPEIAIFKNLNLRVSAGKSLAVVGPSGSGKSTVIGLIMRFYDPSNGNLCIDGHDIKSVNLRSLRKKLALVQQEPALFSTSIHENIKYGNENASEAEIIEAAKAANAHEFISRMEEGYMTHVGDKGVQLSGGQKQRVAIARAVLKDPSVLLLDEATSALDTSAEKQVQEALDKLMKGRTTILVAHRLSTIRKADTIVVLHKGKVVEKGSHRELVSKSDGFYKKLTSLQEAV

SEQ ID NO: 71764 - DNA, 927 bp, Arabidopsis thaliana
  misc_feature (1)..(927): Ceres Seq. ID no. 4812828
  misc_feature: MA Experiment ID: 20000171 Result: Down-regulated in Transcription
  misc_feature: MA Experiment 20000171 PARAMETER Experiment Name: At_42deg_Heat_P Parameter: Age (day) Value: 14
  misc_feature: MA Experiment 20000171 PARAMETER Experiment Name: At_42deg_Heat_P Parameter: Organism Value: A. thaliana
  misc_feature: MA Experiment 20000171 PARAMETER Experiment Name: At_42deg_Heat_P Parameter: Plant Line Value: WS
  misc_feature: MA Experiment 20000171 PARAMETER Experiment Name: At_42deg_Heat_P Parameter: Temperature (deg C) Value: 42 vs. 22
  misc_feature: MA Experiment 20000171 PARAMETER Experiment Name: At_42deg_Heat_P Parameter: Timepoint (hr) Value: 1
  misc_feature: MA Experiment 20000171 PARAMETER Experiment Name: At_42deg_Heat_P Parameter: Tissue Value: Aerial
  misc_feature: MA Experiment ID: 20000173 Result: Down-regulated in Transcription
  misc_feature: MA Experiment 20000173 PARAMETER Experiment Name: At_42deg_Heat_P Parameter: Age (day) Value: 14
  misc_feature: MA Experiment 20000173 PARAMETER Experiment Name: At_42deg_Heat_P Parameter: Organism Value: A. thaliana
  misc_feature: MA Experiment 20000173 PARAMETER Experiment Name: At_42deg_Heat_P Parameter: Plant Line Value: WS
  misc_feature: MA Experiment 20000173 PARAMETER Experiment Name: At_42deg_Heat_P Parameter: Temperature (deg C) Value: 42 vs. 22
  misc_feature: MA Experiment 20000173 PARAMETER Experiment Name: At_42deg_Heat_P Parameter: Timepoint (hr) Value: 6
  misc_feature: MA Experiment 20000173 PARAMETER Experiment Name: At_42deg_Heat_P Parameter: Tissue Value: Aerial
  misc_feature: MA Experiment ID: 20000179 Result: Up-regulated in Transcription
  misc_feature: MA Experiment 20000179 PARAMETER Experiment Name: At_Germinating_Seeds_P Parameter: Age (hr) Value: 6 vs. 0
  misc_feature: MA Experiment 20000179 PARAMETER Experiment Name: At_Germinating_Seeds_P Parameter: Tissue Value: Germinating Seeds
  misc_feature: MA Experiment ID: 20000180 Result: Up-regulated in Transcription
  misc_feature: MA Experiment 20000180 PARAMETER Experiment Name: At_Germinating_Seeds_P Parameter: Age (hr) Value: 24 vs. 0
  misc_feature: MA Experiment 20000180 PARAMETER Experiment Name: At_Germinating_Seeds_P Parameter: Tissue Value: Germinating Seeds
  misc_feature: MA Experiment ID: 20000182 Result: Up-regulated in Transcription
  misc_feature: MA Experiment 20000182 PARAMETER Experiment Name: At_2mM_SA_P Parameter: Age (day) Value: 14
  misc_feature: MA Experiment 20000182 PARAMETER Experiment Name: At_2mM_SA_P Parameter: Organism Value: A. thaliana
  misc_feature: MA Experiment 20000182 PARAMETER Experiment Name: At_2mM_SA_P Parameter: Plant Line Value: WS
  misc_feature: MA Experiment 20000182 PARAMETER Experiment Name: At_2mM_SA_P Parameter: Timepoint (hr) Value: 6
  misc_feature: MA Experiment 20000182 PARAMETER Experiment Name: At_2mM_SA_P Parameter: Tissue Value: Aerial
  misc_feature: MA Experiment 20000182 PARAMETER Experiment Name: At_2mM_SA_P Parameter: Treatment Value: 2mM SA vs. No Treatment
  misc_feature: MA Experiment ID: 20000185 Result: Up-regulated in Transcription
  misc_feature: MA Experiment 20000185 PARAMETER Experiment Name: At_Roots__P Parameter: Age (day) Value: 7 vs. 21
  misc_feature: MA Experiment 20000185 PARAMETER Experiment Name: At_Roots__P Parameter: Organism Value: A. thaliana
  misc_feature: MA Experiment 20000185 PARAMETER Experiment Name: At_Roots__P Parameter: Tissue Value: Roots vs. Whole Plant
  misc_feature: MA Experiment ID: 20000227 Result: Down-regulated in Transcription
  misc_feature: MA Experiment 20000227 PARAMETER Experiment Name: At_Root-Tips-vs-Tops_P Parameter: Tissue Value: Root Tips vs. Root Tops
  misc_feature: MA Experiment ID: 20000439 Result: Up-regulated in Transcription
  misc_feature: MA Experiment 20000439 PARAMETER Experiment Name: At_Roots__P Parameter: Age (day) Value: 14 vs. 21
  misc_feature: MA Experiment 20000439 PARAMETER Experiment Name: At_Roots__P Parameter: Organism Value: A. thaliana
  misc_feature: MA Experiment 20000439 PARAMETER Experiment Name: At_Roots__P Parameter: Tissue Value: Roots vs. Whole Plant
  misc_feature: MA Experiment ID: 20000496 Result: Down-regulated in Transcription
  misc_feature: MA Experiment 20000496 PARAMETER Experiment Name: At_Guard_Cells_P Parameter: Harvest Date Value: 7/19/2002
  misc_feature: MA Experiment 20000496 PARAMETER Experiment Name: At_Guard_Cells_P Parameter: Organism Value: Canola
  misc_feature: MA Experiment 20000496 PARAMETER Experiment Name: At_Guard_Cells_P Parameter: Tissue Value: Guard Cells vs. Leaves
atgaagatagcggccaatggccggtttttcacaatcggactcgtagcgtcatggtattcatcgaacatcggagttttattgctgaacaagtacttgttaagcaactatggattcaagtatccgatcttcctcaccatgtgtcacatgacggcttgttctcttctcagctacgttgctattgcttggatgaagatggttccgatgcaaacgatccgatctcgagttcagtttcttaagatcgctgcgttaagtctcgttttctgtgtgtcggtggtttttgggaatatctctcttcggtttcttcctgtatcgtttaatcaagcgattggtgctacgacgccgtttttcaccgccgtgtttgcttatctgattacttttaagagagaagcttggttgacttacttcactctcgtccctgttgttaccggtgttgtcattgccagtgggagtgagccaagtttccacctgtttggattcattatgtgcattgcagctacagctgcaagagcacttaaatcagttcttcaaggaattttgctttcttcagaaggggagaagctaaattccatgaacctcctcctttacatggctcccatagctgttgtgttcctccttcctgctacacttatcatggaaaaaaatgttgttggcattacaattgcacttgccagagacgattttagaatcgtttggtatctgctattcaattcggcgctagcttattttgtgaacttgaccaatttcttagtcacgaaacacaccagcgctctgactctccaggtgctaggaaacgccaaaggtgcagtagcagtggtggtatcaatcctgatattcaggaatcctgtctcagtgactggaatgttaggttactcgctcactgtctgtggagttatcctctacagcgaagccaagaaacgaagcaaataa

SEQ ID NO: 71765 - protein, 308 aa, Arabidopsis thaliana
  peptide (1)..(308): Ceres Seq. ID no. 4812829
  misc_feature (25)..(148): Pfam Name: Integral membrane protein DUF6 Pfam Description: Integral membrane protein DUF6
  misc_feature (1)..(308): Homolog of NCBI NO: 30681126 NR Description: phosphate translocator-related [Arabidopsis
  misc_feature (3)..(308): Homolog of NCBI NO: 9759107 NR Description: phosphate/phosphoenolpyruvate translocator
  misc_feature (6)..(308): Homolog of NCBI NO: 27476065 NR Description: Putative phosphate/phosphoenolpyruvate
  misc_feature (10)..(306): Homolog of NCBI NO: 15237644 NR Description: phosphate/phosphoenolpyruvate translocator - like protein id: At5g04160.1, supported by cDNA: 100777., supported by
  misc_feature (10)..(306): Homolog of NCBI NO: 17064798 NR Description: phosphate/phosphoenolpyruvate translocator-like [Arabidopsis thaliana] >gi|20259810|gb|AAM13252.1|
  misc_feature (10)..(306): Homolog of NCBI NO: 15228248 NR Description: unknown protein; protein id: At3g10290.1 thaliana] >gi|6056196|gb|AAF02813.1|AC009400_9 unknown protein
  misc_feature (11)..(308): Homolog of NCBI NO: 15221371 NR Description: hypothetical protein; protein id: At1g12500.1 thaliana] >gi|8778643|gb|AAF79651.1|AC025416_25 F5O11.25 thaliana] >gi|9502394|gb|AAF88101.1|AC025417_29 T12C24.5
  misc_feature (1)..(259): Homolog of NCBI NO: 15229717 NR Description: integral membrane protein, putative; protein id: [Arabidopsis thaliana] >gi|12321869|gb|AAG50965.1|AC073395_7
  misc_feature (150)..(308): Homolog of NCBI NO: 15229717 NR Description: integral membrane protein, putative; protein id: [Arabidopsis thaliana] >gi|12321869|gb|AAG50965.1|AC073395_7
  misc_feature (15)..(300): Homolog of NCBI NO: 38567832 NR Description: OSJNBb0020J19.10 [Oryza sativa (japonica
MKIAANGRFFTIGLVASWYSSNIGVLLLNKYLLSNYGFKYPIFLTMCHMTACSLLSYVAIAWMKMVPMQTIRSRVQFLKIAALSLVFCVSVVFGNISLRFLPVSFNQAIGATTPFFTAVFAYLITFKREAWLTYFTLVPVVTGVVIASGSEPSFHLFGFIMCIAATAARALKSVLQGILLSSEGEKLNSMNLLLYMAPIAVVFLLPATLIMEKNVVGITIALARDDFRIVWYLLFNSALAYFVNLTNFLVTKHTSALTLQVLGNAKGAVAVVVSILIFRNPVSVTGMLGYSLTVCGVILYSEAKKRSK

SEQ ID NO: 71766 - protein, 263 aa, Arabidopsis thaliana
  peptide (1)..(263): Ceres Seq. ID no. 4812830
  misc_feature (1)..(103): Pfam Name: Integral membrane protein DUF6 Pfam Description: Integral membrane protein DUF6
  misc_feature (1)..(263): Homolog of NCBI NO: 30681126 NR Description: phosphate translocator-related [Arabidopsis
  misc_feature (1)..(263): Homolog of NCBI NO: 9759107 NR Description: phosphate/phosphoenolpyruvate translocator
  misc_feature (1)..(263): Homolog of NCBI NO: 27476065 NR Description: Putative phosphate/phosphoenolpyruvate
  misc_feature (1)..(261): Homolog of NCBI NO: 15237644 NR Description: phosphate/phosphoenolpyruvate translocator - like protein id: At5g04160.1, supported by cDNA: 100777., supported by
  misc_feature (1)..(261): Homolog of NCBI NO: 17064798 NR Description: phosphate/phosphoenolpyruvate translocator-like [Arabidopsis thaliana] >gi|20259810|gb|AAM13252.1|
  misc_feature (1)..(261): Homolog of NCBI NO: 15228248 NR Description: unknown protein; protein id: At3g10290.1 thaliana] >gi|6056196|gb|AAF02813.1|AC009400_9 unknown protein
  misc_feature (1)..(263): Homolog of NCBI NO: 15221371 NR Description: hypothetical protein; protein id: At1g12500.1 thaliana] >gi|8778643|gb|AAF79651.1|AC025416_25 F5O11.25 thaliana] >gi|9502394|gb|AAF88101.1|AC025417_29 T12C24.5
  misc_feature (1)..(214): Homolog of NCBI NO: 15229717 NR Description: integral membrane protein, putative; protein id: [Arabidopsis thaliana] >gi|12321869|gb|AAG50965.1|AC073395_7
  misc_feature (105)..(263): Homolog of NCBI NO: 15229717 NR Description: integral membrane protein, putative; protein id: [Arabidopsis thaliana] >gi|12321869|gb|AAG50965.1|AC073395_7
  misc_feature (1)..(255): Homolog of NCBI NO: 38567832 NR Description: OSJNBb0020J19.10 [Oryza sativa (japonica
MCHMTACSLLSYVAIAWMKMVPMQTIRSRVQFLKIAALSLVFCVSVVFGNISLRFLPVSFNQAIGATTPFFTAVFAYLITFKREAWLTYFTLVPVVTGVVIASGSEPSFHLFGFIMCIAATAARALKSVLQGILLSSEGEKLNSMNLLLYMAPIAVVFLLPATLIMEKNVVGITIALARDDFRIVWYLLFNSALAYFVNLTNFLVTKHTSALTLQVLGNAKGAVAVVVSILIFRNPVSVTGMLGYSLTVCGVILYSEAKKRSK

SEQ ID NO: 71767 - protein, 260 aa, Arabidopsis thaliana
  peptide (1)..(260): Ceres Seq. ID no. 4812831
  misc_feature (1)..(100): Pfam Name: Integral membrane protein DUF6 Pfam Description: Integral membrane protein DUF6
  misc_feature (1)..(260): Homolog of NCBI NO: 30681126 NR Description: phosphate translocator-related [Arabidopsis
  misc_feature (1)..(260): Homolog of NCBI NO: 9759107 NR Description: phosphate/phosphoenolpyruvate translocator
  misc_feature (1)..(260): Homolog of NCBI NO: 27476065 NR Description: Putative phosphate/phosphoenolpyruvate
  misc_feature (1)..(258): Homolog of NCBI NO: 15237644 NR Description: phosphate/phosphoenolpyruvate translocator - like protein id: At5g04160.1, supported by cDNA: 100777., supported by
  misc_feature (1)..(258): Homolog of NCBI NO: 17064798 NR Description: phosphate/phosphoenolpyruvate translocator-like [Arabidopsis thaliana] >gi|20259810|gb|AAM13252.1|
  misc_feature (1)..(258): Homolog of NCBI NO: 15228248 NR Description: unknown protein; protein id: At3g10290.1 thaliana] >gi|6056196|gb|AAF02813.1|AC009400_9 unknown protein
  misc_feature (1)..(260): Homolog of NCBI NO: 15221371 NR Description: hypothetical protein; protein id: At1g12500.1 thaliana] >gi|8778643|gb|AAF79651.1|AC025416_25 F5O11.25 thaliana] >gi|9502394|gb|AAF88101.1|AC025417_29 T12C24.5
  misc_feature (1)..(211): Homolog of NCBI NO: 15229717 NR Description: integral membrane protein, putative; protein id: [Arabidopsis thaliana] >gi|12321869|gb|AAG50965.1|AC073395_7
  misc_feature (102)..(260): Homolog of NCBI NO: 15229717 NR Description: integral membrane protein, putative; protein id: [Arabidopsis thaliana] >gi|12321869|gb|AAG50965.1|AC073395_7
  misc_feature (1)..(252): Homolog of NCBI NO: 38567832 NR Description: OSJNBb0020J19.10 [Oryza sativa (japonica
MTACSLLSYVAIAWMKMVPMQTIRSRVQFLKIAALSLVFCVSVVFGNISLRFLPVSFNQAIGATTPFFTAVFAYLITFKREAWLTYFTLVPVVTGVVIASGSEPSFHLFGFIMCIAATAARALKSVLQGILLSSEGEKLNSMNLLLYMAPIAVVFLLPATLIMEKNVVGITIALARDDFRIVWYLLFNSALAYFVNLTNFLVTKHTSALTLQVLGNAKGAVAVVVSILIFRNPVSVTGMLGYSLTVCGVILYSEAKKRSK

SEQ ID NO: 71768 - DNA, 633 bp, Arabidopsis thaliana
  misc_feature (1)..(633): Ceres Seq. ID no. 4812890
  misc_feature: MA Experiment ID: 20001247 Result: Down-regulated in Transcription
  misc_feature: MA Experiment 20001247 PARAMETER Experiment Name: At_Far-red-induction_P Parameter: Age (day) Value: 7
  misc_feature: MA Experiment 20001247 PARAMETER Experiment Name: At_Far-red-induction_P Parameter: Light Value: Far-red vs. White
  misc_feature: MA Experiment 20001247 PARAMETER Experiment Name: At_Far-red-induction_P Parameter: Organism Value: A. thaliana
  misc_feature: MA Experiment 20001247 PARAMETER Experiment Name: At_Far-red-induction_P Parameter: Plant Line Value: Columbia
  misc_feature: MA Experiment 20001247 PARAMETER Experiment Name: At_Far-red-induction_P Parameter: Timepoint (hr) Value: 1
  misc_feature: MA Experiment 20001247 PARAMETER Experiment Name: At_Far-red-induction_P Parameter: Tissue Value: Whole Plant
atggctggccagactgatcctcatatttcactgttttctccacaagaggttgagtttatggcagaggacgagctggtcgagattgttcctaatatgaacatggagcaactcaatttcatcagtggcgatttcggtcggttcattcctcagattccgacaaaggtgcctctgtggcttgcagtggcactgaagaggagaggaaaatgcactttccggcctccggggtggatgtctgttgataatttgactcagatcttggaagcagaacgtgaatctcagtcgacattccaggcattaccatttagttacgtggagattgccagactactttttgaccatgcacgtgacgatattccagacatgtatatggtgagatccctagtcgaggacatcagagatgtacggcttcacaaacttgagactaacttaggatcatttcaaggtacatctgcagtaaagatctctaatgtatcggcaatggaagtaaacatagtacgcccatttgtgataagagccttagaagcattttataagcatgacaagccagaggctgatgtagacagagacaccagaagtagtagacaacagcgtgaaaccaacaatgaaccaaggagacctctaaggcaacgctag

SEQ ID NO: 71769 - protein, 210 aa, Arabidopsis thaliana
  peptide (1)..(210): Ceres Seq. ID no. 4812891
  misc_feature (20)..(166): Pfam Name: Partner of SLD five, PSF2 Pfam Description: Partner of SLD five, PSF2
  misc_feature (1)..(210): Homolog of NCBI NO: 37999772 NR Description: Probable DNA replication complex GINS protein PSF2
  misc_feature (20)..(210): Homolog of NCBI NO: 15230511 NR Description: unknown protein; protein id: At3g12530.1
  misc_feature (1)..(210): Homolog of NCBI NO: 34904658 NR Description: P0034C11.24 [Oryza sativa (japonica
  misc_feature (1)..(209): Homolog of NCBI NO: 5042457 NR Description: unknown protein [Oryza sativa (japonica
  misc_feature (16)..(178): Homolog of NCBI NO: 34851825 NR Description: similar to HSPC037 protein [Rattus norvegicus]
  misc_feature (16)..(178): Homolog of NCBI NO: 7706367 NR Description: HSPC037 protein [Homo sapiens]
  misc_feature (16)..(178): Homolog of NCBI NO: 26390541 NR Description: unnamed protein product [Mus musculus]
  misc_feature (9)..(190): Homolog of NCBI NO: 17945611 NR Description: RE26983p [Drosophila melanogaster]
  misc_feature (15)..(166): Homolog of NCBI NO: 39584442 NR Description: Hypothetical protein CBG19768 [Caenorhabditis
  misc_feature (99)..(198): Homolog of NCBI NO: 40738574 NR Description: hypothetical protein AN5901.2 [Aspergillus
MAGQTDPHISLFSPQEVEFMAEDELVEIVPNMNMEQLNFISGDFGRFIPQIPTKVPLWLAVALKRRGKCTFRPPGWMSVDNLTQILEAERESQSTFQALPFSYVEIARLLFDHARDDIPDMYMVRSLVEDIRDVRLHKLETNLGSFQGTSAVKISNVSAMEVNIVRPFVIRALEAFYKHDKPEADVDRDTRSSRQQRETNNEPRRPLRQR

SEQ ID NO: 71770 - protein, 191 aa, Arabidopsis thaliana
  peptide (1)..(191): Ceres Seq. ID no. 4812892
  misc_feature (1)..(147): Pfam Name: Partner of SLD five, PSF2 Pfam Description: Partner of SLD five, PSF2
  misc_feature (1)..(191): Homolog of NCBI NO: 37999772 NR Description: Probable DNA replication complex GINS protein PSF2
  misc_feature (1)..(191): Homolog of NCBI NO: 15230511 NR Description: unknown protein; protein id: At3g12530.1
  misc_feature (1)..(191): Homolog of NCBI NO: 34904658 NR Description: P0034C11.24 [Oryza sativa (japonica
  misc_feature (1)..(190): Homolog of NCBI NO: 5042457 NR Description: unknown protein [Oryza sativa (japonica
  misc_feature (1)..(159): Homolog of NCBI NO: 34851825 NR Description: similar to HSPC037 protein [Rattus norvegicus]
  misc_feature (1)..(159): Homolog of NCBI NO: 7706367 NR Description: HSPC037 protein [Homo sapiens]
  misc_feature (1)..(159): Homolog of NCBI NO: 26390541 NR Description: unnamed protein product [Mus musculus]
  misc_feature (1)..(171): Homolog of NCBI NO: 17945611 NR Description: RE26983p [Drosophila melanogaster]
  misc_feature (1)..(147): Homolog of NCBI NO: 39584442 NR Description: Hypothetical protein CBG19768 [Caenorhabditis
  misc_feature (80)..(179): Homolog of NCBI NO: 40738574 NR Description: hypothetical protein AN5901.2 [Aspergillus
MAEDELVEIVPNMNMEQLNFISGDFGRFIPQIPTKVPLWLAVALKRRGKCTFRPPGWMSVDNLTQILEAERESQSTFQALPFSYVEIARLLFDHARDDIPDMYMVRSLVEDIRDVRLHKLETNLGSFQGTSAVKISNVSAMEVNIVRPFVIRALEAFYKHDKPEADVDRDTRSSRQQRETNNEPRRPLRQR

SEQ ID NO: 71771 - protein, 179 aa, Arabidopsis thaliana
  peptide (1)..(179): Ceres Seq. ID no. 4812893
  misc_feature (1)..(135): Pfam Name: Partner of SLD five, PSF2 Pfam Description: Partner of SLD five, PSF2
  misc_feature (1)..(179): Homolog of NCBI NO: 37999772 NR Description: Probable DNA replication complex GINS protein PSF2
  misc_feature (1)..(179): Homolog of NCBI NO: 15230511 NR Description: unknown protein; protein id: At3g12530.1
  misc_feature (1)..(179): Homolog of NCBI NO: 34904658 NR Description: P0034C11.24 [Oryza sativa (japonica
  misc_feature (1)..(178): Homolog of NCBI NO: 5042457 NR Description: unknown protein [Oryza sativa (japonica
  misc_feature (1)..(147): Homolog of NCBI NO: 34851825 NR Description: similar to HSPC037 protein [Rattus norvegicus]
  misc_feature (1)..(147): Homolog of NCBI NO: 7706367 NR Description: HSPC037 protein [Homo sapiens]
  misc_feature (1)..(147): Homolog of NCBI NO: 26390541 NR Description: unnamed protein product [Mus musculus]
  misc_feature (1)..(159): Homolog of NCBI NO: 17945611 NR Description: RE26983p [Drosophila melanogaster]
  misc_feature (1)..(135): Homolog of NCBI NO: 39584442 NR Description: Hypothetical protein CBG19768 [Caenorhabditis
  misc_feature (68)..(167): Homolog of NCBI NO: 40738574 NR Description: hypothetical protein AN5901.2 [Aspergillus
MNMEQLNFISGDFGRFIPQIPTKVPLWLAVALKRRGKCTFRPPGWMSVDNLTQILEAERESQSTFQALPFSYVEIARLLFDHARDDIPDMYMVRSLVEDIRDVRLHKLETNLGSFQGTSAVKISNVSAMEVNIVRPFVIRALEAFYKHDKPEADVDRDTRSSRQQRETNNEPRRPLRQR

SEQ ID NO: 71772 - DNA, 1137 bp, Arabidopsis thaliana
  misc_feature (1)..(1137): Ceres Seq. ID no. 4813440
  misc_feature: MA Experiment ID: 20000314 Result: Up-regulated in Transcription
  misc_feature: MA Experiment 20000314 PARAMETER Experiment Name: At_14day_Shoots-Roots_Sub_P Parameter: Age (day) Value: 14
  misc_feature: MA Experiment 20000314 PARAMETER Experiment Name: At_14day_Shoots-Roots_Sub_P Parameter: Organism Value: A. thaliana
  misc_feature: MA Experiment 20000314 PARAMETER Experiment Name: At_14day_Shoots-Roots_Sub_P Parameter: Plant Line Value: WS
  misc_feature: MA Experiment 20000314 PARAMETER Experiment Name: At_14day_Shoots-Roots_Sub_P Parameter: Tissue Value: Roots vs. Whole Plant
  misc_feature: MA Experiment ID: 20000352 Result: Down-regulated in Transcription
  misc_feature: MA Experiment 20000352 PARAMETER Experiment Name: At_Drought_Sub_P Parameter: Age (day) Value: 7
  misc_feature: MA Experiment 20000352 PARAMETER Experiment Name: At_Drought_Sub_P Parameter: Organism Value: A. thaliana
  misc_feature: MA Experiment 20000352 PARAMETER Experiment Name: At_Drought_Sub_P Parameter: Plant Line Value: WS
  misc_feature: MA Experiment 20000352 PARAMETER Experiment Name: At_Drought_Sub_P Parameter: Timepoint (hr) Value: 6
  misc_feature: MA Experiment 20000352 PARAMETER Experiment Name: At_Drought_Sub_P Parameter: Tissue Value: Whole Plant
  misc_feature: MA Experiment 20000352 PARAMETER Experiment Name: At_Drought_Sub_P Parameter: Treatment Value: Drought vs. No Drought
atggttagtgtctcactcgctgacaacaacgaagagaaatcgactgatctgaagaaattcaaaggaggagtaactgatcactcgattagtaaggcaaatgataatgatcacgacgatgatgatcatgatcaagacgatgataatgatggagatcacgatgacgatgaccatgacgatgataatgatcatgacgatgataataatgatcatgatgatgatgataataatgatgataataatgatggagacgatgaccatgatgatgataataacgatgatggtgatgacgaaaagaagacgttgagggtacacgagctaaagaaggggaatctaacggtcaaatttacaaaccggggtgcttctatcatgtctctccttttccccaatataaatgccagtaaaaaggaaaaggccgctgcaaacgatggcaaaaacacgatccatggtgggacgaaagagtctagcgatgtgatttggagagttaagaaacacaaacataatggcaaaaaaccttatattgttttcacatacacaacaagtcctgatggcgatcaagggaaacttgaagtcactgtgacatataagctggtaggagaaaacagattgaaaatggtgatgcaagcaaaggctaaagagaaaactactccgttgaatttggttcatcgttcttattggaatcttggtggtcataacaatgaagatatcttctctgaagaaattcaaattctcggttccggttatactcatctcgacgataatctcactccaaccgggaaaatcctcgccgttaaaggaacacccttcgattttcgccaactccgacctattaaagacaacatcaatgagcttaagacagggtatggtataaattattgtctagatggtgttgcaaataagatgagaaaagtcgtggagcttgtggacaataaatcgaagataaaaatggagttatctacagaccaatccggtctaaggttgaaaaccactaaaccaaaaaatggatcggttcataaagcttactctggtttatgtctagaatcacatgcaatcaattaccaatatcgttcttcgcagataattgaaccgggggaaacttataagcatactatgctctttaagttttcttttgttccgtaa

SEQ ID NO: 71773 - protein, 378 aa, Arabidopsis thaliana
  peptide (1)..(378): Ceres Seq. ID no. 4813441
  misc_feature (2)..(338): Pfam Name: Aldose 1-epimerase Pfam Description: Aldose 1-epimerase
  misc_feature (1)..(378): Homolog of NCBI NO: 15232072 NR Description: putative aldose 1-epimerase; protein id:
  misc_feature (1)..(339): Homolog of NCBI NO: 6094558 NR Description: putative aldose 1-epimerase, 3' partial
  misc_feature (31)..(377): Homolog of NCBI NO: 15242223 NR Description: putative aldose 1-epimerase - like protein;
  misc_feature (94)..(377): Homolog of NCBI NO: 26452398 NR Description: putative aldose 1-epimerase [Arabidopsis thaliana]
  misc_feature (137)..(375): Homolog of NCBI NO: 15824567 NR Description: non-cell-autonomous protein pathway2;
  misc_feature (99)..(129): Homolog of NCBI NO: 15824567 NR Description: non-cell-autonomous protein pathway2;
  misc_feature (137)..(375): Homolog of NCBI NO: 7430313 NR Description: probable aldose 1-epimerase (EC 5.1.3.3) - common
  misc_feature (103)..(129): Homolog of NCBI NO: 7430313 NR Description: probable aldose 1-epimerase (EC 5.1.3.3) - common
  misc_feature (137)..(375): Homolog of NCBI NO: 15824565 NR Description: non-cell-autonomous protein pathway1;
  misc_feature (99)..(129): Homolog of NCBI NO: 15824565 NR Description: non-cell-autonomous protein pathway1;
MVSVSLADNNEEKSTDLKKFKGGVTDHSISKANDNDHDDDDHDQDDDNDGDHDDDDHDDDNDHDDDNNDHDDDDNNDDNNDGDDDHDDDNNDDGDDEKKTLRVHELKKGNLTVKFTNRGASIMSLLFPNINASKKEKAAANDGKNTIHGGTKESSDVIWRVKKHKHNGKKPYIVFTYTTSPDGDQGKLEVTVTYKLVGENRLKMVMQAKAKEKTTPLNLVHRSYWNLGGHNNEDIFSEEIQILGSGYTHLDDNLTPTGKILAVKGTPFDFRQLRPIKDNINELKTGYGINYCLDGVANKMRKVVELVDNKSKIKMELSTDQSGLRLKTTKPKNGSVHKAYSGLCLESHAINYQYRSSQIIEPGETYKHTMLFKFSFVP

SEQ ID NO: 71774 - protein, 256 aa, Arabidopsis thaliana
  peptide (1)..(256): Ceres Seq. ID no. 4813442
  misc_feature (1)..(216): Pfam Name: Aldose 1-epimerase Pfam Description: Aldose 1-epimerase
  misc_feature (1)..(256): Homolog of NCBI NO: 15232072 NR Description: putative aldose 1-epimerase; protein id:
  misc_feature (1)..(217): Homolog of NCBI NO: 6094558 NR Description: putative aldose 1-epimerase, 3' partial
  misc_feature (1)..(255): Homolog of NCBI NO: 15242223 NR Description: putative aldose 1-epimerase - like protein;
  misc_feature (1)..(255): Homolog of NCBI NO: 26452398 NR Description: putative aldose 1-epimerase [Arabidopsis thaliana]
  misc_feature (15)..(253): Homolog of NCBI NO: 15824567 NR Description: non-cell-autonomous protein pathway2;
  misc_feature (15)..(253): Homolog of NCBI NO: 7430313 NR Description: probable aldose 1-epimerase (EC 5.1.3.3) - common
  misc_feature (15)..(253): Homolog of NCBI NO: 15824565 NR Description: non-cell-autonomous protein pathway1;
  misc_feature (15)..(253): Homolog of NCBI NO: 15228261 NR Description: aldose 1-epimerase - like protein; protein id: supported by cDNA: 119313., supported by cDNA: gi_17381241
  misc_feature (15)..(253): Homolog of NCBI NO: 21537069 NR Description: aldose 1-epimerase-like protein [Arabidopsis
  misc_feature (19)..(254): Homolog of NCBI NO: 38567884 NR Description: OSJNBa0036B21.19 [Oryza sativa (japonica
MSLLFPNINASKKEKAAANDGKNTIHGGTKESSDVIWRVKKHKHNGKKPYIVFTYTTSPDGDQGKLEVTVTYKLVGENRLKMVMQAKAKEKTTPLNLVHRSYWNLGGHNNEDIFSEEIQILGSGYTHLDDNLTPTGKILAVKGTPFDFRQLRPIKDNINELKTGYGINYCLDGVANKMRKVVELVDNKSKIKMELSTDQSGLRLKTTKPKNGSVHKAYSGLCLESHAINYQYRSSQIIEPGETYKHTMLFKFSFVP

SEQ ID NO: 71775 - DNA, 492 bp, Arabidopsis thaliana
  misc_feature (1)..(492): Ceres Seq. ID no. 4813500
  misc_feature: MA Experiment ID: 20001910 Result: Up-regulated in Transcription
  misc_feature: MA Experiment 20001910 PARAMETER Experiment Name: At_Drought_Reproduction_P Parameter: Age (day) Value: 37
  misc_feature: MA Experiment 20001910 PARAMETER Experiment Name: At_Drought_Reproduction_P Parameter: Organism Value: A. thaliana
  misc_feature: MA Experiment 20001910 PARAMETER Experiment Name: At_Drought_Reproduction_P Parameter: Plant Line Value: WS
  misc_feature: MA Experiment 20001910 PARAMETER Experiment Name: At_Drought_Reproduction_P Parameter: Timepoint (day) Value: 7
  misc_feature: MA Experiment 20001910 PARAMETER Experiment Name: At_Drought_Reproduction_P Parameter: Tissue Value: Flowers
  misc_feature: MA Experiment 20001910 PARAMETER Experiment Name: At_Drought_Reproduction_P Parameter: Treatment Value: Drought vs. No Drought
atgatgatgctaaggcaaacgtcgagaaaggcttacctagggttacaggcgtctcctctagggttaggtcgtcgattataccacgagaatgtaatcgaccactttgaaaaccctagaaacgttggctccttcaacaggaatgaccctaacgttggcacgggattggtaggagctcctgcctgcggagacctcatgagcctccagattaaggtcgatgattcaggtcagatcattgatactcgattcaagacctttggctgtggctccgctatcgcctcatcttccgttgcttctgaatggatcaagggcaaaaccttagacgaagttatgaccatcaagaacgcggaaatcgctaagcatcttaggttgccaccggtaaagctacattgcagtatgcttgcagaggacgctatcaagtccgcggtcagagactacaaggagaagcaagcaaagactaatgctgctgctgcagaagaaaccgtcaaggcctga

SEQ ID NO: 71776 - protein, 163 aa, Arabidopsis thaliana
  peptide (1)..(163): Ceres Seq. ID no. 4813501
  misc_feature (26)..(152): Pfam Name: NifU-like N terminal domain Pfam Description: NifU-like N terminal domain
  misc_feature (1)..(163): Homolog of NCBI NO: 15232028 NR Description: unknown protein; protein id: At3g01020.1 thaliana] >gi|6714486|gb|AAF26172.1|AC008261_29 unknown protein
  misc_feature (2)..(163): Homolog of NCBI NO: 15235569 NR Description: nifU-like protein; protein id: At4g22220.1, by cDNA: 8156., supported by cDNA: gi_13605506, supported by
  misc_feature (3)..(163): Homolog of NCBI NO: 21595581 NR Description: nifU-like protein [Arabidopsis thaliana]
  misc_feature (3)..(158): Homolog of NCBI NO: 15233385 NR Description: putative NifU-like metallocluster assembly
  misc_feature (22)..(157): Homolog of NCBI NO: 16798388 NR Description: iron-sulfur cluster assembly protein IscU
  misc_feature (9)..(163): Homolog of NCBI NO: 34912076 NR Description: putative nifU-like protein [Oryza sativa
  misc_feature (1)..(151): Homolog of NCBI NO: 21355597 NR Description: CG9836-PA [Drosophila melanogaster]
  misc_feature (15)..(159): Homolog of NCBI NO: 11545707 NR Description: ISCU2 [Homo sapiens]
  misc_feature (15)..(149): Homolog of NCBI NO: 20381021 NR Description: RIKEN cDNA 2310020H20 gene [Mus musculus]
  misc_feature (15)..(149): Homolog of NCBI NO: 21313484 NR Description: RIKEN cDNA 2310020H20 [Mus musculus] unnamed protein product [Mus musculus] unnamed protein product [Mus musculus]
MMMLRQTSRKAYLGLQASPLGLGRRLYHENVIDHFENPRNVGSFNRNDPNVGTGLVGAPACGDLMSLQIKVDDSGQIIDTRFKTFGCGSAIASSSVASEWIKGKTLDEVMTIKNAEIAKHLRLPPVKLHCSMLAEDAIKSAVRDYKEKQAKTNAAAAEETVKA

SEQ ID NO: 71777 - protein, 162 aa, Arabidopsis thaliana
  peptide (1)..(162): Ceres Seq. ID no. 4813502
  misc_feature (25)..(151): Pfam Name: NifU-like N terminal domain Pfam Description: NifU-like N terminal domain
  misc_feature (1)..(162): Homolog of NCBI NO: 15232028 NR Description: unknown protein; protein id: At3g01020.1 thaliana] >gi|6714486|gb|AAF26172.1|AC008261_29 unknown protein
  misc_feature (1)..(162): Homolog of NCBI NO: 15235569 NR Description: nifU-like protein; protein id: At4g22220.1, by cDNA: 8156., supported by cDNA: gi_13605506, supported by
  misc_feature (2)..(162): Homolog of NCBI NO: 21595581 NR Description: nifU-like protein [Arabidopsis thaliana]
  misc_feature (2)..(157): Homolog of NCBI NO: 15233385 NR Description: putative NifU-like metallocluster assembly
  misc_feature (21)..(156): Homolog of NCBI NO: 16798388 NR Description: iron-sulfur cluster assembly protein IscU
  misc_feature (8)..(162): Homolog of NCBI NO: 34912076 NR Description: putative nifU-like protein [Oryza sativa
  misc_feature (1)..(150): Homolog of NCBI NO: 21355597 NR Description: CG9836-PA [Drosophila melanogaster]
  misc_feature (14)..(158): Homolog of NCBI NO: 11545707 NR Description: ISCU2 [Homo sapiens]
  misc_feature (14)..(148): Homolog of NCBI NO: 20381021 NR Description: RIKEN cDNA 2310020H20 gene [Mus musculus]
  misc_feature (14)..(148): Homolog of NCBI NO: 21313484 NR Description: RIKEN cDNA 2310020H20 [Mus musculus] unnamed protein product [Mus musculus] unnamed protein product [Mus musculus]
MMLRQTSRKAYLGLQASPLGLGRRLYHENVIDHFENPRNVGSFNRNDPNVGTGLVGAPACGDLMSLQIKVDDSGQIIDTRFKTFGCGSAIASSSVASEWIKGKTLDEVMTIKNAEIAKHLRLPPVKLHCSMLAEDAIKSAVRDYKEKQAKTNAAAAEETVKA

SEQ ID NO: 71778 - protein, 161 aa, Arabidopsis thaliana
  peptide (1)..(161): Ceres Seq. ID no. 4813503
  misc_feature (24)..(150): Pfam Name: NifU-like N terminal domain Pfam Description: NifU-like N terminal domain
  misc_feature (1)..(161): Homolog of NCBI NO: 15232028 NR Description: unknown protein; protein id: At3g01020.1 thaliana] >gi|6714486|gb|AAF26172.1|AC008261_29 unknown protein
  misc_feature (1)..(161): Homolog of NCBI NO: 15235569 NR Description: nifU-like protein; protein id: At4g22220.1, by cDNA: 8156., supported by cDNA: gi_13605506, supported by
  misc_feature (1)..(161): Homolog of NCBI NO: 21595581 NR Description: nifU-like protein [Arabidopsis thaliana]
  misc_feature (1)..(156): Homolog of NCBI NO: 15233385 NR Description: putative NifU-like metallocluster assembly
  misc_feature (20)..(155): Homolog of NCBI NO: 16798388 NR Description: iron-sulfur cluster assembly protein IscU
  misc_feature (7)..(161): Homolog of NCBI NO: 34912076 NR Description: putative nifU-like protein [Oryza sativa
  misc_feature (1)..(149): Homolog of NCBI NO: 21355597 NR Description: CG9836-PA [Drosophila melanogaster]
  misc_feature (13)..(157): Homolog of NCBI NO: 11545707 NR Description: ISCU2 [Homo sapiens]
  misc_feature (13)..(147): Homolog of NCBI NO: 20381021 NR Description: RIKEN cDNA 2310020H20 gene [Mus musculus]
  misc_feature (13)..(147): Homolog of NCBI NO: 21313484 NR Description: RIKEN cDNA 2310020H20 [Mus musculus] unnamed protein product [Mus musculus] unnamed protein product [Mus musculus]
MLRQTSRKAYLGLQASPLGLGRRLYHENVIDHFENPRNVGSFNRNDPNVGTGLVGAPACGDLMSLQIKVDDSGQIIDTRFKTFGCGSAIASSSVASEWIKGKTLDEVMTIKNAEIAKHLRLPPVKLHCSMLAEDAIKSAVRDYKEKQAKTNAAAAEETVKA

SEQ ID NO: 71779 - DNA, 2847 bp, Arabidopsis thaliana
  misc_feature (1)..(2847): Ceres Seq. ID no. 4813606
  misc_feature: MA Experiment ID: 20000173 Result: Down-regulated in Transcription
  misc_feature: MA Experiment 20000173 PARAMETER Experiment Name: At_42deg_Heat_P Parameter: Age (day) Value: 14
  misc_feature: MA Experiment 20000173 PARAMETER Experiment Name: At_42deg_Heat_P Parameter: Organism Value: A. thaliana
  misc_feature: MA Experiment 20000173 PARAMETER Experiment Name: At_42deg_Heat_P Parameter: Plant Line Value: WS
  misc_feature: MA Experiment 20000173 PARAMETER Experiment Name: At_42deg_Heat_P Parameter: Temperature (deg C) Value: 42 vs. 22
  misc_feature: MA Experiment 20000173 PARAMETER Experiment Name: At_42deg_Heat_P Parameter: Timepoint (hr) Value: 6
  misc_feature: MA Experiment 20000173 PARAMETER Experiment Name: At_42deg_Heat_P Parameter: Tissue Value: Aerial
  misc_feature: MA Experiment ID: 20000185 Result: Down-regulated in Transcription
  misc_feature: MA Experiment 20000185 PARAMETER Experiment Name: At_Roots__P Parameter: Age (day) Value: 7 vs. 21
  misc_feature: MA Experiment 20000185 PARAMETER Experiment Name: At_Roots__P Parameter: Organism Value: A. thaliana
  misc_feature: MA Experiment 20000185 PARAMETER Experiment Name: At_Roots__P Parameter: Tissue Value: Roots vs. Whole Plant
  misc_feature: MA Experiment ID: 20000495 Result: Down-regulated in Transcription
  misc_feature: MA Experiment 20000495 PARAMETER Experiment Name: At_Guard_Cells_P Parameter: Harvest Date Value: 8/2/2002
  misc_feature: MA Experiment 20000495 PARAMETER Experiment Name: At_Guard_Cells_P Parameter: Organism Value: A. thaliana
  misc_feature: MA Experiment 20000495 PARAMETER Experiment Name: At_Guard_Cells_P Parameter: Tissue Value: Guard Cells vs. Leaves
  misc_feature: MA Experiment ID: 20001451 Result: Down-regulated in Transcription
  misc_feature: MA Experiment 20001451 PARAMETER Experiment Name: At_Far-red-induction_P Parameter: Age (day) Value: 7
  misc_feature: MA Experiment 20001451 PARAMETER Experiment Name: At_Far-red-induction_P Parameter: Light Value: Far-red vs. White
  misc_feature: MA Experiment 20001451 PARAMETER Experiment Name: At_Far-red-induction_P Parameter: Organism Value: A. thaliana
  misc_feature: MA Experiment 20001451 PARAMETER Experiment Name: At_Far-red-induction_P Parameter: Plant Line Value: Columbia
  misc_feature: MA Experiment 20001451 PARAMETER Experiment Name: At_Far-red-induction_P Parameter: Timepoint (hr) Value: 24
  misc_feature: MA Experiment 20001451 PARAMETER Experiment Name: At_Far-red-induction_P Parameter: Tissue Value: Whole Plant
  misc_feature: MA Experiment ID: 20001558 Result: Up-regulated in Transcription
  misc_feature: MA Experiment 20001558 PARAMETER Experiment Name: At_Drought_Soil_Dry_P Parameter: Age (day) Value: 27
  misc_feature: MA Experiment 20001558 PARAMETER Experiment Name: At_Drought_Soil_Dry_P Parameter: Organism Value: A. thaliana
  misc_feature: MA Experiment 20001558 PARAMETER Experiment Name: At_Drought_Soil_Dry_P Parameter: Plant Line Value: WS
  misc_feature: MA Experiment 20001558 PARAMETER Experiment Name: At_Drought_Soil_Dry_P Parameter: Post Timepoint (hr) Value: 6
  misc_feature: MA Experiment 20001558 PARAMETER Experiment Name: At_Drought_Soil_Dry_P Parameter: Post-Treatment Value: Re-Water vs. No Drought
  misc_feature: MA Experiment 20001558 PARAMETER Experiment Name: At_Drought_Soil_Dry_P Parameter: Timepoint (day) Value: 13
  misc_feature: MA Experiment 20001558 PARAMETER Experiment Name: At_Drought_Soil_Dry_P Parameter: Treatment Value: Drought vs. No Drought
  misc_feature: MA Experiment ID: 20001757 Result: Up-regulated in Transcription
  misc_feature: MA Experiment 20001757 PARAMETER Experiment Name: At_50mM_NH4NO3_L-to-H_P Parameter: Timepoint (hr) Value: 6
  misc_feature: MA Experiment 20001757 PARAMETER Experiment Name: At_50mM_NH4NO3_L-to-H_P Parameter: Tissue Value: Leaf
  misc_feature: MA Experiment 20001757 PARAMETER Experiment Name: At_50mM_NH4NO3_L-to-H_P Parameter: Treatment Value: 50mM NH4NO3 vs 100mM Mannitol
  misc_feature: MA Experiment ID: 20001905 Result: Down-regulated in Transcription
  misc_feature: MA Experiment 20001905 PARAMETER Experiment Name: At_Drought_Reproduction_P Parameter: Age (day) Value: 40
  misc_feature: MA Experiment 20001905 PARAMETER Experiment Name: At_Drought_Reproduction_P Parameter: Organism Value: A. thaliana
  misc_feature: MA Experiment 20001905 PARAMETER Experiment Name: At_Drought_Reproduction_P Parameter: Plant Line Value: WS
  misc_feature: MA Experiment 20001905 PARAMETER Experiment Name: At_Drought_Reproduction_P Parameter: Timepoint (day) Value: 10
  misc_feature: MA Experiment 20001905 PARAMETER Experiment Name: At_Drought_Reproduction_P Parameter: Tissue Value: Rosettes
  misc_feature: MA Experiment 20001905 PARAMETER Experiment Name: At_Drought_Reproduction_P Parameter: Treatment Value: Drought vs. No Drought
atgattggttctgaaaatatcagttgggaaattaaaacccggttcaatttgaaaccggaaacaagactagctacgcctcacacagagtcacaggagaagctcccgcgtctgcaaggaacggataaagtctctctctttctcactctctctctctctctctctctcaaagaagaagaagatgttgacgagtcccacagcggcggaggaggaaaattgtgctcgctctctcttctctccggaagtggcgccggtaaattcagtgtcagagctctagttaggcctgatgataccgacgacgctgactccgtcggcgatgggtctctggcttttcctaaccacgtttctgtcaaaattccattcggaaatagagagattttagttgagactggtctcatggggagacaagcaagttctgcagtcacggtcacagatggagaaactattgtctacacatccgtttgtctagctgatgttccgagtgagccatcagattttcttcccctttatgttcactatcaggagcgattctcagctgtaggtcgaactagtggtggattttttaagcgagaagggagaaccaaagatcacgaggttctgatttgtaggttgatcgatagacctctacgccccactatgcccaaaggtttctacaatgaaactcagattttatcctgggttttgagctacgatggattacacgcacctgatgctttagctgttacatctgctggaattgctgtagctctttcagaagtaccaaatgcgaaagcgattgcaggagttcgggttggtcttattgggggtgaattcattgtcaatccaaccgtgaaggagatggaagaatcacagctagatttgtttctagctggaacagatactgcaattctaacgatagagggatacagtaattttcttcctgaggaaatgcttctccaagctgttaaagttggacaggatgctgtacaggctacatgcattgctattgaagttttagcaaagaaatatggaaagcctaaaatgcttgacgctatcagattaccacctccagagctatacaagcatgtgaaagaacttgctggtgaggaattgacaaaagcgttacaaattaagagtaaaatatcgagaaggaaagccatatcgtccctggaagaaaaggtcttgacaatactgacagagaagggatatgttattgatgaggtagcttttggaaccatagaagcacaaccggatctgttggaggatgaagacgaggatgaggaagttgttcctgaaggtgaggtggaccaaggcgatgttcacattagacccatccctcggaaacctattcctttactattttctgaagtagatgtcaagctagtcttcaaagaagtatcgtcgaagcttctacgtaggcgaattgttgagggaggtaaaagaagtgatggtcggactctggatgagattcgtccaattaattcaagatgtggactgcttcccagggcacatggaagtactctgttcacacgtggggaaacacaggcactggcagttgttacgcttggtgataaacaaatggcgcagagaattgacaaccttgagggttctgatgaatacaagaggttctatcttcagtacacttttcctccatcgtctgttggtgaagttggacgaattggtgcacccagtagaagagaaataggtcatgggacactagcagagcgagcattggagaccattctacctagtgatgatgactttccttacacaatacgtgttgaaagtacagtaattgaaagcaatggttcttcaagtatggcatctgtttgtggcggttgcttggctttgcaagatgctggagttccagtcaaatgttctgttgctgggatagcaatgggaatggtttgggatactgaagaatttggaggtgatggatctccccttatcctttctgacatcactggagctgaagatgcatctggtgatatggactttaaggttgctgggaatgaagatggcgttaccgcctttcagatggacatcaaggtaggaggaattactttagagataatggaaaaggctctaatacaggcaaaagctgggcgtcgccatattcttgctgaaatggcaaagtgctcaccgcctcccacgctaagcctctcaaaatatgctccattgatacttattatgaaggttcatccaagcaaagtatactctcttattggttctggaggtaagaaagtaaagagcatcattgaagaatctggagttgaggccattgacatgcaagatgatggaactgtcaaaattatggcaattgatgtagcgagtctagaaagggcgaaagcgattattagtggattgacaatggttccctctgttggtgatatctacaggaattgtgaaatcaagtcaatggctccttatggtgcatttgtagagatagcgcctgggcgggaaggtctttgccatatcagtgagctgagtgctgaatggcttgcaaaaccagaggatgcctataaagtaggagaccgcattgacgtcaaattaatagaggtaaatgaaaagggtcagcttcgacttagtgtacgggctttacttcccgaatcagagacagacaaagacagtcagaaacaacagccggcaggtgattctaccaaagacaagagttcgcaaaggaaatatgtaaatacttcgtcaaaggaccgtgcagctgcaggagcatcaaaggtttcatctggggatgaacttgtcctgaagaagaaagatgtaaggagagcaactggtggtagtagtgacaagacaatgaatagcaatagcagtaccaacgaagaaagtttagtcaacggtgaagctacaatcagctag

SEQ ID NO: 71780 - protein, 948 aa, Arabidopsis thaliana
  peptide (1)..(948): Ceres Seq. ID no. 4813607
  misc_feature (481)..(615): Pfam Name: 3' exoribonuclease family, domain 1 Pfam Description: 3' exoribonuclease family, domain 1
  misc_feature (70)..(869): Homolog of NCBI NO: 7488820 NR Description: polyribonucleotide nucleotidyltransferase (EC - garden pea >gi|2286200|gb|AAC50039.1| polynucleotide
  misc_feature (72)..(854): Homolog of NCBI NO: 1924972 NR Description: polyribonucleotide phophorylase
  misc_feature (72)..(814): Homolog of NCBI NO: 2129483 NR Description: exoribonuclease 100 RNP - spinach
  misc_feature (72)..(814): Homolog of NCBI NO: 1588265 NR Description: 100RNP protein
  misc_feature (446)..(860): Homolog of NCBI NO: 15834850 NR Description: polyribonucleotide nucleotidyltransferase muridarum] >gi|11279139|pir||G81725 polyribonucleotide
  misc_feature (122)..(393): Homolog of NCBI NO: 15834850 NR Description: polyribonucleotide nucleotidyltransferase muridarum] >gi|11279139|pir||G81725 polyribonucleotide
  misc_feature (446)..(862): Homolog of NCBI NO: 15605577 NR Description: Polyribonucleotide Nucleotidyltransferase
  misc_feature (122)..(393): Homolog of NCBI NO: 15605577 NR Description: Polyribonucleotide Nucleotidyltransferase
  misc_feature (445)..(862): Homolog of NCBI NO: 29840519 NR Description: polyribonucleotide nucleotidyltransferase caviae GPIC] >gi|29834868|gb|AAP05503.1| polyribonucleotide
  misc_feature (123)..(437): Homolog of NCBI NO: 29840519 NR Description: polyribonucleotide nucleotidyltransferase caviae GPIC] >gi|29834868|gb|AAP05503.1| polyribonucleotide
MIGSENISWEIKTRFNLKPETRLATPHTESQEKLPRLQGTDKVSLFLTLSLSLSLKEEEDVDESHSGGGGKLCSLSLLSGSGAGKFSVRALVRPDDTDDADSVGDGSLAFPNHVSVKIPFGNREILVETGLMGRQASSAVTVTDGETIVYTSVCLADVPSEPSDFLPLYVHYQERFSAVGRTSGGFFKREGRTKDHEVLICRLIDRPLRPTMPKGFYNETQILSWVLSYDGLHAPDALAVTSAGIAVALSEVPNAKAIAGVRVGLIGGEFIVNPTVKEMEESQLDLFLAGTDTAILTIEGYSNFLPEEMLLQAVKVGQDAVQATCIAIEVLAKKYGKPKMLDAIRLPPPELYKHVKELAGEELTKALQIKSKISRRKAISSLEEKVLTILTEKGYVIDEVAFGTIEAQPDLLEDEDEDEEVVPEGEVDQGDVHIRPIPRKPIPLLFSEVDVKLVFKEVSSKLLRRRIVEGGKRSDGRTLDEIRPINSRCGLLPRAHGSTLFTRGETQALAVVTLGDKQMAQRIDNLEGSDEYKRFYLQYTFPPSSVGEVGRIGAPSRREIGHGTLAERALETILPSDDDFPYTIRVESTVIESNGSSSMASVCGGCLALQDAGVPVKCSVAGIAMGMVWDTEEFGGDGSPLILSDITGAEDASGDMDFKVAGNEDGVTAFQMDIKVGGITLEIMEKALIQAKAGRRHILAEMAKCSPPPTLSLSKYAPLILIMKVHPSKVYSLIGSGGKKVKSIIEESGVEAIDMQDDGTVKIMAIDVASLERAKAIISGLTMVPSVGDIYRNCEIKSMAPYGAFVEIAPGREGLCHISELSAEWLAKPEDAYKVGDRIDVKLIEVNEKGQLRLSVRALLPESETDKDSQKQQPAGDSTKDKSSQRKYVNTSSKDRAAAGASKVSSGDELVLKKKDVRRATGGSSDKTMNSNSSTNEESLVNGEATIS

SEQ ID NO: 71781 - protein, 817 aa, Arabidopsis thaliana
  peptide (1)..(817): Ceres Seq. ID no. 4813608
  misc_feature (350)..(484): Pfam Name: 3' exoribonuclease family, domain 1 Pfam Description: 3' exoribonuclease family, domain 1
  misc_feature (1)..(738): Homolog of NCBI NO: 7488820 NR Description: polyribonucleotide nucleotidyltransferase (EC - garden pea >gi|2286200|gb|AAC50039.1| polynucleotide
  misc_feature (1)..(723): Homolog of NCBI NO: 1924972 NR Description: polyribonucleotide phophorylase
  misc_feature (1)..(683): Homolog of NCBI NO: 2129483 NR Description: exoribonuclease 100 RNP - spinach
  misc_feature (1)..(683): Homolog of NCBI NO: 1588265 NR Description: 100RNP protein
  misc_feature (315)..(729): Homolog of NCBI NO: 15834850 NR Description: polyribonucleotide nucleotidyltransferase muridarum] >gi|11279139|pir||G81725 polyribonucleotide
  misc_feature (1)..(262): Homolog of NCBI NO: 15834850 NR Description: polyribonucleotide nucleotidyltransferase muridarum] >gi|11279139|pir||G81725 polyribonucleotide
  misc_feature (315)..(731): Homolog of NCBI NO: 15605577 NR Description: Polyribonucleotide Nucleotidyltransferase
  misc_feature (1)..(262): Homolog of NCBI NO: 15605577 NR Description: Polyribonucleotide Nucleotidyltransferase
  misc_feature (314)..(731): Homolog of NCBI NO: 29840519 NR Description: polyribonucleotide nucleotidyltransferase caviae GPIC] >gi|29834868|gb|AAP05503.1| polyribonucleotide
  misc_feature (1)..(306): Homolog of NCBI NO: 29840519 NR Description: polyribonucleotide nucleotidyltransferase caviae GPIC] >gi|29834868|gb|AAP05503.1| polyribonucleotide
MGRQASSAVTVTDGETIVYTSVCLADVPSEPSDFLPLYVHYQERFSAVGRTSGGFFKREGRTKDHEVLICRLIDRPLRPTMPKGFYNETQILSWVLSYDGLHAPDALAVTSAGIAVALSEVPNAKAIAGVRVGLIGGEFIVNPTVKEMEESQLDLFLAGTDTAILTIEGYSNFLPEEMLLQAVKVGQDAVQATCIAIEVLAKKYGKPKMLDAIRLPPPELYKHVKELAGEELTKALQIKSKISRRKAISSLEEKVLTILTEKGYVIDEVAFGTIEAQPDLLEDEDEDEEVVPEGEVDQGDVHIRPIPRKPIPLLFSEVDVKLVFKEVSSKLLRRRIVEGGKRSDGRTLDEIRPINSRCGLLPRAHGSTLFTRGETQALAVVTLGDKQMAQRIDNLEGSDEYKRFYLQYTFPPSSVGEVGRIGAPSRREIGHGTLAERALETILPSDDDFPYTIRVESTVIESNGSSSMASVCGGCLALQDAGVPVKCSVAGIAMGMVWDTEEFGGDGSPLILSDITGAEDASGDMDFKVAGNEDGVTAFQMDIKVGGITLEIMEKALIQAKAGRRHILAEMAKCSPPPTLSLSKYAPLILIMKVHPSKVYSLIGSGGKKVKSIIEESGVEAIDMQDDGTVKIMAIDVASLERAKAIISGLTMVPSVGDIYRNCEIKSMAPYGAFVEIAPGREGLCHISELSAEWLAKPEDAYKVGDRIDVKLIEVNEKGQLRLSVRALLPESETDKDSQKQQPAGDSTKDKSSQRKYVNTSSKDRAAAGASKVSSGDELVLKKKDVRRATGGSSDKTMNSNSSTNEESLVNGEATIS

SEQ ID NO: 71782 - protein, 737 aa, Arabidopsis thaliana
  peptide (1)..(737): Ceres Seq. ID no. 4813609
  misc_feature (270)..(404): Pfam Name: 3' exoribonuclease family, domain 1 Pfam Description: 3' exoribonuclease family, domain 1
  misc_feature (1)..(658): Homolog of NCBI NO: 7488820 NR Description: polyribonucleotide nucleotidyltransferase (EC - garden pea >gi|2286200|gb|AAC50039.1| polynucleotide
  misc_feature (1)..(643): Homolog of NCBI NO: 1924972 NR Description: polyribonucleotide phophorylase
  misc_feature (1)..(603): Homolog of NCBI NO: 2129483 NR Description: exoribonuclease 100 RNP - spinach
  misc_feature (1)..(603): Homolog of NCBI NO: 1588265 NR Description: 100RNP protein
  misc_feature (235)..(649): Homolog of NCBI NO: 15834850 NR Description: polyribonucleotide nucleotidyltransferase muridarum] >gi|11279139|pir||G81725 polyribonucleotide
  misc_feature (1)..(182): Homolog of NCBI NO: 15834850 NR Description: polyribonucleotide nucleotidyltransferase muridarum] >gi|11279139|pir||G81725 polyribonucleotide
  misc_feature (235)..(651): Homolog of NCBI NO: 15605577 NR Description: Polyribonucleotide Nucleotidyltransferase
  misc_feature (1)..(182): Homolog of NCBI NO: 15605577 NR Description: Polyribonucleotide Nucleotidyltransferase
  misc_feature (234)..(651): Homolog of NCBI NO: 29840519 NR Description: polyribonucleotide nucleotidyltransferase caviae GPIC] >gi|29834868|gb|AAP05503.1| polyribonucleotide
  misc_feature (1)..(226): Homolog of NCBI NO: 29840519 NR Description: polyribonucleotide nucleotidyltransferase caviae GPIC] >gi|29834868|gb|AAP05503.1| polyribonucleotide
MPKGFYNETQILSWVLSYDGLHAPDALAVTSAGIAVALSEVPNAKAIAGVRVGLIGGEFIVNPTVKEMEESQLDLFLAGTDTAILTIEGYSNFLPEEMLLQAVKVGQDAVQATCIAIEVLAKKYGKPKMLDAIRLPPPELYKHVKELAGEELTKALQIKSKISRRKAISSLEEKVLTILTEKGYVIDEVAFGTIEAQPDLLEDEDEDEEVVPEGEVDQGDVHIRPIPRKPIPLLFSEVDVKLVFKEVSSKLLRRRIVEGGKRSDGRTLDEIRPINSRCGLLPRAHGSTLFTRGETQALAVVTLGDKQMAQRIDNLEGSDEYKRFYLQYTFPPSSVGEVGRIGAPSRREIGHGTLAERALETILPSDDDFPYTIRVESTVIESNGSSSMASVCGGCLALQDAGVPVKCSVAGIAMGMVWDTEEFGGDGSPLILSDITGAEDASGDMDFKVAGNEDGVTAFQMDIKVGGITLEIMEKALIQAKAGRRHILAEMAKCSPPPTLSLSKYAPLILIMKVHPSKVYSLIGSGGKKVKSIIEESGVEAIDMQDDGTVKIMAIDVASLERAKAIISGLTMVPSVGDIYRNCEIKSMAPYGAFVEIAPGREGLCHISELSAEWLAKPEDAYKVGDRIDVKLIEVNEKGQLRLSVRALLPESETDKDSQKQQPAGDSTKDKSSQRKYVNTSSKDRAAAGASKVSSGDELVLKKKDVRRATGGSSDKTMNSNSSTNEESLVNGEATIS

SEQ ID NO: 71783 - DNA, 1392 bp, Arabidopsis thaliana
  misc_feature (1)..(1392): Ceres Seq. ID no. 4813637
  misc_feature: MA Experiment ID: 20000306 Result: Up-regulated in Transcription
  misc_feature: MA Experiment 20000306 PARAMETER Experiment Name: At_Germinating_Seeds_Sub_P Parameter: Age (hr) Value: 6 vs. 0
  misc_feature: MA Experiment 20000306 PARAMETER Experiment Name: At_Germinating_Seeds_Sub_P Parameter: Organism Value: A. thaliana
  misc_feature: MA Experiment 20000306 PARAMETER Experiment Name: At_Germinating_Seeds_Sub_P Parameter: Plant Line Value: WS
  misc_feature: MA Experiment 20000306 PARAMETER Experiment Name: At_Germinating_Seeds_Sub_P Parameter: Tissue Value: Germinating Seeds
  misc_feature: MA Experiment ID: 20000307 Result: Up-regulated in Transcription
  misc_feature: MA Experiment 20000307 PARAMETER Experiment Name: At_Germinating_Seeds_Sub_P Parameter: Age (hr) Value: 24 vs. 0
  misc_feature: MA Experiment 20000307 PARAMETER Experiment Name: At_Germinating_Seeds_Sub_P Parameter: Organism Value: A. thaliana
  misc_feature: MA Experiment 20000307 PARAMETER Experiment Name: At_Germinating_Seeds_Sub_P Parameter: Plant Line Value: WS
  misc_feature: MA Experiment 20000307 PARAMETER Experiment Name: At_Germinating_Seeds_Sub_P Parameter: Tissue Value: Germinating Seeds
  misc_feature: MA Experiment ID: 20000314 Result: Up-regulated in Transcription
  misc_feature: MA Experiment 20000314 PARAMETER Experiment Name: At_14day_Shoots-Roots_Sub_P Parameter: Age (day) Value: 14
  misc_feature: MA Experiment 20000314 PARAMETER Experiment Name: At_14day_Shoots-Roots_Sub_P Parameter: Organism Value: A. thaliana
  misc_feature: MA Experiment 20000314 PARAMETER Experiment Name: At_14day_Shoots-Roots_Sub_P Parameter: Plant Line Value: WS
  misc_feature: MA Experiment 20000314 PARAMETER Experiment Name: At_14day_Shoots-Roots_Sub_P Parameter: Tissue Value: Roots vs. Whole Plant
  misc_feature: MA Experiment ID: 20000315 Result: Up-regulated in Transcription
  misc_feature: MA Experiment 20000315 PARAMETER Experiment Name: At_14day_Shoots-Roots_Sub_P Parameter: Age (day) Value: 14
  misc_feature: MA Experiment 20000315 PARAMETER Experiment Name: At_14day_Shoots-Roots_Sub_P Parameter: Organism Value: A. thaliana
  misc_feature: MA Experiment 20000315 PARAMETER Experiment Name: At_14day_Shoots-Roots_Sub_P Parameter: Plant Line Value: WS
  misc_feature: MA Experiment 20000315 PARAMETER Experiment Name: At_14day_Shoots-Roots_Sub_P Parameter: Tissue Value: Shoots vs. Whole Plant
  misc_feature: MA Experiment ID: 20000329 Result: Down-regulated in Transcription
  misc_feature: MA Experiment 20000329 PARAMETER Experiment Name: At_4deg_Cold_Sub_P Parameter: Age (day) Value: 14
  misc_feature: MA Experiment 20000329 PARAMETER Experiment Name: At_4deg_Cold_Sub_P Parameter: Organism Value: A. thaliana
  misc_feature: MA Experiment 20000329 PARAMETER Experiment Name: At_4deg_Cold_Sub_P Parameter: Plant Line Value: WS
  misc_feature: MA Experiment 20000329 PARAMETER Experiment Name: At_4deg_Cold_Sub_P Parameter: Temperature (deg C) Value: 4 vs. 22
  misc_feature: MA Experiment 20000329 PARAMETER Experiment Name: At_4deg_Cold_Sub_P Parameter: Timepoint (hr) Value: 6
  misc_feature: MA Experiment 20000329 PARAMETER Experiment Name: At_4deg_Cold_Sub_P Parameter: Tissue Value: Aerial
  misc_feature: MA Experiment ID: 20000332 Result: Down-regulated in Transcription
  misc_feature: MA Experiment 20000332 PARAMETER Experiment Name: At_4deg_Cold_Sub_P Parameter: Age (day) Value: 14
  misc_feature: MA Experiment 20000332 PARAMETER Experiment Name: At_4deg_Cold_Sub_P Parameter: Organism Value: A. thaliana
  misc_feature: MA Experiment 20000332 PARAMETER Experiment Name: At_4deg_Cold_Sub_P Parameter: Plant Line Value: WS
  misc_feature: MA Experiment 20000332 PARAMETER Experiment Name: At_4deg_Cold_Sub_P Parameter: Temperature (deg C) Value: 4 vs. 22
  misc_feature: MA Experiment 20000332 PARAMETER Experiment Name: At_4deg_Cold_Sub_P Parameter: Timepoint (hr) Value: 2
  misc_feature: MA Experiment 20000332 PARAMETER Experiment Name: At_4deg_Cold_Sub_P Parameter: Tissue Value: Aerial
  misc_feature: MA Experiment ID: 20000352 Result: Down-regulated in Transcription
  misc_feature: MA Experiment 20000352 PARAMETER Experiment Name: At_Drought_Sub_P Parameter: Age (day) Value: 7
  misc_feature: MA Experiment 20000352 PARAMETER Experiment Name: At_Drought_Sub_P Parameter: Organism Value: A. thaliana
  misc_feature: MA Experiment 20000352 PARAMETER Experiment Name: At_Drought_Sub_P Parameter: Plant Line Value: WS
  misc_feature: MA Experiment 20000352 PARAMETER Experiment Name: At_Drought_Sub_P Parameter: Timepoint (hr) Value: 6
  misc_feature: MA Experiment 20000352 PARAMETER Experiment Name: At_Drought_Sub_P Parameter: Tissue Value: Whole Plant
  misc_feature: MA Experiment 20000352 PARAMETER Experiment Name: At_Drought_Sub_P Parameter: Treatment Value: Drought vs. No Drought
  misc_feature: MA Experiment ID: 20000440 Result: Up-regulated in Transcription
  misc_feature: MA Experiment 20000440 PARAMETER Experiment Name: At_Closed-Flower__Sub_P Parameter: Tissue Value: Closed Flower vs. Whole Plant
atggagaaaaggaacgacaaatccgagccgttgctgctgccggagaatggatccgacgtctcagaagaagcatcatggatggtttatctaagcacgatcattgccgtttgcggttcctacgagtttggaacatgcgtgggatactccgctccaacacagtttgggattatggaagagcttaatttatcatattcccagttttcggttttcggatcgatattgaatatgggagcagtgctcggcgccattacatcggggaagatttctgatttcatcggtcggaaaggggccatgcggttgtcttcagtgatctctgccatcggctggctgataatttacttggccaagggtgacgtacctttggatttcggaagatttctaacgggttatggttgcggtaccctttcctttgtggtaccggtcttcatcgccgaaattagtccgagaaaattgagaggagccttagcgacgcttaaccagctctttatcgtaatcggattagcttctatgttcctcataggcgccgtcgtaaattggagaactcttgcactaaccggagttgcaccgtgcgtggttctattctttgggacttggttcatccctgaatcacccagatggctggaaatggttggccgccacagtgattttgaaattgcgttgcaaaaactgaggggtcctcaggccaatatcacaagagaagccggggaaattcaggagtacttagcgagtcttgctcacctcccgaaagccacattgatggaccttattgacaaaaagaatattcgatttgtgatagttggagttggtttgatgtttttccaacaattcgttggaattaatggcgttatcttctacgcacaacaaatattcgtatcagcaggagcatccccaactcttggaagcattctatactcgatcgaacaagtcgttctcacagcactaggcgcaacattgctaattgatcggcttggaagaaggccacttcttatggcttcagctgttgggatgctgattggatgtttgctcatcggaaattcatttcttttgaaggctcatggtttagcacttgacatcattccggctctggcagttagtggtgtcttggtctacatcggttcgttctctattggaatgggtgcaatcccatgggttataatgtctgagatatttccaataaatttgaaaggaactgccggaggacttgtcactgtagtaaattggctaagttcatggcttgtctcattcactttcaactttctcatgatttggagccctcatggtacattttatgtgtatggtggggtatgtgtattggctattatcttcatagcaaaacttgttcctgaaactaaaggcagaaccttggaagagattcaagcaatgatgatgtaa

SEQ ID NO: 71784 - protein, 463 aa, Arabidopsis thaliana
  peptide (1)..(463): Ceres Seq. ID no. 4813638
  misc_feature (31)..(462): Pfam Name: Sugar (and other) transporter Pfam Description: Sugar (and other) transporter
  misc_feature (1)..(463): Homolog of NCBI NO: 6729025 NR Description: putative sugar transporter [Arabidopsis thaliana]
  misc_feature (1)..(463): Homolog of NCBI NO: 30679397 NR Description: sugar transporter family [Arabidopsis thaliana]
  misc_feature (1)..(460): Homolog of NCBI NO: 18419741 NR Description: sugar transporter - like protein; protein id: supported by cDNA: 3250., supported by cDNA: gi_17381264 thaliana] >gi|17381265|gb|AAL36051.1| AT5g18840/F17K4_90
  misc_feature (1)..(460): Homolog of NCBI NO: 21592787 NR Description: sugar transporter-like protein [Arabidopsis
  misc_feature (1)..(462): Homolog of NCBI NO: 18407508 NR Description: putative sugar transporter; protein id: supported by cDNA: 114959. [Arabidopsis thaliana]
  misc_feature (1)..(462): Homolog of NCBI NO: 21536914 NR Description: putative sugar transporter [Arabidopsis thaliana]
  misc_feature (15)..(460): Homolog of NCBI NO: 23504385 NR Description: putative sugar transporter [Lycopersicon
  misc_feature (1)..(459): Homolog of NCBI NO: 30695810 NR Description: sugar transporter, putative [Arabidopsis thaliana]
  misc_feature (1)..(309): Homolog of NCBI NO: 25405762 NR Description: hypothetical protein T22H22.15 [imported] - thaliana >gi|3776581|gb|AAC64898.1| Similar to Beta integral protein homolog gb|U43629 from A. thaliana. [Arabidopsis
  misc_feature (328)..(459): Homolog of NCBI NO: 25405762 NR Description: hypothetical protein T22H22.15 [imported] - thaliana >gi|3776581|gb|AAC64898.1| Similar to Beta integral protein homolog gb|U43629 from A. thaliana. [Arabidopsis
MEKRNDKSEPLLLPENGSDVSEEASWMVYLSTIIAVCGSYEFGTCVGYSAPTQFGIMEELNLSYSQFSVFGSILNMGAVLGAITSGKISDFIGRKGAMRLSSVISAIGWLIIYLAKGDVPLDFGRFLTGYGCGTLSFVVPVFIAEISPRKLRGALATLNQLFIVIGLASMFLIGAVVNWRTLALTGVAPCVVLFFGTWFIPESPRWLEMVGRHSDFEIALQKLRGPQANITREAGEIQEYLASLAHLPKATLMDLIDKKNIRFVIVGVGLMFFQQFVGINGVIFYAQQIFVSAGASPTLGSILYSIEQVVLTALGATLLIDRLGRRPLLMASAVGMLIGCLLIGNSFLLKAHGLALDIIPALAVSGVLVYIGSFSIGMGAIPWVIMSEIFPINLKGTAGGLVTVVNWLSSWLVSFTFNFLMIWSPHGTFYVYGGVCVLAIIFIAKLVPETKGRTLEEIQAMMM

SEQ ID NO: 71785 - protein, 437 aa, Arabidopsis thaliana
  peptide (1)..(437): Ceres Seq. ID no. 4813639
  misc_feature (5)..(436): Pfam Name: Sugar (and other) transporter Pfam Description: Sugar (and other) transporter
  misc_feature (1)..(437): Homolog of NCBI NO: 6729025 NR Description: putative sugar transporter [Arabidopsis thaliana]
  misc_feature (1)..(437): Homolog of NCBI NO: 30679397 NR Description: sugar transporter family [Arabidopsis thaliana]
  misc_feature (1)..(434): Homolog of NCBI NO: 18419741 NR Description: sugar transporter - like protein; protein id: supported by cDNA: 3250., supported by cDNA: gi_17381264 thaliana] >gi|17381265|gb|AAL36051.1| AT5g18840/F17K4_90
  misc_feature (1)..(434): Homolog of NCBI NO: 21592787 NR Description: sugar transporter-like protein [Arabidopsis
  misc_feature (1)..(436): Homolog of NCBI NO: 18407508 NR Description: putative sugar transporter; protein id: supported by cDNA: 114959. [Arabidopsis thaliana]
  misc_feature (1)..(436): Homolog of NCBI NO: 21536914 NR Description: putative sugar transporter [Arabidopsis thaliana]
  misc_feature (1)..(434): Homolog of NCBI NO: 23504385 NR Description: putative sugar transporter [Lycopersicon
  misc_feature (1)..(433): Homolog of NCBI NO: 30695810 NR Description: sugar transporter, putative [Arabidopsis thaliana]
  misc_feature (1)..(283): Homolog of NCBI NO: 25405762 NR Description: hypothetical protein T22H22.15 [imported] - thaliana >gi|3776581|gb|AAC64898.1| Similar to Beta integral protein homolog gb|U43629 from A. thaliana. [Arabidopsis
  misc_feature (302)..(433): Homolog of NCBI NO: 25405762 NR Description: hypothetical protein T22H22.15 [imported] - thaliana >gi|3776581|gb|AAC64898.1| Similar to Beta integral protein homolog gb|U43629 from A. thaliana. [Arabidopsis
MVYLSTIIAVCGSYEFGTCVGYSAPTQFGIMEELNLSYSQFSVFGSILNMGAVLGAITSGKISDFIGRKGAMRLSSVISAIGWLIIYLAKGDVPLDFGRFLTGYGCGTLSFVVPVFIAEISPRKLRGALATLNQLFIVIGLASMFLIGAVVNWRTLALTGVAPCVVLFFGTWFIPESPRWLEMVGRHSDFEIALQKLRGPQANITREAGEIQEYLASLAHLPKATLMDLIDKKNIRFVIVGVGLMFFQQFVGINGVIFYAQQIFVSAGASPTLGSILYSIEQVVLTALGATLLIDRLGRRPLLMASAVGMLIGCLLIGNSFLLKAHGLALDIIPALAVSGVLVYIGSFSIGMGAIPWVIMSEIFPINLKGTAGGLVTVVNWLSSWLVSFTFNFLMIWSPHGTFYVYGGVCVLAIIFIAKLVPETKGRTLEEIQAMMM

SEQ ID NO: 71786 - protein, 407 aa, Arabidopsis thaliana
  peptide (1)..(407): Ceres Seq. ID no. 4813640
  misc_feature (1)..(406): Pfam Name: Sugar (and other) transporter Pfam Description: Sugar (and other) transporter
  misc_feature (1)..(407): Homolog of NCBI NO: 6729025 NR Description: putative sugar transporter [Arabidopsis thaliana]
  misc_feature (1)..(407): Homolog of NCBI NO: 30679397 NR Description: sugar transporter family [Arabidopsis thaliana]
  misc_feature (1)..(404): Homolog of NCBI NO: 18419741 NR Description: sugar transporter - like protein; protein id: supported by cDNA: 3250., supported by cDNA: gi_17381264 thaliana] >gi|17381265|gb|AAL36051.1| AT5g18840/F17K4_90
  misc_feature (1)..(404): Homolog of NCBI NO: 21592787 NR Description: sugar transporter-like protein [Arabidopsis
  misc_feature (1)..(406): Homolog of NCBI NO: 18407508 NR Description: putative sugar transporter; protein id: supported by cDNA: 114959. [Arabidopsis thaliana]
  misc_feature (1)..(406): Homolog of NCBI NO: 21536914 NR Description: putative sugar transporter [Arabidopsis thaliana]
  misc_feature (1)..(404): Homolog of NCBI NO: 23504385 NR Description: putative sugar transporter [Lycopersicon
  misc_feature (1)..(403): Homolog of NCBI NO: 30695810 NR Description: sugar transporter, putative [Arabidopsis thaliana]
  misc_feature (1)..(253): Homolog of NCBI NO: 25405762 NR Description: hypothetical protein T22H22.15 [imported] - thaliana >gi|3776581|gb|AAC64898.1| Similar to Beta integral protein homolog gb|U43629 from A. thaliana. [Arabidopsis
  misc_feature (272)..(403): Homolog of NCBI NO: 25405762 NR Description: hypothetical protein T22H22.15 [imported] - thaliana >gi|3776581|gb|AAC64898.1| Similar to Beta integral protein homolog gb|U43629 from A. thaliana. [Arabidopsis
MEELNLSYSQFSVFGSILNMGAVLGAITSGKISDFIGRKGAMRLSSVISAIGWLIIYLAKGDVPLDFGRFLTGYGCGTLSFVVPVFIAEISPRKLRGALATLNQLFIVIGLASMFLIGAVVNWRTLALTGVAPCVVLFFGTWFIPESPRWLEMVGRHSDFEIALQKLRGPQANITREAGEIQEYLASLAHLPKATLMDLIDKKNIRFVIVGVGLMFFQQFVGINGVIFYAQQIFVSAGASPTLGSILYSIEQVVLTALGATLLIDRLGRRPLLMASAVGMLIGCLLIGNSFLLKAHGLALDIIPALAVSGVLVYIGSFSIGMGAIPWVIMSEIFPINLKGTAGGLVTVVNWLSSWLVSFTFNFLMIWSPHGTFYVYGGVCVLAIIFIAKLVPETKGRTLEEIQAMMM

SEQ ID NO: 71787 - DNA, 1626 bp, Arabidopsis thaliana
  misc_feature (1)..(1626): Ceres Seq. ID no. 4813656
  misc_feature: MA Experiment ID: 20000180 Result: Down-regulated in Transcription
  misc_feature: MA Experiment 20000180 PARAMETER Experiment Name: At_Germinating_Seeds_P Parameter: Age (hr) Value: 24 vs. 0
  misc_feature: MA Experiment 20000180 PARAMETER Experiment Name: At_Germinating_Seeds_P Parameter: Tissue Value: Germinating Seeds
  misc_feature: MA Experiment ID: 20000185 Result: Down-regulated in Transcription
  misc_feature: MA Experiment 20000185 PARAMETER Experiment Name: At_Roots__P Parameter: Age (day) Value: 7 vs. 21
  misc_feature: MA Experiment 20000185 PARAMETER Experiment Name: At_Roots__P Parameter: Organism Value: A. thaliana
  misc_feature: MA Experiment 20000185 PARAMETER Experiment Name: At_Roots__P Parameter: Tissue Value: Roots vs. Whole Plant
  misc_feature: MA Experiment ID: 20000439 Result: Down-regulated in Transcription
  misc_feature: MA Experiment 20000439 PARAMETER Experiment Name: At_Roots__P Parameter: Age (day) Value: 14 vs. 21
  misc_feature: MA Experiment 20000439 PARAMETER Experiment Name: At_Roots__P Parameter: Organism Value: A. thaliana
  misc_feature: MA Experiment 20000439 PARAMETER Experiment Name: At_Roots__P Parameter: Tissue Value: Roots vs. Whole Plant
  misc_feature: MA Experiment ID: 20000495 Result: Down-regulated in Transcription
  misc_feature: MA Experiment 20000495 PARAMETER Experiment Name: At_Guard_Cells_P Parameter: Harvest Date Value: 8/2/2002
  misc_feature: MA Experiment 20000495 PARAMETER Experiment Name: At_Guard_Cells_P Parameter: Organism Value: A. thaliana
  misc_feature: MA Experiment 20000495 PARAMETER Experiment Name: At_Guard_Cells_P Parameter: Tissue Value: Guard Cells vs. Leaves
  misc_feature: MA Experiment ID: 20001248 Result: Up-regulated in Transcription
  misc_feature: MA Experiment 20001248 PARAMETER Experiment Name: At_Far-red-induction_P Parameter: Age (day) Value: 7
  misc_feature: MA Experiment 20001248 PARAMETER Experiment Name: At_Far-red-induction_P Parameter: Light Value: Far-red vs. White
  misc_feature: MA Experiment 20001248 PARAMETER Experiment Name: At_Far-red-induction_P Parameter: Organism Value: A. thaliana
  misc_feature: MA Experiment 20001248 PARAMETER Experiment Name: At_Far-red-induction_P Parameter: Plant Line Value: Columbia
  misc_feature: MA Experiment 20001248 PARAMETER Experiment Name: At_Far-red-induction_P Parameter: Timepoint (hr) Value: 4
  misc_feature: MA Experiment 20001248 PARAMETER Experiment Name: At_Far-red-induction_P Parameter: Tissue Value: Whole Plant
  misc_feature: MA Experiment ID: 20001557 Result: Up-regulated in Transcription
  misc_feature: MA Experiment 20001557 PARAMETER Experiment Name: At_Drought_Soil_Dry_P Parameter: Age (day) Value: 27
  misc_feature: MA Experiment 20001557 PARAMETER Experiment Name: At_Drought_Soil_Dry_P Parameter: Organism Value: A. thaliana
  misc_feature: MA Experiment 20001557 PARAMETER Experiment Name: At_Drought_Soil_Dry_P Parameter: Plant Line Value: WS
  misc_feature: MA Experiment 20001557 PARAMETER Experiment Name: At_Drought_Soil_Dry_P Parameter: Post Timepoint (hr) Value: 3
  misc_feature: MA Experiment 20001557 PARAMETER Experiment Name: At_Drought_Soil_Dry_P Parameter: Post-Treatment Value: Re-Water vs. No Drought
  misc_feature: MA Experiment 20001557 PARAMETER Experiment Name: At_Drought_Soil_Dry_P Parameter: Timepoint (day) Value: 13
  misc_feature: MA Experiment 20001557 PARAMETER Experiment Name: At_Drought_Soil_Dry_P Parameter: Treatment Value: Drought vs. No Drought
atgaataaacaagatgttatgaaacttcaggggagagttactgttacagggaacattgacccagctcttctggttaagaaacttagcaaatcaggcaaacatgccgagatcttaggcggtggtggaggaggaggcggcggaggtggaaaggggtttcctaatctgaatgggcaatttgcaaatctcaacatgggtggaaacaataagcctaaaggtggaaaagagagtaaccaagtcaagggtaaagctggtggtggcggtggaggaggtcagaatcatggacatggtcagccaatgcaattgaatcctcaacagattcaacagatgatgatgatgaaggctgctcacggtggtggtggtggtggtcagatgaagatgccgcctatggcagctaaggatcagaagaagtcagttaagtttgctgatgatgaagacgatgagtttagtgaagatgattatgatgatgaggatttcagtgaagatgattatgatgatgatgagttcgatgatgatgaagatgatgatgatgagatgggtcatggtcatggacatggaggaggtgggggtaatcacatgcctcctaataagatgatgatgcctaacaagatgatgcctcagatgggtggtcatcatggtaatggtggtggacctaagggtcccaatgagataatgatgatgatgaatgggttcaaaggcggaggcggtggaggaaagaaaggcggtggtggcgggtttgagattccggtgcagatgaagggaatgggtgagggtaaaaatggaaaggatggtaaaaagggtaaaggaggagagaagggtaagaaagaagggaaagagaataaaggtgggggcaaaaccggaaaaacagatgccaaaagtggtggtggtggccttctagggtttttcaaaaagggtaaaagtgggaacggagatgagaagaagagcgctgggaagaaagatggccatgggggtaataaggtcaaatctcatggtgggggaggaggagttcagcattatgatagtgggcctaaaaaaggtggtggtgggaccaaaggaggaggccatgggggccttgacattgatgagctcatgaaacacagcaaaggaggaggaggaggaggtaacaagggcaatcataatcatagcgccaaagggattggtggtggcccaatgggtccaggcggtccgatgggtccaggcggtccgatgggtcaaggtggtccgatgggtatgatgggtccaggtggtccgatgagtatgatgggtccaggcggtcctatgggtccaatgggtggccaaggcggctcttacccagcggttcaaggcttgccaatgagtggaggtggaggatattatccagggccgcctcaggcaagtcagcaaatgaaccaacaacaatatatgcaaatgatgatgaaccaacagcagcaacaacaacaacaacaacaagctgtagctcatggtggctatggcggtggtcacggtggcgacatgtaccatccgatgatgtacgctcggccttatcctgcagttaattatgctcaccctccaccaatgccgcctcctcactcggattcttatactcatatgttcagcgatgagaatccaggtagttgtagtattatgtga

SEQ ID NO: 71788 - protein, 541 aa, Arabidopsis thaliana
  peptide (1)..(541): Ceres Seq. ID no. 4813657
  misc_feature (136)..(436): Pfam Name: S-antigen protein Pfam Description: S-antigen protein
  misc_feature (1)..(541): Homolog of NCBI NO: 6729032 NR Description: unknown protein [Arabidopsis thaliana]
  misc_feature (3)..(541): Homolog of NCBI NO: 30679432 NR Description: glycine-rich protein [Arabidopsis thaliana]
  misc_feature (11)..(541): Homolog of NCBI NO: 15239643 NR Description: putative protein; protein id: At5g19090.1
  misc_feature (68)..(541): Homolog of NCBI NO: 27754558 NR Description: unknown protein [Arabidopsis thaliana]
  misc_feature (10)..(341): Homolog of NCBI NO: 18397481 NR Description: expressed protein; protein id: At3g06130.1, by cDNA: gi_11908103, supported by cDNA: gi_13194807, supported cDNA: gi_15010767 [Arabidopsis thaliana]
  misc_feature (39)..(425): Homolog of NCBI NO: 27754558 NR Description: unknown protein [Arabidopsis thaliana]
  misc_feature (380)..(541): Homolog of NCBI NO: 30687142 NR Description: heavy-metal-associated domain-containing protein
  misc_feature (11)..(128): Homolog of NCBI NO: 30687142 NR Description: heavy-metal-associated domain-containing protein
  misc_feature (178)..(449): Homolog of NCBI NO: 34394861 NR Description: putative glycin-rich protein [Oryza sativa
  misc_feature (38)..(96): Homolog of NCBI NO: 34394861 NR Description: putative glycin-rich protein [Oryza sativa
MNKQDVMKLQGRVTVTGNIDPALLVKKLSKSGKHAEILGGGGGGGGGGGKGFPNLNGQFANLNMGGNNKPKGGKESNQVKGKAGGGGGGGQNHGHGQPMQLNPQQIQQMMMMKAAHGGGGGGQMKMPPMAAKDQKKSVKFADDEDDEFSEDDYDDEDFSEDDYDDDEFDDDEDDDDEMGHGHGHGGGGGNHMPPNKMMMPNKMMPQMGGHHGNGGGPKGPNEIMMMMNGFKGGGGGGKKGGGGGFEIPVQMKGMGEGKNGKDGKKGKGGEKGKKEGKENKGGGKTGKTDAKSGGGGLLGFFKKGKSGNGDEKKSAGKKDGHGGNKVKSHGGGGGVQHYDSGPKKGGGGTKGGGHGGLDIDELMKHSKGGGGGGNKGNHNHSAKGIGGGPMGPGGPMGPGGPMGQGGPMGMMGPGGPMSMMGPGGPMGPMGGQGGSYPAVQGLPMSGGGGYYPGPPQASQQMNQQQYMQMMMNQQQQQQQQQQAVAHGGYGGGHGGDMYHPMMYARPYPAVNYAHPPPMPPPHSDSYTHMFSDENPGSCSIM

SEQ ID NO: 71789 - protein, 535 aa, Arabidopsis thaliana
  peptide (1)..(535): Ceres Seq. ID no. 4813658
  misc_feature (130)..(430): Pfam Name: S-antigen protein Pfam Description: S-antigen protein
  misc_feature (1)..(535): Homolog of NCBI NO: 6729032 NR Description: unknown protein [Arabidopsis thaliana]
  misc_feature (1)..(535): Homolog of NCBI NO: 30679432 NR Description: glycine-rich protein [Arabidopsis thaliana]
  misc_feature (5)..(535): Homolog of NCBI NO: 15239643 NR Description: putative protein; protein id: At5g19090.1
  misc_feature (62)..(535): Homolog of NCBI NO: 27754558 NR Description: unknown protein [Arabidopsis thaliana]
  misc_feature (4)..(335): Homolog of NCBI NO: 18397481 NR Description: expressed protein; protein id: At3g06130.1, by cDNA: gi_11908103, supported by cDNA: gi_13194807, supported cDNA: gi_15010767 [Arabidopsis thaliana]
  misc_feature (33)..(419): Homolog of NCBI NO: 27754558 NR Description: unknown protein [Arabidopsis thaliana]
  misc_feature (374)..(535): Homolog of NCBI NO: 30687142 NR Description: heavy-metal-associated domain-containing protein
  misc_feature (5)..(122): Homolog of NCBI NO: 30687142 NR Description: heavy-metal-associated domain-containing protein
  misc_feature (172)..(443): Homolog of NCBI NO: 34394861 NR Description: putative glycin-rich protein [Oryza sativa
  misc_feature (32)..(90): Homolog of NCBI NO: 34394861 NR Description: putative glycin-rich protein [Oryza sativa
MKLQGRVTVTGNIDPALLVKKLSKSGKHAEILGGGGGGGGGGGKGFPNLNGQFANLNMGGNNKPKGGKESNQVKGKAGGGGGGGQNHGHGQPMQLNPQQIQQMMMMKAAHGGGGGGQMKMPPMAAKDQKKSVKFADDEDDEFSEDDYDDEDFSEDDYDDDEFDDDEDDDDEMGHGHGHGGGGGNHMPPNKMMMPNKMMPQMGGHHGNGGGPKGPNEIMMMMNGFKGGGGGGKKGGGGGFEIPVQMKGMGEGKNGKDGKKGKGGEKGKKEGKENKGGGKTGKTDAKSGGGGLLGFFKKGKSGNGDEKKSAGKKDGHGGNKVKSHGGGGGVQHYDSGPKKGGGGTKGGGHGGLDIDELMKHSKGGGGGGNKGNHNHSAKGIGGGPMGPGGPMGPGGPMGQGGPMGMMGPGGPMSMMGPGGPMGPMGGQGGSYPAVQGLPMSGGGGYYPGPPQASQQMNQQQYMQMMMNQQQQQQQQQQAVAHGGYGGGHGGDMYHPMMYARPYPAVNYAHPPPMPPPHSDSYTHMFSDENPGSCSIM

SEQ ID NO: 71790 - protein, 478 aa, Arabidopsis thaliana; identical to SEQ ID NO: 36662
  peptide (1)..(478): Ceres Seq. ID no. 4813659
  misc_feature (73)..(373): Pfam Name: S-antigen protein Pfam Description: S-antigen protein
  misc_feature (1)..(478): Homolog of NCBI NO: 6729032 NR Description: unknown protein [Arabidopsis thaliana]
  misc_feature (1)..(478): Homolog of NCBI NO: 30679432 NR Description: glycine-rich protein [Arabidopsis thaliana]
  misc_feature (1)..(478): Homolog of NCBI NO: 15239643 NR Description: putative protein; protein id: At5g19090.1
  misc_feature (5)..(478): Homolog of NCBI NO: 27754558 NR Description: unknown protein [Arabidopsis thaliana]
  misc_feature (1)..(278): Homolog of NCBI NO: 18397481 NR Description: expressed protein; protein id: At3g06130.1, by cDNA: gi_11908103, supported by cDNA: gi_13194807, supported cDNA: gi_15010767 [Arabidopsis thaliana]
  misc_feature (1)..(362): Homolog of NCBI NO: 27754558 NR Description: unknown protein [Arabidopsis thaliana]
  misc_feature (317)..(478): Homolog of NCBI NO: 30687142 NR Description: heavy-metal-associated domain-containing protein
  misc_feature (1)..(65): Homolog of NCBI NO: 30687142 NR Description: heavy-metal-associated domain-containing protein
  misc_feature (115)..(386): Homolog of NCBI NO: 34394861 NR Description: putative glycin-rich protein [Oryza sativa
  misc_feature (1)..(33): Homolog of NCBI NO: 34394861 NR Description: putative glycin-rich protein [Oryza sativa

SEQ ID NO: 71791 - DNA, 1440 bp, Arabidopsis thaliana
  misc_feature (1)..(1440): Ceres Seq. ID no. 4813961
  misc_feature: MA Experiment ID: 20000185 Result: Up-regulated in Transcription
  misc_feature: MA Experiment 20000185 PARAMETER Experiment Name: At_Roots__P Parameter: Age (day) Value: 7 vs. 21
  misc_feature: MA Experiment 20000185 PARAMETER Experiment Name: At_Roots__P Parameter: Organism Value: A. thaliana
  misc_feature: MA Experiment 20000185 PARAMETER Experiment Name: At_Roots__P Parameter: Tissue Value: Roots vs. Whole Plant
  misc_feature: Pfam Name: Aa_trans Pfam Description: Transmembrane amino acid transporter protein
atggcgggaatcccagatcatatccaagaccaacatcttgtggaggaggtatatgctttttatgattttgttacattgaaaaactttattcttaaagagtttttgttactctacttacaggatcaaccctttgatctggaagattggcttccaatcacagcatcaaggaatgccaattggtattattcagctttccacaacgtcactgccattgttggtgctggcgttctcggtcttccttacgccatgtcagagcttggatggggacctggggttgtggtgttgatcctgtcatgggtgatcacgttatacaccctctggcaaatgattgagatgcatgagatgtttgaagggcaacggttcgataggtaccatgagctgggtcaggcagcctttggtaaaaagcttggtttgtacatcatcgtgcccctacaactacttgtcgagatcagtgtgtgcatagtctatatggtcactggaggtaaatccctgaagaatgtacatgaccttgctttgggagatggtgacaagtgcacaaagcttagaattcaacacttcattttgatctttgcctcttcacagttcgtgctctcccttcttaagaacttcaactccatttctggtgtctccttggtagctgctgtcatgtctgtcagctattctacaattgcttgggtagcctcgctgaggaagggtgccaccaccgggagtgtagagtacggctatagaaaaagaacaacctcagtgccattagccttcttaagtgcactgggtgaaatggcttttgcgtacgcaggtcataacgttgttttggaaattcaagcaacgatcccatcaacaccagagaacccatcaaaacgacccatgtggaagggagcggttgtagcctatatcattgtagctttctgctacttccctgtggcacttgtaggtttcaagacctttggaaacagtgttgaagagagcatcctcgaatcactaacaaaaccaacggcacttgtcattgtggccaacatgtttgtggtcatacatctcttgggaagctaccaggtgtatgcgatgcccgtgtttgacatgatcgaatctgtaatgataaggatatggcacttcagtccaacaagagttctacggtttaccatccgatggacttttgtggccgccacgatgggaatagcggtcggtttaccgtattacagcgcattgctgtcattttttgggggatttgtgttcgccccgaccacatactttatcccatgcatcatgtggctgatcctaaagaaaccaaagagatttagtctctcatggtgtatgaactggttttgcatcatttttgggcttgtgctgatgatcatagcacctattgggggactggccaaactaatctataatattcaaaagggcactctacctaattcaagatgcaacttacctaaacactga

SEQ ID NO: 71792 - protein, 479 aa, Arabidopsis thaliana
  peptide (1)..(479): Ceres Seq. ID no. 4813962
  misc_feature: Pfam Name: Aa_trans Pfam Description: Transmembrane amino acid transporter protein
  misc_feature (1)..(479): Homolog of NCBI NO: 15232176 NR Description: putative amino acid permease; protein id: [Arabidopsis thaliana] >gi|6016733|gb|AAF01559.1|AC009325_29
  misc_feature (40)..(479): Homolog of NCBI NO: 6091720 NR Description: putative amino acid permease [Arabidopsis
  misc_feature (1)..(20): Homolog of NCBI NO: 6091720 NR Description: putative amino acid permease [Arabidopsis
  misc_feature (28)..(474): Homolog of NCBI NO: 15219896 NR Description: lysine and histidine specific transporter,
  misc_feature (39)..(439): Homolog of NCBI NO: 2443875 NR Description: amino acid permease [Arabidopsis thaliana]
  misc_feature (45)..(461): Homolog of NCBI NO: 30693663 NR Description: lysine and histidine specific transporter, [Arabidopsis thaliana] >gi|14194151|gb|AAK56270.1|AF367281_1 [Arabidopsis thaliana] >gi|22137070|gb|AAM91380.1|
  misc_feature (45)..(461): Homolog of NCBI NO: 30693666 NR Description: lysine and histidine specific transporter,
  misc_feature (45)..(461): Homolog of NCBI NO: 12597815 NR Description: lysine and histidine specific transporter,
  misc_feature (45)..(461): Homolog of NCBI NO: 22330117 NR Description: lysine and histidine specific transporter,
  misc_feature (46)..(461): Homolog of NCBI NO: 30409136 NR Description: histidine amino acid transporter [Oryza sativa
MAGIPDHIQDQHLVEEVYAFYDFVTLKNFILKEFLLLYLQDQPFDLEDWLPITASRNANWYYSAFHNVTAIVGAGVLGLPYAMSELGWGPGVVVLILSWVITLYTLWQMIEMHEMFEGQRFDRYHELGQAAFGKKLGLYIIVPLQLLVEISVCIVYMVTGGKSLKNVHDLALGDGDKCTKLRIQHFILIFASSQFVLSLLKNFNSISGVSLVAAVMSVSYSTIAWVASLRKGATTGSVEYGYRKRTTSVPLAFLSALGEMAFAYAGHNVVLEIQATIPSTPENPSKRPMWKGAVVAYIIVAFCYFPVALVGFKTFGNSVEESILESLTKPTALVIVANMFVVIHLLGSYQVYAMPVFDMIESVMIRIWHFSPTRVLRFTIRWTFVAATMGIAVGLPYYSALLSFFGGFVFAPTTYFIPCIMWLILKKPKRFSLSWCMNWFCIIFGLVLMIIAPIGGLAKLIYNIQKGTLPNSRCNLPKH

SEQ ID NO: 71793 - protein, 397 aa, Arabidopsis thaliana
  peptide (1)..(397): Ceres Seq. ID no. 4813963
  misc_feature: Pfam Name: Aa_trans Pfam Description: Transmembrane amino acid transporter protein
  misc_feature (1)..(397): Homolog of NCBI NO: 15232176 NR Description: putative amino acid permease; protein id: [Arabidopsis thaliana] >gi|6016733|gb|AAF01559.1|AC009325_29
  misc_feature (1)..(397): Homolog of NCBI NO: 6091720 NR Description: putative amino acid permease [Arabidopsis
  misc_feature (1)..(392): Homolog of NCBI NO: 15219896 NR Description: lysine and histidine specific transporter,
  misc_feature (1)..(357): Homolog of NCBI NO: 2443875 NR Description: amino acid permease [Arabidopsis thaliana]
  misc_feature (1)..(379): Homolog of NCBI NO: 30693663 NR Description: lysine and histidine specific transporter, [Arabidopsis thaliana] >gi|14194151|gb|AAK56270.1|AF367281_1 [Arabidopsis thaliana] >gi|22137070|gb|AAM91380.1|
  misc_feature (1)..(379): Homolog of NCBI NO: 30693666 NR Description: lysine and histidine specific transporter,
  misc_feature (1)..(379): Homolog of NCBI NO: 12597815 NR Description: lysine and histidine specific transporter,
  misc_feature (1)..(379): Homolog of NCBI NO: 22330117 NR Description: lysine and histidine specific transporter,
  misc_feature (1)..(379): Homolog of NCBI NO: 30409136 NR Description: histidine amino acid transporter [Oryza sativa
  misc_feature (1)..(379): Homolog of NCBI NO: 15220504 NR Description: putative amino acid permease; protein id: [Arabidopsis thaliana] >gi|11072015|gb|AAG28894.1|AC008113_10 [Arabidopsis thaliana] >gi|12324687|gb|AAG52310.1|AC011020_17
MSELGWGPGVVVLILSWVITLYTLWQMIEMHEMFEGQRFDRYHELGQAAFGKKLGLYIIVPLQLLVEISVCIVYMVTGGKSLKNVHDLALGDGDKCTKLRIQHFILIFASSQFVLSLLKNFNSISGVSLVAAVMSVSYSTIAWVASLRKGATTGSVEYGYRKRTTSVPLAFLSALGEMAFAYAGHNVVLEIQATIPSTPENPSKRPMWKGAVVAYIIVAFCYFPVALVGFKTFGNSVEESILESLTKPTALVIVANMFVVIHLLGSYQVYAMPVFDMIESVMIRIWHFSPTRVLRFTIRWTFVAATMGIAVGLPYYSALLSFFGGFVFAPTTYFIPCIMWLILKKPKRFSLSWCMNWFCIIFGLVLMIIAPIGGLAKLIYNIQKGTLPNSRCNLPKH

SEQ ID NO: 71794 - protein, 371 aa, Arabidopsis thaliana
  peptide (1)..(371): Ceres Seq. ID no. 4813964
  misc_feature: Pfam Name: Aa_trans Pfam Description: Transmembrane amino acid transporter protein
  misc_feature (1)..(371): Homolog of NCBI NO: 15232176 NR Description: putative amino acid permease; protein id: [Arabidopsis thaliana] >gi|6016733|gb|AAF01559.1|AC009325_29
  misc_feature (1)..(371): Homolog of NCBI NO: 6091720 NR Description: putative amino acid permease [Arabidopsis
  misc_feature (1)..(366): Homolog of NCBI NO: 15219896 NR Description: lysine and histidine specific transporter,
  misc_feature (1)..(331): Homolog of NCBI NO: 2443875 NR Description: amino acid permease [Arabidopsis thaliana]
  misc_feature (1)..(353): Homolog of NCBI NO: 30693663 NR Description: lysine and histidine specific transporter, [Arabidopsis thaliana] >gi|14194151|gb|AAK56270.1|AF367281_1 [Arabidopsis thaliana] >gi|22137070|gb|AAM91380.1|
  misc_feature (1)..(353): Homolog of NCBI NO: 30693666 NR Description: lysine and histidine specific transporter,
  misc_feature (1)..(353): Homolog of NCBI NO: 12597815 NR Description: lysine and histidine specific transporter,
  misc_feature (1)..(353): Homolog of NCBI NO: 22330117 NR Description: lysine and histidine specific transporter,
  misc_feature (1)..(353): Homolog of NCBI NO: 30409136 NR Description: histidine amino acid transporter [Oryza sativa
  misc_feature (1)..(353): Homolog of NCBI NO: 15220504 NR Description: putative amino acid permease; protein id: [Arabidopsis thaliana] >gi|11072015|gb|AAG28894.1|AC008113_10 [Arabidopsis thaliana] >gi|12324687|gb|AAG52310.1|AC011020_17
MIEMHEMFEGQRFDRYHELGQAAFGKKLGLYIIVPLQLLVEISVCIVYMVTGGKSLKNVHDLALGDGDKCTKLRIQHFILIFASSQFVLSLLKNFNSISGVSLVAAVMSVSYSTIAWVASLRKGATTGSVEYGYRKRTTSVPLAFLSALGEMAFAYAGHNVVLEIQATIPSTPENPSKRPMWKGAVVAYIIVAFCYFPVALVGFKTFGNSVEESILESLTKPTALVIVANMFVVIHLLGSYQVYAMPVFDMIESVMIRIWHFSPTRVLRFTIRWTFVAATMGIAVGLPYYSALLSFFGGFVFAPTTYFIPCIMWLILKKPKRFSLSWCMNWFCIIFGLVLMIIAPIGGLAKLIYNIQKGTLPNSRCNLPKH

SEQ ID NO: 71795 - DNA, 1038 bp, Arabidopsis thaliana
  misc_feature (1)..(1038): Ceres Seq. ID no. 4814027
  misc_feature: MA Experiment ID: 20001451 Result: Up-regulated in Transcription
  misc_feature: MA Experiment 20001451 PARAMETER Experiment Name: At_Far-red-induction_P Parameter: Age (day) Value: 7
  misc_feature: MA Experiment 20001451 PARAMETER Experiment Name: At_Far-red-induction_P Parameter: Light Value: Far-red vs. White
  misc_feature: MA Experiment 20001451 PARAMETER Experiment Name: At_Far-red-induction_P Parameter: Organism Value: A. thaliana
  misc_feature: MA Experiment 20001451 PARAMETER Experiment Name: At_Far-red-induction_P Parameter: Plant Line Value: Columbia
  misc_feature: MA Experiment 20001451 PARAMETER Experiment Name: At_Far-red-induction_P Parameter: Timepoint (hr) Value: 24
  misc_feature: MA Experiment 20001451 PARAMETER Experiment Name: At_Far-red-induction_P Parameter: Tissue Value: Whole Plant
atgctgactctactcttcttctctctcggagcgcttcttcttatcgttctgctcttcaaatttgcattcgccgatggagattttaccttgatttcgaagaagcatgtgaagcgtgaggccatacaaggcaaggtcgtctggatcacaggggctagccgtggaattggtgaaattcttgctaaacagtttgcaagtttagatgccaagcttattctctctgctaggaataaagctgaactggatcgggttaagagtgagcttaaaggtaaatttgcaccagaagatgtcaaggttttgcctttagatttagctagcggcgaagagtcactcaaacatgttgtagagcaagcagtgtcgcttttccctggagctggtgttgattatttggttcacaatgctgcctttgagcgtccgaaatccaaggcatcggatgcaagtgaggaaactctcaagactacattcgatgttaatgtctttgggacgatatctctgacaaagttggtagctcctcatatgctaaaacaaggagggggtcattttgttgtgataagcagtgctgcaggaaaggtaccatcacctggacaggctatatattctgcttcaaaacatgctcttcatggctacttccacagcttgcgttctgagttctgtcagaagggaatcaaggttaccgtcgtttgtcctggtccaatagaaacctggaatggtacaggaacatcaacttcggaagacagcaagtctcctgagctccttgctcaacttgatttctctcaagcatctattctctttgctacgcagaaacgtgtgtcatctgaacgatgtgcagagctgactataatcgctgcatctcataacttgaaggaagcttggatttcatatcagccagtactactcgtgatgtatctagtgcagtacatgccttcccttggcttctggctcatggacaaggttggaggaaagcgtgtggaggtcgcggaaaagaaaggcaacacatactcgtgggatttactgttcgggaagaagactaaaacaaactga

SEQ ID NO: 71796 - protein, 345 aa, Arabidopsis thaliana
  peptide (1)..(345): Ceres Seq. ID no. 4814028
  misc_feature (1)..(345): Homolog of NCBI NO: 6017123 NR Description: unknown protein [Arabidopsis thaliana]
  misc_feature (1)..(249): Homolog of NCBI NO: 30678824 NR Description: short-chain dehydrogenase/reductase family [Arabidopsis thaliana] >gi|22022575|gb|AAM83244.1| [Arabidopsis thaliana] >gi|23308299|gb|AAN18119.1|
  misc_feature (266)..(345): Homolog of NCBI NO: 30678824 NR Description: short-chain dehydrogenase/reductase family [Arabidopsis thaliana] >gi|22022575|gb|AAM83244.1| [Arabidopsis thaliana] >gi|23308299|gb|AAN18119.1|
  misc_feature (1)..(323): Homolog of NCBI NO: 7706318 NR Description: CGI-86 protein [Homo sapiens]
  misc_feature (139)..(250): Homolog of NCBI NO: 22330816 NR Description: unknown protein; protein id: At3g03350.1
  misc_feature (45)..(323): Homolog of NCBI NO: 6318548 NR Description: retinal short-chain dehydrogenase/reductase
  misc_feature (2)..(323): Homolog of NCBI NO: 34865424 NR Description: similar to retinal short-chain
  misc_feature (2)..(323): Homolog of NCBI NO: 34395851 NR Description: Retinal short-chain dehydrogenase/reductase 4
  misc_feature (8)..(325): Homolog of NCBI NO: 34865689 NR Description: similar to CGI-86 protein [Rattus norvegicus]
  misc_feature (45)..(323): Homolog of NCBI NO: 21313492 NR Description: RIKEN cDNA 2310016E22 [Mus musculus] unnamed protein product [Mus musculus]
MLTLLFFSLGALLLIVLLFKFAFADGDFTLISKKHVKREAIQGKVVWITGASRGIGEILAKQFASLDAKLILSARNKAELDRVKSELKGKFAPEDVKVLPLDLASGEESLKHVVEQAVSLFPGAGVDYLVHNAAFERPKSKASDASEETLKTTFDVNVFGTISLTKLVAPHMLKQGGGHFVVISSAAGKVPSPGQAIYSASKHALHGYFHSLRSEFCQKGIKVTVVCPGPIETWNGTGTSTSEDSKSPELLAQLDFSQASILFATQKRVSSERCAELTIIAASHNLKEAWISYQPVLLVMYLVQYMPSLGFWLMDKVGGKRVEVAEKKGNTYSWDLLFGKKTKTN

SEQ ID NO: 71797 - protein, 174 aa, Arabidopsis thaliana
  peptide (1)..(174): Ceres Seq. ID no. 4814029
  misc_feature (1)..(174): Homolog of NCBI NO: 6017123 NR Description: unknown protein [Arabidopsis thaliana]
  misc_feature (1)..(78): Homolog of NCBI NO: 30678824 NR Description: short-chain dehydrogenase/reductase family [Arabidopsis thaliana] >gi|22022575|gb|AAM83244.1| [Arabidopsis thaliana] >gi|23308299|gb|AAN18119.1|
  misc_feature (95)..(174): Homolog of NCBI NO: 30678824 NR Description: short-chain dehydrogenase/reductase family [Arabidopsis thaliana] >gi|22022575|gb|AAM83244.1| [Arabidopsis thaliana] >gi|23308299|gb|AAN18119.1|
  misc_feature (1)..(152): Homolog of NCBI NO: 7706318 NR Description: CGI-86 protein [Homo sapiens]
  misc_feature (1)..(79): Homolog of NCBI NO: 22330816 NR Description: unknown protein; protein id: At3g03350.1
  misc_feature (1)..(152): Homolog of NCBI NO: 6318548 NR Description: retinal short-chain dehydrogenase/reductase
  misc_feature (1)..(152): Homolog of NCBI NO: 34865424 NR Description: similar to retinal short-chain
  misc_feature (1)..(152): Homolog of NCBI NO: 34395851 NR Description: Retinal short-chain dehydrogenase/reductase 4
  misc_feature (1)..(154): Homolog of NCBI NO: 34865689 NR Description: similar to CGI-86 protein [Rattus norvegicus]
  misc_feature (1)..(152): Homolog of NCBI NO: 21313492 NR Description: RIKEN cDNA 2310016E22 [Mus musculus] unnamed protein product [Mus musculus]
MLKQGGGHFVVISSAAGKVPSPGQAIYSASKHALHGYFHSLRSEFCQKGIKVTVVCPGPIETWNGTGTSTSEDSKSPELLAQLDFSQASILFATQKRVSSERCAELTIIAASHNLKEAWISYQPVLLVMYLVQYMPSLGFWLMDKVGGKRVEVAEKKGNTYSWDLLFGKKTKTN

SEQ ID NO: 71798 - DNA, 1257 bp, Arabidopsis thaliana
  misc_feature (1)..(1257): Ceres Seq. ID no. 4814169
  misc_feature: MA Experiment ID: 20000179 Result: Down-regulated in Transcription
  misc_feature: MA Experiment 20000179 PARAMETER Experiment Name: At_Germinating_Seeds_P Parameter: Age (hr) Value: 6 vs. 0
  misc_feature: MA Experiment 20000179 PARAMETER Experiment Name: At_Germinating_Seeds_P Parameter: Tissue Value: Germinating Seeds
  misc_feature: MA Experiment ID: 20000180 Result: Down-regulated in Transcription
  misc_feature: MA Experiment 20000180 PARAMETER Experiment Name: At_Germinating_Seeds_P Parameter: Age (hr) Value: 24 vs. 0
  misc_feature: MA Experiment 20000180 PARAMETER Experiment Name: At_Germinating_Seeds_P Parameter: Tissue Value: Germinating Seeds
  misc_feature: MA Experiment ID: 20001911 Result: Up-regulated in Transcription
  misc_feature: MA Experiment 20001911 PARAMETER Experiment Name: At_Drought_Reproduction_P Parameter: Age (day) Value: 40
  misc_feature: MA Experiment 20001911 PARAMETER Experiment Name: At_Drought_Reproduction_P Parameter: Organism Value: A. thaliana
  misc_feature: MA Experiment 20001911 PARAMETER Experiment Name: At_Drought_Reproduction_P Parameter: Plant Line Value: WS
  misc_feature: MA Experiment 20001911 PARAMETER Experiment Name: At_Drought_Reproduction_P Parameter: Timepoint (day) Value: 10
  misc_feature: MA Experiment 20001911 PARAMETER Experiment Name: At_Drought_Reproduction_P Parameter: Tissue Value: Flowers
  misc_feature: MA Experiment 20001911 PARAMETER Experiment Name: At_Drought_Reproduction_P Parameter: Treatment Value: Drought vs. No Drought
atggatcctaacgaaagccaccatcaccaccaacaacaacagctccatcacctccaccaacagcaacagcaacagcagcagcagcaacgactcacttctccttacttccaccaccaactacagcaccatcaccaccttccaaccaccgtagcaaccaccgcttctaccggaaacgccgttccatcttccaacaatgggcttttccctccgcagcctcagccacagcaccagcctaatgatgggtcatcttctctcgcggtgtaccctcattcagttccgtcctcggctgtgacggcgccgatggagccggtaaagaggaagaggggtcgaccaagaaagtatgtgacgccggaacaagccctagcggctaagaaattggcgtcttctgcgagtagttcgtctgctaaacagaggcgagagcttgctgctgttaccggtggtacggtatcgactaattccgggtcatccaagaaatctcagcttggttctgtcgggaaaactggacaatgttttactccgcatattgttaatatagctcctggcgaggatgtggtccagaaaattatgatgttcgcaaaccaaagcaagcatgaactatgcgttctttctgcatcaggcactatctctaatgcatccttgcgccaaccggctccatcaggaggcaacttaccatatgagggtcaatacgagattctctcactatctggatcctatatccgaactgaacaaggtggtaaatccggcggccttagcgtttctttatctgcttcagatggtcagatcatcggtggagcgattggtagccatctcacagctgctggcccggttcaggtacaattctgttgtatcatagtgattcttggtacgtttcagcttgatagaaagaaggatgccgccgggagtggtgggaaaggggatgcttcaaacagtggaagtcggttaacttctcctgtaagctctggacagttgcttggcatgggtttccctcctggtatggaatctacgggaagaaatccaatgaggggaaacgacgagcaacatgatcatcatcatcatcaagccggtttgggtggacctcatcatttcatgatgcaagcgccgcaggggatacacatgacacattccaggccatctgaatggcgcggaggaggcaacagcggtcatgatggcagaggcggtggcgggtatgatttgtcaggaaggataggacatgagtcgtcggagaatggagattacgagcagcaaataccggattag

SEQ ID NO: 71799 - protein, 418 aa, Arabidopsis thaliana
  peptide (1)..(418): Ceres Seq. ID no. 4814170
  misc_feature (3)..(66): Pfam Name: Atrophin-1 family Pfam Description: Atrophin-1 family
  misc_feature (1)..(418): Homolog of NCBI NO: 6175163 NR Description: unknown protein [Arabidopsis thaliana]
  misc_feature (1)..(418): Homolog of NCBI NO: 30679188 NR Description: expressed protein [Arabidopsis thaliana]
  misc_feature (1)..(311): Homolog of NCBI NO: 30679183 NR Description: expressed protein [Arabidopsis thaliana]
  misc_feature (64)..(360): Homolog of NCBI NO: 4165183 NR Description: SAP1 protein [Antirrhinum majus]
  misc_feature (252)..(402): Homolog of NCBI NO: 9502163 NR Description: contains similarity to Antirrhinum majus SAP1
  misc_feature (18)..(367): Homolog of NCBI NO: 14326504 NR Description: At2g33620/F4P9.39 [Arabidopsis thaliana]
  misc_feature (80)..(348): Homolog of NCBI NO: 7487767 NR Description: hypothetical protein T6K21.130 - Arabidopsis >gi|2894604|emb|CAA17138.1| putative protein [Arabidopsis >gi|7268547|emb|CAB78797.1| putative protein [Arabidopsis
  misc_feature (1)..(77): Homolog of NCBI NO: 7487767 NR Description: hypothetical protein T6K21.130 - Arabidopsis >gi|2894604|emb|CAA17138.1| putative protein [Arabidopsis >gi|7268547|emb|CAB78797.1| putative protein [Arabidopsis
  misc_feature (32)..(349): Homolog of NCBI NO: 11281387 NR Description: probable DNA-binding protein - Arabidopsis
  misc_feature (32)..(349): Homolog of NCBI NO: 30695388 NR Description: DNA-binding protein -related [Arabidopsis
MDPNESHHHHQQQQLHHLHQQQQQQQQQQRLTSPYFHHQLQHHHHLPTTVATTASTGNAVPSSNNGLFPPQPQPQHQPNDGSSSLAVYPHSVPSSAVTAPMEPVKRKRGRPRKYVTPEQALAAKKLASSASSSSAKQRRELAAVTGGTVSTNSGSSKKSQLGSVGKTGQCFTPHIVNIAPGEDVVQKIMMFANQSKHELCVLSASGTISNASLRQPAPSGGNLPYEGQYEILSLSGSYIRTEQGGKSGGLSVSLSASDGQIIGGAIGSHLTAAGPVQVQFCCIIVILGTFQLDRKKDAAGSGGKGDASNSGSRLTSPVSSGQLLGMGFPPGMESTGRNPMRGNDEQHDHHHHQAGLGGPHHFMMQAPQGIHMTHSRPSEWRGGGNSGHDGRGGGGYDLSGRIGHESSENGDYEQQIPD

SEQ ID NO: 71800 - protein, 318 aa, Arabidopsis thaliana
  peptide (1)..(318): Ceres Seq. ID no. 4814171
  misc_feature (1)..(318): Homolog of NCBI NO: 6175163 NR Description: unknown protein [Arabidopsis thaliana]
  misc_feature (1)..(318): Homolog of NCBI NO: 30679188 NR Description: expressed protein [Arabidopsis thaliana]
  misc_feature (1)..(211): Homolog of NCBI NO: 30679183 NR Description: expressed protein [Arabidopsis thaliana]
  misc_feature (1)..(260): Homolog of NCBI NO: 4165183 NR Description: SAP1 protein [Antirrhinum majus]
  misc_feature (152)..(302): Homolog of NCBI NO: 9502163 NR Description: contains similarity to Antirrhinum majus SAP1
  misc_feature (1)..(267): Homolog of NCBI NO: 14326504 NR Description: At2g33620/F4P9.39 [Arabidopsis thaliana]
  misc_feature (1)..(248): Homolog of NCBI NO: 7487767 NR Description: hypothetical protein T6K21.130 - Arabidopsis >gi|2894604|emb|CAA17138.1| putative protein [Arabidopsis >gi|7268547|emb|CAB78797.1| putative protein [Arabidopsis
  misc_feature (1)..(249): Homolog of NCBI NO: 11281387 NR Description: probable DNA-binding protein - Arabidopsis
  misc_feature (1)..(249): Homolog of NCBI NO: 30695388 NR Description: DNA-binding protein -related [Arabidopsis
  misc_feature (1)..(267): Homolog of NCBI NO: 2598227 NR Description: AT-hook protein 1 [Arabidopsis thaliana]
MEPVKRKRGRPRKYVTPEQALAAKKLASSASSSSAKQRRELAAVTGGTVSTNSGSSKKSQLGSVGKTGQCFTPHIVNIAPGEDVVQKIMMFANQSKHELCVLSASGTISNASLRQPAPSGGNLPYEGQYEILSLSGSYIRTEQGGKSGGLSVSLSASDGQIIGGAIGSHLTAAGPVQVQFCCIIVILGTFQLDRKKDAAGSGGKGDASNSGSRLTSPVSSGQLLGMGFPPGMESTGRNPMRGNDEQHDHHHHQAGLGGPHHFMMQAPQGIHMTHSRPSEWRGGGNSGHDGRGGGGYDLSGRIGHESSENGDYEQQIPD

SEQ ID NO: 71801 - protein, 230 aa, Arabidopsis thaliana
  peptide (1)..(230): Ceres Seq. ID no. 4814172
  misc_feature (1)..(230): Homolog of NCBI NO: 6175163 NR Description: unknown protein [Arabidopsis thaliana]
  misc_feature (1)..(230): Homolog of NCBI NO: 30679188 NR Description: expressed protein [Arabidopsis thaliana]
  misc_feature (1)..(123): Homolog of NCBI NO: 30679183 NR Description: expressed protein [Arabidopsis thaliana]
  misc_feature (1)..(172): Homolog of NCBI NO: 4165183 NR Description: SAP1 protein [Antirrhinum majus]
  misc_feature (64)..(214): Homolog of NCBI NO: 9502163 NR Description: contains similarity to Antirrhinum majus SAP1
  misc_feature (1)..(179): Homolog of NCBI NO: 14326504 NR Description: At2g33620/F4P9.39 [Arabidopsis thaliana]
  misc_feature (1)..(160): Homolog of NCBI NO: 7487767 NR Description: hypothetical protein T6K21.130 - Arabidopsis >gi|2894604|emb|CAA17138.1| putative protein [Arabidopsis >gi|7268547|emb|CAB78797.1| putative protein [Arabidopsis
  misc_feature (1)..(161): Homolog of NCBI NO: 11281387 NR Description: probable DNA-binding protein - Arabidopsis
  misc_feature (1)..(161): Homolog of NCBI NO: 30695388 NR Description: DNA-binding protein -related [Arabidopsis
  misc_feature (1)..(179): Homolog of NCBI NO: 2598227 NR Description: AT-hook protein 1 [Arabidopsis thaliana]
MMFANQSKHELCVLSASGTISNASLRQPAPSGGNLPYEGQYEILSLSGSYIRTEQGGKSGGLSVSLSASDGQIIGGAIGSHLTAAGPVQVQFCCIIVILGTFQLDRKKDAAGSGGKGDASNSGSRLTSPVSSGQLLGMGFPPGMESTGRNPMRGNDEQHDHHHHQAGLGGPHHFMMQAPQGIHMTHSRPSEWRGGGNSGHDGRGGGGYDLSGRIGHESSENGDYEQQIPD

SEQ ID NO: 71802 - DNA, 1329 bp, Arabidopsis thaliana
  misc_feature (1)..(1329): Ceres Seq. ID no. 4814217
  misc_feature: MA Experiment ID: 20000182 Result: Down-regulated in Transcription
  misc_feature: MA Experiment 20000182 PARAMETER Experiment Name: At_2mM_SA_P Parameter: Age (day) Value: 14
  misc_feature: MA Experiment 20000182 PARAMETER Experiment Name: At_2mM_SA_P Parameter: Organism Value: A. thaliana
  misc_feature: MA Experiment 20000182 PARAMETER Experiment Name: At_2mM_SA_P Parameter: Plant Line Value: WS
  misc_feature: MA Experiment 20000182 PARAMETER Experiment Name: At_2mM_SA_P Parameter: Timepoint (hr) Value: 6
  misc_feature: MA Experiment 20000182 PARAMETER Experiment Name: At_2mM_SA_P Parameter: Tissue Value: Aerial
  misc_feature: MA Experiment 20000182 PARAMETER Experiment Name: At_2mM_SA_P Parameter: Treatment Value: 2mM SA vs. No Treatment
  misc_feature: MA Experiment ID: 20000234 Result: Up-regulated in Transcription
  misc_feature: MA Experiment 20000234 PARAMETER Experiment Name: At_Siliques_P Parameter: Age (day) Value: 21
  misc_feature: MA Experiment 20000234 PARAMETER Experiment Name: At_Siliques_P Parameter: Organism Value: A. thaliana
  misc_feature: MA Experiment 20000234 PARAMETER Experiment Name: At_Siliques_P Parameter: Plant Line Value: WS
  misc_feature: MA Experiment 20000234 PARAMETER Experiment Name: At_Siliques_P Parameter: Tissue Value: Less Than 5mm Siliques vs. Whole Plant
  misc_feature: MA Experiment ID: 20000437 Result: Down-regulated in Transcription
  misc_feature: MA Experiment 20000437 PARAMETER Experiment Name: At_Drought_P Parameter: Age (day) Value: 8
  misc_feature: MA Experiment 20000437 PARAMETER Experiment Name: At_Drought_P Parameter: Organism Value: A. thaliana
  misc_feature: MA Experiment 20000437 PARAMETER Experiment Name: At_Drought_P Parameter: Plant Line Value: WS
  misc_feature: MA Experiment 20000437 PARAMETER Experiment Name: At_Drought_P Parameter: Timepoint (hr) Value: 24
  misc_feature: MA Experiment 20000437 PARAMETER Experiment Name: At_Drought_P Parameter: Tissue Value: Whole Plant
  misc_feature: MA Experiment 20000437 PARAMETER Experiment Name: At_Drought_P Parameter: Treatment Value: Drought vs. No Drought
  misc_feature: MA Experiment ID: 20001451 Result: Down-regulated in Transcription
  misc_feature: MA Experiment 20001451 PARAMETER Experiment Name: At_Far-red-induction_P Parameter: Age (day) Value: 7
  misc_feature: MA Experiment 20001451 PARAMETER Experiment Name: At_Far-red-induction_P Parameter: Light Value: Far-red vs. White
  misc_feature: MA Experiment 20001451 PARAMETER Experiment Name: At_Far-red-induction_P Parameter: Organism Value: A. thaliana
  misc_feature: MA Experiment 20001451 PARAMETER Experiment Name: At_Far-red-induction_P Parameter: Plant Line Value: Columbia
  misc_feature: MA Experiment 20001451 PARAMETER Experiment Name: At_Far-red-induction_P Parameter: Timepoint (hr) Value: 24
  misc_feature: MA Experiment 20001451 PARAMETER Experiment Name: At_Far-red-induction_P Parameter: Tissue Value: Whole Plant
atgtttacatctcctcacttgattgatgtgagggaaagattccgaatagatggcttggatatatctgaggaaaagtttctacagtacttctgggaatgttggaagttattgaaggagaaagctgtagatggtcttaccatgcctcctctttttcagtttctcacagtattggcatttaagatttttgtttgtgaaaaggttgatgttgctgtcattgaagttggacttgggggaaaacttgactcgacaaatgtgattcaaaaacctgttgtctgtggcattgcttctcttgggatggatcatatggacatattgggaaatacgctagctgatattgcctttcataaggctgggattttcaagcctcaaatccccgccttcacagtaccacaactctctgaagcaatggatgttcttcagaaaacagctaataatctcgaggtaactatagtagcgcctcttgaacctaaaaagttggacggagttacgcttggcttgtctggggatcatcagctagtaaatgcaggtcttgctgtttctctttcaagatgctggcttcaaagaaccgggaattggaagaagatatttccaaatgaaagcaaggaaactgagattcccgtggcattttgtcgtggtcttgcaacggcacgtcttcatgggagagctcaagttgttcatgatgtagtttcagatccgcaggactcatcagactcgatggaaactccatgcggtgatctgatcttttacttggatggtgctcacagtccagagagcatggaggcttgtggtcgatggttctcttctgcagtcagaggagacaaaagcttatccactgctattcttctgttcaactgcatggaagtgagagaccctcaagtcttacttccaaagctggtcaccacttgcgcttcctcaggcactcatttctcaagagcgctttttgtcccgagcatgtctacttacaacaaagtcatttcgggtgcatcagcgattccttcagatacacgtagaaaggatttgacttggcaattcagactacaaagactatgggagaaatcaatccaagggactgatgcggggcttgaccatacactgaaacccgatggaataaccgccttaccacctcatgatttcctgtgcggagatgcacctcaatgtggtggacctgcagggacaccggtcacttccagtgccgtaatgccttcacttccattgactataaactggctaagagactgcgtacgccgaaacccttcactgaaactagaggttctggtcacaggatcgctacatcttgttggagatgtgctcaggttgctaaagagatga

SEQ ID NO: 71803 - protein, 442 aa, Arabidopsis thaliana
  peptide (1)..(442): Ceres Seq. ID no. 4814218
  misc_feature (51)..(121): Pfam Name: Mur ligase family, catalytic domain Pfam Description: Mur ligase family, catalytic domain
  misc_feature (1)..(442): Homolog of NCBI NO: 15228213 NR Description: putative folylpolyglutamate synthetase; protein At3g10160.1 [Arabidopsis thaliana]
  misc_feature (1)..(280): Homolog of NCBI NO: 17976757 NR Description: dihydrofolate synthetase [Arabidopsis thaliana]
  misc_feature (1)..(181): Homolog of NCBI NO: 37535812 NR Description: putative folylpolyglutamate synthetase [Oryza
  misc_feature (205)..(362): Homolog of NCBI NO: 37535812 NR Description: putative folylpolyglutamate synthetase [Oryza
  misc_feature (395)..(441): Homolog of NCBI NO: 37535812 NR Description: putative folylpolyglutamate synthetase [Oryza
  misc_feature (1)..(442): Homolog of NCBI NO: 30681208 NR Description: folylpolyglutamate synthase (fpgs2) [Arabidopsis
  misc_feature (1)..(442): Homolog of NCBI NO: 17976705 NR Description: dihydrofolate synthetase /folylpolyglutamate
  misc_feature (1)..(356): Homolog of NCBI NO: 30694288 NR Description: folylpolyglutamate-dihydrofolate synthase
  misc_feature (391)..(442): Homolog of NCBI NO: 30694288 NR Description: folylpolyglutamate-dihydrofolate synthase
  misc_feature (1)..(374): Homolog of NCBI NO: 10177571 NR Description: tetrahydrofolylpolyglutamate synthase-like
MFTSPHLIDVRERFRIDGLDISEEKFLQYFWECWKLLKEKAVDGLTMPPLFQFLTVLAFKIFVCEKVDVAVIEVGLGGKLDSTNVIQKPVVCGIASLGMDHMDILGNTLADIAFHKAGIFKPQIPAFTVPQLSEAMDVLQKTANNLEVTIVAPLEPKKLDGVTLGLSGDHQLVNAGLAVSLSRCWLQRTGNWKKIFPNESKETEIPVAFCRGLATARLHGRAQVVHDVVSDPQDSSDSMETPCGDLIFYLDGAHSPESMEACGRWFSSAVRGDKSLSTAILLFNCMEVRDPQVLLPKLVTTCASSGTHFSRALFVPSMSTYNKVISGASAIPSDTRRKDLTWQFRLQRLWEKSIQGTDAGLDHTLKPDGITALPPHDFLCGDAPQCGGPAGTPVTSSAVMPSLPLTINWLRDCVRRNPSLKLEVLVTGSLHLVGDVLRLLKR

SEQ ID NO: 71804 - protein, 396 aa, Arabidopsis thaliana
  peptide (1)..(396): Ceres Seq. ID no. 4814219
  misc_feature (5)..(75): Pfam Name: Mur ligase family, catalytic domain Pfam Description: Mur ligase family, catalytic domain
  misc_feature (1)..(396): Homolog of NCBI NO: 15228213 NR Description: putative folylpolyglutamate synthetase; protein At3g10160.1 [Arabidopsis thaliana]
  misc_feature (1)..(234): Homolog of NCBI NO: 17976757 NR Description: dihydrofolate synthetase [Arabidopsis thaliana]
  misc_feature (1)..(135): Homolog of NCBI NO: 37535812 NR Description: putative folylpolyglutamate synthetase [Oryza
  misc_feature (159)..(316): Homolog of NCBI NO: 37535812 NR Description: putative folylpolyglutamate synthetase [Oryza
  misc_feature (349)..(395): Homolog of NCBI NO: 37535812 NR Description: putative folylpolyglutamate synthetase [Oryza
  misc_feature (1)..(396): Homolog of NCBI NO: 30681208 NR Description: folylpolyglutamate synthase (fpgs2) [Arabidopsis
  misc_feature (1)..(396): Homolog of NCBI NO: 17976705 NR Description: dihydrofolate synthetase /folylpolyglutamate
  misc_feature (1)..(310): Homolog of NCBI NO: 30694288 NR Description: folylpolyglutamate-dihydrofolate synthase
  misc_feature (345)..(396): Homolog of NCBI NO: 30694288 NR Description: folylpolyglutamate-dihydrofolate synthase
  misc_feature (1)..(328): Homolog of NCBI NO: 10177571 NR Description: tetrahydrofolylpolyglutamate synthase-like
MPPLFQFLTVLAFKIFVCEKVDVAVIEVGLGGKLDSTNVIQKPVVCGIASLGMDHMDILGNTLADIAFHKAGIFKPQIPAFTVPQLSEAMDVLQKTANNLEVTIVAPLEPKKLDGVTLGLSGDHQLVNAGLAVSLSRCWLQRTGNWKKIFPNESKETEIPVAFCRGLATARLHGRAQVVHDVVSDPQDSSDSMETPCGDLIFYLDGAHSPESMEACGRWFSSAVRGDKSLSTAILLFNCMEVRDPQVLLPKLVTTCASSGTHFSRALFVPSMSTYNKVISGASAIPSDTRRKDLTWQFRLQRLWEKSIQGTDAGLDHTLKPDGITALPPHDFLCGDAPQCGGPAGTPVTSSAVMPSLPLTINWLRDCVRRNPSLKLEVLVTGSLHLVGDVLRLLKR

SEQ ID NO: 71805 - protein, 344 aa, Arabidopsis thaliana
  peptide (1)..(344): Ceres Seq. ID no. 4814220
  misc_feature (146)..(221): Pfam Name: Mur ligase family, glutamate ligase domain Pfam Description: Mur ligase family, glutamate ligase domain
  misc_feature (1)..(344): Homolog of NCBI NO: 15228213 NR Description: putative folylpolyglutamate synthetase; protein At3g10160.1 [Arabidopsis thaliana]
  misc_feature (1)..(182): Homolog of NCBI NO: 17976757 NR Description: dihydrofolate synthetase [Arabidopsis thaliana]
  misc_feature (1)..(83): Homolog of NCBI NO: 37535812 NR Description: putative folylpolyglutamate synthetase [Oryza
  misc_feature (107)..(264): Homolog of NCBI NO: 37535812 NR Description: putative folylpolyglutamate synthetase [Oryza
  misc_feature (297)..(343): Homolog of NCBI NO: 37535812 NR Description: putative folylpolyglutamate synthetase [Oryza
  misc_feature (1)..(344): Homolog of NCBI NO: 30681208 NR Description: folylpolyglutamate synthase (fpgs2) [Arabidopsis
  misc_feature (1)..(344): Homolog of NCBI NO: 17976705 NR Description: dihydrofolate synthetase /folylpolyglutamate
  misc_feature (1)..(258): Homolog of NCBI NO: 30694288 NR Description: folylpolyglutamate-dihydrofolate synthase
  misc_feature (293)..(344): Homolog of NCBI NO: 30694288 NR Description: folylpolyglutamate-dihydrofolate synthase
  misc_feature (1)..(276): Homolog of NCBI NO: 10177571 NR Description: tetrahydrofolylpolyglutamate synthase-like
MDHMDILGNTLADIAFHKAGIFKPQIPAFTVPQLSEAMDVLQKTANNLEVTIVAPLEPKKLDGVTLGLSGDHQLVNAGLAVSLSRCWLQRTGNWKKIFPNESKETEIPVAFCRGLATARLHGRAQVVHDVVSDPQDSSDSMETPCGDLIFYLDGAHSPESMEACGRWFSSAVRGDKSLSTAILLFNCMEVRDPQVLLPKLVTTCASSGTHFSRALFVPSMSTYNKVISGASAIPSDTRRKDLTWQFRLQRLWEKSIQGTDAGLDHTLKPDGITALPPHDFLCGDAPQCGGPAGTPVTSSAVMPSLPLTINWLRDCVRRNPSLKLEVLVTGSLHLVGDVLRLLKR

SEQ ID NO: 71806 - DNA, 471 bp, Arabidopsis thaliana
  misc_feature (1)..(471): Ceres Seq. ID no. 4814435
  misc_feature: MA Experiment ID: 20000184 Result: Up-regulated in Transcription
  misc_feature: MA Experiment 20000184 PARAMETER Experiment Name: At_Shoots__P Parameter: Age (day) Value: 7
  misc_feature: MA Experiment 20000184 PARAMETER Experiment Name: At_Shoots__P Parameter: Tissue Value: Shoots vs. Whole Plant
atgcgttcaggagagaaaaacatggattctgtattaaccaataagaacccaattatttatccgaagagaacacggcgttatcgtactgatcagagcagtaccgatgagttttcatctacaaatcgtataagagatatcaaagatccagagcatcctgaactttctttggaagatctcaatgttcttactgaagaatcagttgaagttgatgatcacaagagttacgttagaattacattcactccaactcttcctcattgtcacttgccaacccatattggtctttgcatcttagtcaaacttgtgcaaagcttacctgctagattcaaggttgatgtgagagtagcaccagggagtcatgataaagagacgacagtcaataaacaacttggggataaagaacgtgtgactgcagcattagagaatcccgagttggtggctctgcttaataaaatgatgcaagtgtgttag

SEQ ID NO: 71807 - protein, 156 aa, Arabidopsis thaliana
  peptide (1)..(156): Ceres Seq. ID no. 4814436
  misc_feature (35)..(115): Pfam Name: Domain of unknown function DUF59 Pfam Description: Domain of unknown function DUF59
  misc_feature (1)..(156): Homolog of NCBI NO: 15232658 NR Description: hypothetical protein; protein id: At3g09380.1 thaliana] >gi|6478928|gb|AAF14033.1|AC011436_17 hypothetical
  misc_feature (8)..(156): Homolog of NCBI NO: 20455368 NR Description: Hypothetical protein At3g09380
  misc_feature (8)..(153): Homolog of NCBI NO: 28973748 NR Description: unknown protein [Arabidopsis thaliana]
  misc_feature (8)..(153): Homolog of NCBI NO: 15221347 NR Description: unknown protein; protein id: At1g68310.1 thaliana] >gi|20455357|sp|Q9C9G6|U195_ARATH Hypothetical protein
  misc_feature (12)..(153): Homolog of NCBI NO: 38347077 NR Description: OSJNBa0006A01.18 [Oryza sativa (japonica
  misc_feature (44)..(153): Homolog of NCBI NO: 38567963 NR Description: OSJNBa0093F12.4 [Oryza sativa (japonica
  misc_feature (12)..(153): Homolog of NCBI NO: 34896898 NR Description: hypothetical protein [Oryza sativa (japonica group)] >gi|24899438|gb|AAN65008.1| hypothetical protein [Oryza
  misc_feature (1)..(153): Homolog of NCBI NO: 21312046 NR Description: RIKEN cDNA 1110019N10 [Mus musculus]
  misc_feature (11)..(153): Homolog of NCBI NO: 7706343 NR Description: CGI-128 protein [Homo sapiens]
  misc_feature (11)..(153): Homolog of NCBI NO: 27658356 NR Description: similar to RIKEN cDNA 1110019N10 [Mus musculus]
MRSGEKNMDSVLTNKNPIIYPKRTRRYRTDQSSTDEFSSTNRIRDIKDPEHPELSLEDLNVLTEESVEVDDHKSYVRITFTPTLPHCHLPTHIGLCILVKLVQSLPARFKVDVRVAPGSHDKETTVNKQLGDKERVTAALENPELVALLNKMMQVC

SEQ ID NO: 71808 - protein, 149 aa, Arabidopsis thaliana
  peptide (1)..(149): Ceres Seq. ID no. 4814437
  misc_feature (28)..(108): Pfam Name: Domain of unknown function DUF59 Pfam Description: Domain of unknown function DUF59
  misc_feature (1)..(149): Homolog of NCBI NO: 15232658 NR Description: hypothetical protein; protein id: At3g09380.1 thaliana] >gi|6478928|gb|AAF14033.1|AC011436_17 hypothetical
  misc_feature (1)..(149): Homolog of NCBI NO: 20455368 NR Description: Hypothetical protein At3g09380
  misc_feature (1)..(146): Homolog of NCBI NO: 28973748 NR Description: unknown protein [Arabidopsis thaliana]
  misc_feature (1)..(146): Homolog of NCBI NO: 15221347 NR Description: unknown protein; protein id: At1g68310.1 thaliana] >gi|20455357|sp|Q9C9G6|U195_ARATH Hypothetical protein
  misc_feature (5)..(146): Homolog of NCBI NO: 38347077 NR Description: OSJNBa0006A01.18 [Oryza sativa (japonica
  misc_feature (37)..(146): Homolog of NCBI NO: 38567963 NR Description: OSJNBa0093F12.4 [Oryza sativa (japonica
  misc_feature (5)..(146): Homolog of NCBI NO: 34896898 NR Description: hypothetical protein [Oryza sativa (japonica group)] >gi|24899438|gb|AAN65008.1| hypothetical protein [Oryza
  misc_feature (1)..(146): Homolog of NCBI NO: 21312046 NR Description: RIKEN cDNA 1110019N10 [Mus musculus]
  misc_feature (4)..(146): Homolog of NCBI NO: 7706343 NR Description: CGI-128 protein [Homo sapiens]
  misc_feature (4)..(146): Homolog of NCBI NO: 27658356 NR Description: similar to RIKEN cDNA 1110019N10 [Mus musculus]
MDSVLTNKNPIIYPKRTRRYRTDQSSTDEFSSTNRIRDIKDPEHPELSLEDLNVLTEESVEVDDHKSYVRITFTPTLPHCHLPTHIGLCILVKLVQSLPARFKVDVRVAPGSHDKETTVNKQLGDKERVTAALENPELVALLNKMMQVC

SEQ ID NO: 71809 - DNA, 981 bp, Arabidopsis thaliana
  misc_feature (1)..(981): Ceres Seq. ID no. 4814465
  misc_feature: MA Experiment ID: 20000355 Result: Up-regulated in Transcription
  misc_feature: MA Experiment 20000355 PARAMETER Experiment Name: At_Siliques_Sub_P Parameter: Age (day) Value: 21
  misc_feature: MA Experiment 20000355 PARAMETER Experiment Name: At_Siliques_Sub_P Parameter: Organism Value: A. thaliana
  misc_feature: MA Experiment 20000355 PARAMETER Experiment Name: At_Siliques_Sub_P Parameter: Plant Line Value: WS
  misc_feature: MA Experiment 20000355 PARAMETER Experiment Name: At_Siliques_Sub_P Parameter: Tissue Value: Less Than 5mm Siliques vs. Whole Plant
  misc_feature: MA Experiment ID: 20000440 Result: Down-regulated in Transcription
  misc_feature: MA Experiment 20000440 PARAMETER Experiment Name: At_Closed-Flower__Sub_P Parameter: Tissue Value: Closed Flower vs. Whole Plant
atgttgtttctaaccgcggctgtctgtttaatatgcttttacgtctacaagtccgtgaaaccgccgccgccaattccattgccggagaatgtttctgagatatctccaagaatcaagctcaacgatggcagatatttagcttacaaagaattagggtttcctaaagacaaagccaaaaataagattatcattctccatggattcgggagttccaagttagaaatgatcgacgaattcgagatatacttcttgttgttcgatagagctggttatggagaaagcgatcctcatccatcacgaacactaaaaacggatacatatgacatcgaagaacttgctgacaaattgcaaatcggtccaaagttccatgtcctaggaatgtcactcggggcttatccagtttacggctgtctcaagtacattcctcatagactaagtggagcaacgttggtggttccgatactgaatttttggtggagttgtctgcctctaaacttgtcgatttcagcgttcaagaaattgccaattcaaaatcagtggacacttggagtcgcacactactttccatggttattatattggtggatgactcagaaatggttttccccatttagtcagaatcctagagaaactatgaccgagcgcgatatagagctcgcggataagcatacaaaacacgcatatattaaggaatccgcactacgacaaggtgaatatgtgagcatgcaacgagacatcattgcgggttacgagaattgggagtttgatccaaccgaactgagcaatccattttcagatgataacaaagggtcagttcacatttggtgtgcactcgaagacaaacaaatttcgcatgaggttttactctacttatgtgataagcttccatggataaagcttcatgaagtccctgatgctggacatcttattatccatgagaagcagcattttgaagacattattaaagccgcttgtagttga

SEQ ID NO: 71810 - protein, 326 aa, Arabidopsis thaliana
  peptide (1)..(326): Ceres Seq. ID no. 4814466
  misc_feature (81)..(323): Pfam Name: alpha/beta hydrolase fold Pfam Description: alpha/beta hydrolase fold
  misc_feature (1)..(326): Homolog of NCBI NO: 6714434 NR Description: hypothetical protein [Arabidopsis thaliana]
  misc_feature (1)..(326): Homolog of NCBI NO: 30678800 NR Description: esterase/lipase/thioesterase family [Arabidopsis
  misc_feature (1)..(326): Homolog of NCBI NO: 15228496 NR Description: hypothetical protein; protein id: At3g03230.1 thaliana] >gi|6714415|gb|AAF26103.1|AC012328_6 hypothetical
  misc_feature (1)..(323): Homolog of NCBI NO: 15242253 NR Description: putative protein; protein id: At5g22460.1, by cDNA: gi_15292740, supported by cDNA: gi_20465594 [Arabidopsis
  misc_feature (8)..(324): Homolog of NCBI NO: 18410582 NR Description: expressed protein; protein id: At1g74300.1, by cDNA: 31039. [Arabidopsis thaliana] >gi|25406334|pir||E96771
  misc_feature (8)..(324): Homolog of NCBI NO: 21592662 NR Description: unknown [Arabidopsis thaliana]
  misc_feature (8)..(323): Homolog of NCBI NO: 21537089 NR Description: unknown [Arabidopsis thaliana]
  misc_feature (2)..(311): Homolog of NCBI NO: 34908462 NR Description: P0683F02.22 [Oryza sativa (japonica
  misc_feature (2)..(323): Homolog of NCBI NO: 15228377 NR Description: putative protein; protein id: At3g48410.1, by cDNA: gi_17529095 [Arabidopsis thaliana]
  misc_feature (8)..(323): Homolog of NCBI NO: 18410575 NR Description: expressed protein; protein id: At1g74280.1, by cDNA: 119889. [Arabidopsis thaliana] >gi|25406331|pir||C96771
MLFLTAAVCLICFYVYKSVKPPPPIPLPENVSEISPRIKLNDGRYLAYKELGFPKDKAKNKIIILHGFGSSKLEMIDEFEIYFLLFDRAGYGESDPHPSRTLKTDTYDIEELADKLQIGPKFHVLGMSLGAYPVYGCLKYIPHRLSGATLVVPILNFWWSCLPLNLSISAFKKLPIQNQWTLGVAHYFPWLLYWWMTQKWFSPFSQNPRETMTERDIELADKHTKHAYIKESALRQGEYVSMQRDIIAGYENWEFDPTELSNPFSDDNKGSVHIWCALEDKQISHEVLLYLCDKLPWIKLHEVPDAGHLIIHEKQHFEDIIKAACS

SEQ ID NO: 71811 - protein, 252 aa, Arabidopsis thaliana
  peptide (1)..(252): Ceres Seq. ID no. 4814467
  misc_feature (7)..(249): Pfam Name: alpha/beta hydrolase fold Pfam Description: alpha/beta hydrolase fold
  misc_feature (1)..(252): Homolog of NCBI NO: 6714434 NR Description: hypothetical protein [Arabidopsis thaliana]
  misc_feature (1)..(252): Homolog of NCBI NO: 30678800 NR Description: esterase/lipase/thioesterase family [Arabidopsis
  misc_feature (1)..(252): Homolog of NCBI NO: 15228496 NR Description: hypothetical protein; protein id: At3g03230.1 thaliana] >gi|6714415|gb|AAF26103.1|AC012328_6 hypothetical
  misc_feature (1)..(249): Homolog of NCBI NO: 15242253 NR Description: putative protein; protein id: At5g22460.1, by cDNA: gi_15292740, supported by cDNA: gi_20465594 [Arabidopsis
  misc_feature (1)..(250): Homolog of NCBI NO: 18410582 NR Description: expressed protein; protein id: At1g74300.1, by cDNA: 31039. [Arabidopsis thaliana] >gi|25406334|pir||E96771
  misc_feature (1)..(250): Homolog of NCBI NO: 21592662 NR Description: unknown [Arabidopsis thaliana]
  misc_feature (1)..(249): Homolog of NCBI NO: 21537089 NR Description: unknown [Arabidopsis thaliana]
  misc_feature (1)..(237): Homolog of NCBI NO: 34908462 NR Description: P0683F02.22 [Oryza sativa (japonica
  misc_feature (1)..(249): Homolog of NCBI NO: 15228377 NR Description: putative protein; protein id: At3g48410.1, by cDNA: gi_17529095 [Arabidopsis thaliana]
  misc_feature (1)..(249): Homolog of NCBI NO: 18410575 NR Description: expressed protein; protein id: At1g74280.1, by cDNA: 119889. [Arabidopsis thaliana] >gi|25406331|pir||C96771
MIDEFEIYFLLFDRAGYGESDPHPSRTLKTDTYDIEELADKLQIGPKFHVLGMSLGAYPVYGCLKYIPHRLSGATLVVPILNFWWSCLPLNLSISAFKKLPIQNQWTLGVAHYFPWLLYWWMTQKWFSPFSQNPRETMTERDIELADKHTKHAYIKESALRQGEYVSMQRDIIAGYENWEFDPTELSNPFSDDNKGSVHIWCALEDKQISHEVLLYLCDKLPWIKLHEVPDAGHLIIHEKQHFEDIIKAACS

SEQ ID NO: 71812 - protein, 200 aa, Arabidopsis thaliana
  peptide (1)..(200): Ceres Seq. ID no. 4814468
  misc_feature (1)..(197): Pfam Name: alpha/beta hydrolase fold Pfam Description: alpha/beta hydrolase fold
  misc_feature (1)..(200): Homolog of NCBI NO: 6714434 NR Description: hypothetical protein [Arabidopsis thaliana]
  misc_feature (1)..(200): Homolog of NCBI NO: 30678800 NR Description: esterase/lipase/thioesterase family [Arabidopsis
  misc_feature (1)..(200): Homolog of NCBI NO: 15228496 NR Description: hypothetical protein; protein id: At3g03230.1 thaliana] >gi|6714415|gb|AAF26103.1|AC012328_6 hypothetical
  misc_feature (1)..(197): Homolog of NCBI NO: 15242253 NR Description: putative protein; protein id: At5g22460.1, by cDNA: gi_15292740, supported by cDNA: gi_20465594 [Arabidopsis
  misc_feature (1)..(198): Homolog of NCBI NO: 18410582 NR Description: expressed protein; protein id: At1g74300.1, by cDNA: 31039. [Arabidopsis thaliana] >gi|25406334|pir||E96771
  misc_feature (1)..(198): Homolog of NCBI NO: 21592662 NR Description: unknown [Arabidopsis thaliana]
  misc_feature (1)..(197): Homolog of NCBI NO: 21537089 NR Description: unknown [Arabidopsis thaliana]
  misc_feature (1)..(185): Homolog of NCBI NO: 34908462 NR Description: P0683F02.22 [Oryza sativa (japonica
  misc_feature (1)..(197): Homolog of NCBI NO: 15228377 NR Description: putative protein; protein id: At3g48410.1, by cDNA: gi_17529095 [Arabidopsis thaliana]
  misc_feature (1)..(197): Homolog of NCBI NO: 18410575 NR Description: expressed protein; protein id: At1g74280.1, by cDNA: 119889. [Arabidopsis thaliana] >gi|25406331|pir||C96771
MSLGAYPVYGCLKYIPHRLSGATLVVPILNFWWSCLPLNLSISAFKKLPIQNQWTLGVAHYFPWLLYWWMTQKWFSPFSQNPRETMTERDIELADKHTKHAYIKESALRQGEYVSMQRDIIAGYENWEFDPTELSNPFSDDNKGSVHIWCALEDKQISHEVLLYLCDKLPWIKLHEVPDAGHLIIHEKQHFEDIIKAACS

SEQ ID NO: 71813 - DNA, 2055 bp, Arabidopsis thaliana
  misc_feature (1)..(2055): Ceres Seq. ID no. 4814586
  misc_feature: MA Experiment ID: 20000173 Result: Up-regulated in Transcription
  misc_feature: MA Experiment 20000173 PARAMETER Experiment Name: At_42deg_Heat_P Parameter: Age (day) Value: 14
  misc_feature: MA Experiment 20000173 PARAMETER Experiment Name: At_42deg_Heat_P Parameter: Organism Value: A. thaliana
  misc_feature: MA Experiment 20000173 PARAMETER Experiment Name: At_42deg_Heat_P Parameter: Plant Line Value: WS
  misc_feature: MA Experiment 20000173 PARAMETER Experiment Name: At_42deg_Heat_P Parameter: Temperature (deg C) Value: 42 vs. 22
  misc_feature: MA Experiment 20000173 PARAMETER Experiment Name: At_42deg_Heat_P Parameter: Timepoint (hr) Value: 6
  misc_feature: MA Experiment 20000173 PARAMETER Experiment Name: At_42deg_Heat_P Parameter: Tissue Value: Aerial
  misc_feature: MA Experiment ID: 20000439 Result: Up-regulated in Transcription
  misc_feature: MA Experiment 20000439 PARAMETER Experiment Name: At_Roots__P Parameter: Age (day) Value: 14 vs. 21
  misc_feature: MA Experiment 20000439 PARAMETER Experiment Name: At_Roots__P Parameter: Organism Value: A. thaliana
  misc_feature: MA Experiment 20000439 PARAMETER Experiment Name: At_Roots__P Parameter: Tissue Value: Roots vs. Whole Plant
atgactacgactaggcggaaaaatacacattggtgtcatacttgtagacgaggaatccatcttcaaggagaaggcagaagagaaggagcttgcatttactgtggtaacacctttcttgaaaggctatatgagaatgttgaactaagcccttttgatttattcggattagcctacgaagaagctcgtaaccgtcgcaacaacagaagatcggttataggagaacaactaagttttgaagagttgtttaaccggctcccagcactacaagaccgtcgtggtcctcctccagcatcactagccgcgattaactcattgcaaaagatcaaaatcaggcagaagcatctcggtttagatccctattgtccggtttgccaagaccagtttgaaatcggatcagatgcaagaaaaatgccgtgtaaacatatctaccattctgaatgtatactcccgtggttagtccagcgtaatacttgccccgtctgccgcaaagaacttccacaagaccgaaataatagccggaaaaatccattgtggcatctgtggccgttcagtttgcttttgtcaatgggtaaaaccgaggatgatgtgagtctccgtgtcgccggcggcgaagctaccggcgattcgacggtgaggaatgctcggtgtgggtgttgcaaatggatctcaagcttcgttgggttcaaatgtttattcgtgctgcttttatcagtcgctttgtttctttcggctttgtttttgttgcttccgtttcctatggatcgtgaggattcgaatcttgatcccagatttagaggtcatgctatagtggccagttttagcatcaatagatcggcttcttttcttaatgaaaatacattgcagcttcagaatgacatctttcaagagatgagctacatttccatcaaagtaactatcctggctgttgagccgtcagatgaattgaacataacaaaggttgtgtttggaattgaccctgatactggataccgagaaatcttacctctgtccctgagttctatcaaagagatgtttgaatcggtgctcataaatcaatctactctccagcttacaaaatccttgtttggggaaaccttcctttttgaagtgctaaaatttccaggaggaatcactgtgattccaccacaaagtgctttccctctgcagaaattcaagattgttttcaactttaccctaaactactctattcaccagatacagataaacttcaatacccttgctagtcaactcaaaaatgggctgaatctcgcaccatacgagaatttgtatgtaagcttatcgaactcagaagggtcgaccgtgtctcccccgacaactgttcactcatcagttttgctaagagtcgggacttcaaattcaagcccaaggttgaaacaactgactgataccatcacaggttcacgctcgaaaaaccttggcctgaataataccatatttggtaaggtcaagcaagttcgtctgtcatctttcttgccaaacagcagtgatagtagcaccaaatctccatcaccctcacctagtccccattcgaagcatcaccatcaccatcaccatcaccatcaccaccaccaccatcaccatcacaaccatcatcaccaccaccaccacaatcttagcccgaaaatggctcccgaggtttcacctgtggcctctcctgctcctcacagaagccgtaagagagctccatctgcacctccaccctgcaacccagggaatagagtacatttcaaggagaaacgcgtgcagttttcatccacacctgcgcctgctccttctgctggggcaccacatcatcagctgcactcaccggccccaatttctgcagccaagtctcatatagttccaatctctgcccctctaccacatgtggtgtttgcccatgcagctcaaccacccataacggaaccacgggaaccacatgcaaacgaagttgctcatcctcaaccgcagtcctcttcatcagcgattgaggttttaccagctatgccatggattgtccttctcatgctgatagtggcctggcttcatgaataa

SEQ ID NO: 71814 - protein, 684 aa, Arabidopsis thaliana
  peptide (1)..(684): Ceres Seq. ID no. 4814587
  misc_feature (121)..(161): Pfam Name: Zinc finger, C3HC4 type (RING finger) Pfam Description: Zinc finger, C3HC4 type (RING finger)
  misc_feature (189)..(662): Homolog of NCBI NO: 30694478 NR Description: proline-rich protein family [Arabidopsis thaliana]
  misc_feature (1)..(183): Homolog of NCBI NO: 22655083 NR Description: putative RING zinc finger protein [Arabidopsis >gi|27311973|gb|AAO00952.1| putative RING zinc finger protein
  misc_feature (170)..(427): Homolog of NCBI NO: 11358386 NR Description: hypothetical protein T5P19.230 - Arabidopsis >gi|7594536|emb|CAB88061.1| putative protein [Arabidopsis
  misc_feature (79)..(126): Homolog of NCBI NO: 11358386 NR Description: hypothetical protein T5P19.230 - Arabidopsis >gi|7594536|emb|CAB88061.1| putative protein [Arabidopsis
  misc_feature (79)..(166): Homolog of NCBI NO: 18405518 NR Description: expressed protein; protein id: At2g40830.1,
  misc_feature (7)..(54): Homolog of NCBI NO: 18405518 NR Description: expressed protein; protein id: At2g40830.1,
  misc_feature (208)..(515): Homolog of NCBI NO: 15220212 NR Description: hypothetical protein; protein id: At1g10790.1
  misc_feature (79)..(172): Homolog of NCBI NO: 18410530 NR Description: Expressed protein; protein id: At3g56580.1, by cDNA: gi_15028360 [Arabidopsis thaliana] unknown protein [Arabidopsis thaliana]
  misc_feature (459)..(543): Homolog of NCBI NO: 18410530 NR Description: Expressed protein; protein id: At3g56580.1, by cDNA: gi_15028360 [Arabidopsis thaliana] unknown protein [Arabidopsis thaliana]
  misc_feature (63)..(172): Homolog of NCBI NO: 34908968 NR Description: P0003D09.21 [Oryza sativa (japonica
MTTTRRKNTHWCHTCRRGIHLQGEGRREGACIYCGNTFLERLYENVELSPFDLFGLAYEEARNRRNNRRSVIGEQLSFEELFNRLPALQDRRGPPPASLAAINSLQKIKIRQKHLGLDPYCPVCQDQFEIGSDARKMPCKHIYHSECILPWLVQRNTCPVCRKELPQDRNNSRKNPLWHLWPFSLLLSMGKTEDDVSLRVAGGEATGDSTVRNARCGCCKWISSFVGFKCLFVLLLSVALFLSALFLLLPFPMDREDSNLDPRFRGHAIVASFSINRSASFLNENTLQLQNDIFQEMSYISIKVTILAVEPSDELNITKVVFGIDPDTGYREILPLSLSSIKEMFESVLINQSTLQLTKSLFGETFLFEVLKFPGGITVIPPQSAFPLQKFKIVFNFTLNYSIHQIQINFNTLASQLKNGLNLAPYENLYVSLSNSEGSTVSPPTTVHSSVLLRVGTSNSSPRLKQLTDTITGSRSKNLGLNNTIFGKVKQVRLSSFLPNSSDSSTKSPSPSPSPHSKHHHHHHHHHHHHHHHHHNHHHHHHHNLSPKMAPEVSPVASPAPHRSRKRAPSAPPPCNPGNRVHFKEKRVQFSSTPAPAPSAGAPHHQLHSPAPISAAKSHIVPISAPLPHVVFAHAAQPPITEPREPHANEVAHPQPQSSSSAIEVLPAMPWIVLLMLIVAWLHE

SEQ ID NO: 71815 - protein, 548 aa, Arabidopsis thaliana
  peptide (1)..(548): Ceres Seq. ID no. 4814588
  misc_feature (369)..(535): Pfam Name: Extensin-like region Pfam Description: Extensin-like region
  misc_feature (53)..(526): Homolog of NCBI NO: 30694478 NR Description: proline-rich protein family [Arabidopsis thaliana]
  misc_feature (1)..(47): Homolog of NCBI NO: 22655083 NR Description: putative RING zinc finger protein [Arabidopsis >gi|27311973|gb|AAO00952.1| putative RING zinc finger protein
  misc_feature (34)..(291): Homolog of NCBI NO: 11358386 NR Description: hypothetical protein T5P19.230 - Arabidopsis >gi|7594536|emb|CAB88061.1| putative protein [Arabidopsis
  misc_feature (1)..(30): Homolog of NCBI NO: 18405518 NR Description: expressed protein; protein id: At2g40830.1,
  misc_feature (72)..(379): Homolog of NCBI NO: 15220212 NR Description: hypothetical protein; protein id: At1g10790.1
  misc_feature (1)..(36): Homolog of NCBI NO: 18410530 NR Description: Expressed protein; protein id: At3g56580.1, by cDNA: gi_15028360 [Arabidopsis thaliana] unknown protein [Arabidopsis thaliana]
  misc_feature (323)..(407): Homolog of NCBI NO: 18410530 NR Description: Expressed protein; protein id: At3g56580.1, by cDNA: gi_15028360 [Arabidopsis thaliana] unknown protein [Arabidopsis thaliana]
  misc_feature (1)..(36): Homolog of NCBI NO: 34908968 NR Description: P0003D09.21 [Oryza sativa (japonica
  misc_feature (1)..(41): Homolog of NCBI NO: 15219060 NR Description: hypothetical protein; protein id: At1g60360.1
  misc_feature (1)..(36): Homolog of NCBI NO: 34906008 NR Description: putative RING-H2 finger protein RHC2a [Oryza
MPCKHIYHSECILPWLVQRNTCPVCRKELPQDRNNSRKNPLWHLWPFSLLLSMGKTEDDVSLRVAGGEATGDSTVRNARCGCCKWISSFVGFKCLFVLLLSVALFLSALFLLLPFPMDREDSNLDPRFRGHAIVASFSINRSASFLNENTLQLQNDIFQEMSYISIKVTILAVEPSDELNITKVVFGIDPDTGYREILPLSLSSIKEMFESVLINQSTLQLTKSLFGETFLFEVLKFPGGITVIPPQSAFPLQKFKIVFNFTLNYSIHQIQINFNTLASQLKNGLNLAPYENLYVSLSNSEGSTVSPPTTVHSSVLLRVGTSNSSPRLKQLTDTITGSRSKNLGLNNTIFGKVKQVRLSSFLPNSSDSSTKSPSPSPSPHSKHHHHHHHHHHHHHHHHHNHHHHHHHNLSPKMAPEVSPVASPAPHRSRKRAPSAPPPCNPGNRVHFKEKRVQFSSTPAPAPSAGAPHHQLHSPAPISAAKSHIVPISAPLPHVVFAHAAQPPITEPREPHANEVAHPQPQSSSSAIEVLPAMPWIVLLMLIVAWLHE

SEQ ID NO: 71816 - protein, 496 aa, Arabidopsis thaliana
  peptide (1)..(496): Ceres Seq. ID no. 4814589
  misc_feature (317)..(483): Pfam Name: Extensin-like region Pfam Description: Extensin-like region
  misc_feature (1)..(474): Homolog of NCBI NO: 30694478 NR Description: proline-rich protein family [Arabidopsis thaliana]
  misc_feature (1)..(239): Homolog of NCBI NO: 11358386 NR Description: hypothetical protein T5P19.230 - Arabidopsis >gi|7594536|emb|CAB88061.1| putative protein [Arabidopsis
  misc_feature (20)..(327): Homolog of NCBI NO: 15220212 NR Description: hypothetical protein; protein id: At1g10790.1
  misc_feature (271)..(355): Homolog of NCBI NO: 18410530 NR Description: Expressed protein; protein id: At3g56580.1, by cDNA: gi_15028360 [Arabidopsis thaliana] unknown protein [Arabidopsis thaliana]
  misc_feature (314)..(448): Homolog of NCBI NO: 6679833 NR Description: forkhead box B2; forkhead homolog 4 [Mus >gi|2494501|sp|Q64733|FXB2_MOUSE FORKHEAD BOX PROTEIN B2
  misc_feature (315)..(427): Homolog of NCBI NO: 31201413 NR Description: ENSANGP00000019752 [Anopheles gambiae]
  misc_feature (246)..(412): Homolog of NCBI NO: 31209857 NR Description: ENSANGP00000021699 [Anopheles gambiae]
  misc_feature (330)..(409): Homolog of NCBI NO: 31074957 NR Description: RNA-binding protein 6 [Trypanosoma cruzi]
  misc_feature (299)..(410): Homolog of NCBI NO: 32307177 NR Description: forkhead box G1B; forkhead (Drosophila)-like 1;
  misc_feature (304)..(355): Homolog of NCBI NO: 30387884 NR Description: homeobox Otx1 [Rattus sp.]
MGKTEDDVSLRVAGGEATGDSTVRNARCGCCKWISSFVGFKCLFVLLLSVALFLSALFLLLPFPMDREDSNLDPRFRGHAIVASFSINRSASFLNENTLQLQNDIFQEMSYISIKVTILAVEPSDELNITKVVFGIDPDTGYREILPLSLSSIKEMFESVLINQSTLQLTKSLFGETFLFEVLKFPGGITVIPPQSAFPLQKFKIVFNFTLNYSIHQIQINFNTLASQLKNGLNLAPYENLYVSLSNSEGSTVSPPTTVHSSVLLRVGTSNSSPRLKQLTDTITGSRSKNLGLNNTIFGKVKQVRLSSFLPNSSDSSTKSPSPSPSPHSKHHHHHHHHHHHHHHHHHNHHHHHHHNLSPKMAPEVSPVASPAPHRSRKRAPSAPPPCNPGNRVHFKEKRVQFSSTPAPAPSAGAPHHQLHSPAPISAAKSHIVPISAPLPHVVFAHAAQPPITEPREPHANEVAHPQPQSSSSAIEVLPAMPWIVLLMLIVAWLHE

SEQ ID NO: 71817 - DNA, 1269 bp, Arabidopsis thaliana
  misc_feature (1)..(1269): Ceres Seq. ID no. 4814752
  misc_feature: MA Experiment ID: 20000315 Result: Down-regulated in Transcription
  misc_feature: MA Experiment 20000315 PARAMETER Experiment Name: At_14day_Shoots-Roots_Sub_P Parameter: Age (day) Value: 14
  misc_feature: MA Experiment 20000315 PARAMETER Experiment Name: At_14day_Shoots-Roots_Sub_P Parameter: Organism Value: A. thaliana
  misc_feature: MA Experiment 20000315 PARAMETER Experiment Name: At_14day_Shoots-Roots_Sub_P Parameter: Plant Line Value: WS
  misc_feature: MA Experiment 20000315 PARAMETER Experiment Name: At_14day_Shoots-Roots_Sub_P Parameter: Tissue Value: Shoots vs. Whole Plant
  misc_feature: MA Experiment ID: 20000329 Result: Down-regulated in Transcription
  misc_feature: MA Experiment 20000329 PARAMETER Experiment Name: At_4deg_Cold_Sub_P Parameter: Age (day) Value: 14
  misc_feature: MA Experiment 20000329 PARAMETER Experiment Name: At_4deg_Cold_Sub_P Parameter: Organism Value: A. thaliana
  misc_feature: MA Experiment 20000329 PARAMETER Experiment Name: At_4deg_Cold_Sub_P Parameter: Plant Line Value: WS
  misc_feature: MA Experiment 20000329 PARAMETER Experiment Name: At_4deg_Cold_Sub_P Parameter: Temperature (deg C) Value: 4 vs. 22
  misc_feature: MA Experiment 20000329 PARAMETER Experiment Name: At_4deg_Cold_Sub_P Parameter: Timepoint (hr) Value: 6
  misc_feature: MA Experiment 20000329 PARAMETER Experiment Name: At_4deg_Cold_Sub_P Parameter: Tissue Value: Aerial
atggcggatttgttacccatttacctcattattttggcatttctatgcactgtcggagccattgctttggctttattccatatctacaagcacctattgaactatacggaacccatttatcagagatatattgtgcgcattgtcttcatggtcccggtttatgccttgatgtcattcttggctctcgttttgcccaagagctctatatattttaactctatccgtgaagtttacgaagcatgggtgatatataattttctatcgctgtgtttggcctgggttggaggcccaggttcggtagttataagtttaactggtcgctctctgaagccatcttggcatctcatgacgtgttgcatcccaccactaccattagacgggcgttttattagacgatgcaagcaaggttgtctgcaatttgttattctaaagccaatcctagttgctgtcacacttgtgctttatgcaaaagggaaatacaaggatggaaattttagccctgatcaatcctatctctatcttaccatcatctatacaatatcatacactgtagctctgtacgcgctggtcctcttttatgtggcatgcaaagatctgcttcagccattcaatccagtcccaaaatttgtgattataaagtctgttgtctttctaacctattggcagggtgttctagttttcctttttgctaaatctggatttataagggatgaagaagaagcagccctcttccaaaattttataatatgtgtggaaatgcttattgctgcagctgctcatttctatgcatttccgtacaaggaatatgcagaggccaatgttggaggagctcgcagtttctcaggaagtctggcacatgctcttatgctaaacgatttctaccatgatactgttcaccagtttgcaccaacatatcacgattatgtgctctataatcataatgatgggggtgaggaagggacaaggaagtaccgagcacgaacatttgtgccaactggtcaggaaatggatgctgttagaaagaacaaacacatgtttggaaacaagatagatggtgtttcggtctccagtcaatcttcagaaacaagcacacccaaaacctctggtgtaacttatgatcctgcacgccctgagagcatgaaatcttccttgctggtagatgcctcggactctgtttccacaatgtatgacatgtcgctcattgacattgatatatcgagctaccctagcaaggtaccttctgcaaatataagtggaggacctaaatag

SEQ ID NO: 71818 - protein, 422 aa, Arabidopsis thaliana
  peptide (1)..(422): Ceres Seq. ID no. 4814753
  misc_feature (5)..(281): Pfam Name: Domain of unknown function Pfam Description: Domain of unknown function
  misc_feature (1)..(422): Homolog of NCBI NO: 6671963 NR Description: unknown protein [Arabidopsis thaliana]
  misc_feature (1)..(419): Homolog of NCBI NO: 30690265 NR Description: expressed protein [Arabidopsis thaliana] unknown protein [Arabidopsis thaliana]
  misc_feature (128)..(422): Homolog of NCBI NO: 15230584 NR Description: unknown protein; protein id: At3g05940.1 thaliana] >gi|6714407|gb|AAF26096.1|AC012393_22 unknown protein
  misc_feature (1)..(77): Homolog of NCBI NO: 15230584 NR Description: unknown protein; protein id: At3g05940.1 thaliana] >gi|6714407|gb|AAF26096.1|AC012393_22 unknown protein
  misc_feature (81)..(419): Homolog of NCBI NO: 7485938 NR Description: hypothetical protein F21E10.13 - Arabidopsis >gi|3047085|gb|AAC13598.1| Hypothetical protein F21E10.13
  misc_feature (1)..(81): Homolog of NCBI NO: 7485938 NR Description: hypothetical protein F21E10.13 - Arabidopsis >gi|3047085|gb|AAC13598.1| Hypothetical protein F21E10.13
  misc_feature (13)..(367): Homolog of NCBI NO: 34897328 NR Description: putative organic solute transporter [Oryza >gi|18855064|gb|AAL79756.1| putative organic solute transporter
  misc_feature (13)..(390): Homolog of NCBI NO: 34900750 NR Description: OJ1341_A08.33 [Oryza sativa (japonica
  misc_feature (20)..(308): Homolog of NCBI NO: 26341248 NR Description: unnamed protein product [Mus musculus]
  misc_feature (20)..(308): Homolog of NCBI NO: 34871282 NR Description: similar to hypothetical protein MGC9712 [Rattus
MADLLPIYLIILAFLCTVGAIALALFHIYKHLLNYTEPIYQRYIVRIVFMVPVYALMSFLALVLPKSSIYFNSIREVYEAWVIYNFLSLCLAWVGGPGSVVISLTGRSLKPSWHLMTCCIPPLPLDGRFIRRCKQGCLQFVILKPILVAVTLVLYAKGKYKDGNFSPDQSYLYLTIIYTISYTVALYALVLFYVACKDLLQPFNPVPKFVIIKSVVFLTYWQGVLVFLFAKSGFIRDEEEAALFQNFIICVEMLIAAAAHFYAFPYKEYAEANVGGARSFSGSLAHALMLNDFYHDTVHQFAPTYHDYVLYNHNDGGEEGTRKYRARTFVPTGQEMDAVRKNKHMFGNKIDGVSVSSQSSETSTPKTSGVTYDPARPESMKSSLLVDASDSVSTMYDMSLIDIDISSYPSKVPSANISGGPK

SEQ ID NO: 71819 - protein, 373 aa, Arabidopsis thaliana
  peptide (1)..(373): Ceres Seq. ID no. 4814754
  misc_feature (1)..(232): Pfam Name: Domain of unknown function Pfam Description: Domain of unknown function
  misc_feature (1)..(373): Homolog of NCBI NO: 6671963 NR Description: unknown protein [Arabidopsis thaliana]
  misc_feature (1)..(370): Homolog of NCBI NO: 30690265 NR Description: expressed protein [Arabidopsis thaliana] unknown protein [Arabidopsis thaliana]
  misc_feature (79)..(373): Homolog of NCBI NO: 15230584 NR Description: unknown protein; protein id: At3g05940.1 thaliana] >gi|6714407|gb|AAF26096.1|AC012393_22 unknown protein
  misc_feature (1)..(28): Homolog of NCBI NO: 15230584 NR Description: unknown protein; protein id: At3g05940.1 thaliana] >gi|6714407|gb|AAF26096.1|AC012393_22 unknown protein
  misc_feature (32)..(370): Homolog of NCBI NO: 7485938 NR Description: hypothetical protein F21E10.13 - Arabidopsis >gi|3047085|gb|AAC13598.1| Hypothetical protein F21E10.13
  misc_feature (1)..(32): Homolog of NCBI NO: 7485938 NR Description: hypothetical protein F21E10.13 - Arabidopsis >gi|3047085|gb|AAC13598.1| Hypothetical protein F21E10.13
  misc_feature (1)..(318): Homolog of NCBI NO: 34897328 NR Description: putative organic solute transporter [Oryza >gi|18855064|gb|AAL79756.1| putative organic solute transporter
  misc_feature (1)..(341): Homolog of NCBI NO: 34900750 NR Description: OJ1341_A08.33 [Oryza sativa (japonica
  misc_feature (1)..(259): Homolog of NCBI NO: 26341248 NR Description: unnamed protein product [Mus musculus]
  misc_feature (1)..(259): Homolog of NCBI NO: 34871282 NR Description: similar to hypothetical protein MGC9712 [Rattus
MVPVYALMSFLALVLPKSSIYFNSIREVYEAWVIYNFLSLCLAWVGGPGSVVISLTGRSLKPSWHLMTCCIPPLPLDGRFIRRCKQGCLQFVILKPILVAVTLVLYAKGKYKDGNFSPDQSYLYLTIIYTISYTVALYALVLFYVACKDLLQPFNPVPKFVIIKSVVFLTYWQGVLVFLFAKSGFIRDEEEAALFQNFIICVEMLIAAAAHFYAFPYKEYAEANVGGARSFSGSLAHALMLNDFYHDTVHQFAPTYHDYVLYNHNDGGEEGTRKYRARTFVPTGQEMDAVRKNKHMFGNKIDGVSVSSQSSETSTPKTSGVTYDPARPESMKSSLLVDASDSVSTMYDMSLIDIDISSYPSKVPSANISGGPK

SEQ ID NO: 71820 - protein, 366 aa, Arabidopsis thaliana
  peptide (1)..(366): Ceres Seq. ID no. 4814755
  misc_feature (1)..(225): Pfam Name: Domain of unknown function Pfam Description: Domain of unknown function
  misc_feature (1)..(366): Homolog of NCBI NO: 6671963 NR Description: unknown protein [Arabidopsis thaliana]
  misc_feature (1)..(363): Homolog of NCBI NO: 30690265 NR Description: expressed protein [Arabidopsis thaliana] unknown protein [Arabidopsis thaliana]
  misc_feature (72)..(366): Homolog of NCBI NO: 15230584 NR Description: unknown protein; protein id: At3g05940.1 thaliana] >gi|6714407|gb|AAF26096.1|AC012393_22 unknown protein
  misc_feature (1)..(21): Homolog of NCBI NO: 15230584 NR Description: unknown protein; protein id: At3g05940.1 thaliana] >gi|6714407|gb|AAF26096.1|AC012393_22 unknown protein
  misc_feature (25)..(363): Homolog of NCBI NO: 7485938 NR Description: hypothetical protein F21E10.13 - Arabidopsis >gi|3047085|gb|AAC13598.1| Hypothetical protein F21E10.13
  misc_feature (1)..(25): Homolog of NCBI NO: 7485938 NR Description: hypothetical protein F21E10.13 - Arabidopsis >gi|3047085|gb|AAC13598.1| Hypothetical protein F21E10.13
  misc_feature (1)..(311): Homolog of NCBI NO: 34897328 NR Description: putative organic solute transporter [Oryza >gi|18855064|gb|AAL79756.1| putative organic solute transporter
  misc_feature (1)..(334): Homolog of NCBI NO: 34900750 NR Description: OJ1341_A08.33 [Oryza sativa (japonica
  misc_feature (1)..(252): Homolog of NCBI NO: 26341248 NR Description: unnamed protein product [Mus musculus]
  misc_feature (1)..(252): Homolog of NCBI NO: 34871282 NR Description: similar to hypothetical protein MGC9712 [Rattus
MSFLALVLPKSSIYFNSIREVYEAWVIYNFLSLCLAWVGGPGSVVISLTGRSLKPSWHLMTCCIPPLPLDGRFIRRCKQGCLQFVILKPILVAVTLVLYAKGKYKDGNFSPDQSYLYLTIIYTISYTVALYALVLFYVACKDLLQPFNPVPKFVIIKSVVFLTYWQGVLVFLFAKSGFIRDEEEAALFQNFIICVEMLIAAAAHFYAFPYKEYAEANVGGARSFSGSLAHALMLNDFYHDTVHQFAPTYHDYVLYNHNDGGEEGTRKYRARTFVPTGQEMDAVRKNKHMFGNKIDGVSVSSQSSETSTPKTSGVTYDPARPESMKSSLLVDASDSVSTMYDMSLIDIDISSYPSKVPSANISGGPK

SEQ ID NO: 71821 - DNA, 1437 bp, Arabidopsis thaliana
  misc_feature (1)..(1437): Ceres Seq. ID no. 4814854
  misc_feature: MA Experiment ID: 20000113 Result: Down-regulated in Transcription
  misc_feature: MA Experiment 20000113 PARAMETER Experiment Name: At_42deg_Heat_cDNA_P Parameter: Temperature (deg C) Value: 42 vs. 22
  misc_feature: MA Experiment 20000113 PARAMETER Experiment Name: At_42deg_Heat_cDNA_P Parameter: Timepoint (hr) Value: 8
  misc_feature: MA Experiment 20000113 PARAMETER Experiment Name: At_42deg_Heat_cDNA_P Parameter: Tissue Value: Aerial
  misc_feature: MA Experiment ID: 20000171 Result: Down-regulated in Transcription
  misc_feature: MA Experiment 20000171 PARAMETER Experiment Name: At_42deg_Heat_P Parameter: Age (day) Value: 14
  misc_feature: MA Experiment 20000171 PARAMETER Experiment Name: At_42deg_Heat_P Parameter: Organism Value: A. thaliana
  misc_feature: MA Experiment 20000171 PARAMETER Experiment Name: At_42deg_Heat_P Parameter: Plant Line Value: WS
  misc_feature: MA Experiment 20000171 PARAMETER Experiment Name: At_42deg_Heat_P Parameter: Temperature (deg C) Value: 42 vs. 22
  misc_feature: MA Experiment 20000171 PARAMETER Experiment Name: At_42deg_Heat_P Parameter: Timepoint (hr) Value: 1
  misc_feature: MA Experiment 20000171 PARAMETER Experiment Name: At_42deg_Heat_P Parameter: Tissue Value: Aerial
  misc_feature: MA Experiment ID: 20000173 Result: Down-regulated in Transcription
  misc_feature: MA Experiment 20000173 PARAMETER Experiment Name: At_42deg_Heat_P Parameter: Age (day) Value: 14
  misc_feature: MA Experiment 20000173 PARAMETER Experiment Name: At_42deg_Heat_P Parameter: Organism Value: A. thaliana
  misc_feature: MA Experiment 20000173 PARAMETER Experiment Name: At_42deg_Heat_P Parameter: Plant Line Value: WS
  misc_feature: MA Experiment 20000173 PARAMETER Experiment Name: At_42deg_Heat_P Parameter: Temperature (deg C) Value: 42 vs. 22
  misc_feature: MA Experiment 20000173 PARAMETER Experiment Name: At_42deg_Heat_P Parameter: Timepoint (hr) Value: 6
  misc_feature: MA Experiment 20000173 PARAMETER Experiment Name: At_42deg_Heat_P Parameter: Tissue Value: Aerial
  misc_feature: MA Experiment ID: 20000184 Result: Down-regulated in Transcription
  misc_feature: MA Experiment 20000184 PARAMETER Experiment Name: At_Shoots__P Parameter: Age (day) Value: 7
  misc_feature: MA Experiment 20000184 PARAMETER Experiment Name: At_Shoots__P Parameter: Tissue Value: Shoots vs. Whole Plant
  misc_feature: MA Experiment ID: 20000496 Result: Down-regulated in Transcription
  misc_feature: MA Experiment 20000496 PARAMETER Experiment Name: At_Guard_Cells_P Parameter: Harvest Date Value: 7/19/2002
  misc_feature: MA Experiment 20000496 PARAMETER Experiment Name: At_Guard_Cells_P Parameter: Organism Value: Canola
  misc_feature: MA Experiment 20000496 PARAMETER Experiment Name: At_Guard_Cells_P Parameter: Tissue Value: Guard Cells vs. Leaves
  misc_feature: MA Experiment ID: 20001451 Result: Down-regulated in Transcription
  misc_feature: MA Experiment 20001451 PARAMETER Experiment Name: At_Far-red-induction_P Parameter: Age (day) Value: 7
  misc_feature: MA Experiment 20001451 PARAMETER Experiment Name: At_Far-red-induction_P Parameter: Light Value: Far-red vs. White
  misc_feature: MA Experiment 20001451 PARAMETER Experiment Name: At_Far-red-induction_P Parameter: Organism Value: A. thaliana
  misc_feature: MA Experiment 20001451 PARAMETER Experiment Name: At_Far-red-induction_P Parameter: Plant Line Value: Columbia
  misc_feature: MA Experiment 20001451 PARAMETER Experiment Name: At_Far-red-induction_P Parameter: Timepoint (hr) Value: 24
  misc_feature: MA Experiment 20001451 PARAMETER Experiment Name: At_Far-red-induction_P Parameter: Tissue Value: Whole Plant
atgtccgggtccgaatctgtgtatcggaaacgccaaccaatggatatggatggttaccacaaacggagcgccggtttaaacccttgtaaacactccggtttctcacattcatcaagacccatggctccaggaatttaccgttacccagaagtgaaatcttcgttgcggagacaagttcatgcgcctgtgcggatactcaatagcggtcgagatcgtagcacacgacaaggttctggtaatgtgttgggaacctttctcacaaggaacaatgacatgtggaaaagaaatgcacttgattcgtctttacgctatagaacggatagagaagtaattgatgttgatgatgagcttggagatgttgaaatgatatctgatgatacaagtagggagggtgtcgaaaacgtggctatggaggtggacgaggtggaagagaaggcggagatgggaaatggattgttttctgaggttgccagtctgaaaaatgggagcttgagggtgggtgaatgttctaaagctaatagtagttcactcgttgtgaatcgccctgtgactgatgtcacaagttttgaagcatacagaaaggttcttgagagtgctgtgaaccggacttctaaactgaaagacagaggctttgttgatttttttaaagagagaggtcgtgctttactacgaagcttgtcttccttttggagacaagatgaagaaccagtagaggttgtacaacgtgaggcatttgtacctctttctagagaggaggagacagcagtcaggcgtgcattctcagctaatgattcaaacatcttggttactcataagaactcaaatattgatattaccgggaaaatcttgaggtgccttaaaccaggcaaatggttgaacgatgaggtcattaatctttatatggtattgctgaaagaaagggaagctagagaaccaaagaagtttcttaaatgtcattttttcaatacatttttcttcactaagttagttaattcggcgactggatacaactatggtgcagtgagaagatggacttcaatgaagaggttgggctaccatctcaaagactgtgacaagatatttatccctatccatatgaacatccactggactttggctgtaattaatataaaggaccagaaattccagtatcttgactctttcaaaggaagggagcctaaaatcctcgatgcactggctagatactttgtcgatgaagtgagggataagagtgaagtagaccttgatgtaagtcgatggagacaagaatttgtccaggaccttccaatgcagagaaatggattcgattgtggaatgtttatggtgaaatacatcgacttctatagcagaggtctggatctttgtttcactcaggaacaaatgccatatttccgggctaggacagcaaaggagattctgcaactgaaagccgagtga

SEQ ID NO: 71822 - protein, 478 aa, Arabidopsis thaliana
  peptide (1)..(478): Ceres Seq. ID no. 4814855
  misc_feature (1)..(478): Homolog of NCBI NO: 6728998 NR Description: hypothetical protein [Arabidopsis thaliana]
  misc_feature (12)..(478): Homolog of NCBI NO: 30680058 NR Description: Ulp1 protease family [Arabidopsis thaliana]
  misc_feature (12)..(478): Homolog of NCBI NO: 26450144 NR Description: unknown protein [Arabidopsis thaliana]
  misc_feature (21)..(478): Homolog of NCBI NO: 18414542 NR Description: Expressed protein; protein id: At4g15880.1, by cDNA: gi_14423393, supported by cDNA: gi_20148438 [Arabidopsis >gi|14423394|gb|AAK62379.1|AF386934_1 Unknown protein
  misc_feature (21)..(478): Homolog of NCBI NO: 34787206 NR Description: SUMO protease [Arabidopsis thaliana]
  misc_feature (32)..(435): Homolog of NCBI NO: 25371728 NR Description: hypothetical protein AT4g15880 [imported] - thaliana >gi|5281021|emb|CAB45994.1| hypothetical protein thaliana] >gi|7268336|emb|CAB78630.1| hypothetical protein
  misc_feature (32)..(429): Homolog of NCBI NO: 2326343 NR Description: G14587-5 [Arabidopsis thaliana]
  misc_feature (32)..(429): Homolog of NCBI NO: 7485126 NR Description: hypothetical protein - Arabidopsis thaliana
  misc_feature (192)..(478): Homolog of NCBI NO: 34915036 NR Description: P0458A05.23 [Oryza sativa (japonica
  misc_feature (256)..(478): Homolog of NCBI NO: 15236895 NR Description: hypothetical protein; protein id: At4g00690.1
MSGSESVYRKRQPMDMDGYHKRSAGLNPCKHSGFSHSSRPMAPGIYRYPEVKSSLRRQVHAPVRILNSGRDRSTRQGSGNVLGTFLTRNNDMWKRNALDSSLRYRTDREVIDVDDELGDVEMISDDTSREGVENVAMEVDEVEEKAEMGNGLFSEVASLKNGSLRVGECSKANSSSLVVNRPVTDVTSFEAYRKVLESAVNRTSKLKDRGFVDFFKERGRALLRSLSSFWRQDEEPVEVVQREAFVPLSREEETAVRRAFSANDSNILVTHKNSNIDITGKILRCLKPGKWLNDEVINLYMVLLKEREAREPKKFLKCHFFNTFFFTKLVNSATGYNYGAVRRWTSMKRLGYHLKDCDKIFIPIHMNIHWTLAVINIKDQKFQYLDSFKGREPKILDALARYFVDEVRDKSEVDLDVSRWRQEFVQDLPMQRNGFDCGMFMVKYIDFYSRGLDLCFTQEQMPYFRARTAKEILQLKAE

SEQ ID NO: 71823 - protein, 465 aa, Arabidopsis thaliana; identical to SEQ ID NO: 24073
  peptide (1)..(465): Ceres Seq. ID no. 4814856
  misc_feature (1)..(465): Homolog of NCBI NO: 6728998 NR Description: hypothetical protein [Arabidopsis thaliana]
  misc_feature (1)..(465): Homolog of NCBI NO: 30680058 NR Description: Ulp1 protease family [Arabidopsis thaliana]
  misc_feature (1)..(465): Homolog of NCBI NO: 26450144 NR Description: unknown protein [Arabidopsis thaliana]
  misc_feature (8)..(465): Homolog of NCBI NO: 18414542 NR Description: Expressed protein; protein id: At4g15880.1, by cDNA: gi_14423393, supported by cDNA: gi_20148438 [Arabidopsis >gi|14423394|gb|AAK62379.1|AF386934_1 Unknown protein
  misc_feature (8)..(465): Homolog of NCBI NO: 34787206 NR Description: SUMO protease [Arabidopsis thaliana]
  misc_feature (19)..(422): Homolog of NCBI NO: 25371728 NR Description: hypothetical protein AT4g15880 [imported] - thaliana >gi|5281021|emb|CAB45994.1| hypothetical protein thaliana] >gi|7268336|emb|CAB78630.1| hypothetical protein
  misc_feature (19)..(416): Homolog of NCBI NO: 2326343 NR Description: G14587-5 [Arabidopsis thaliana]
  misc_feature (19)..(416): Homolog of NCBI NO: 7485126 NR Description: hypothetical protein - Arabidopsis thaliana
  misc_feature (179)..(465): Homolog of NCBI NO: 34915036 NR Description: P0458A05.23 [Oryza sativa (japonica
  misc_feature (243)..(465): Homolog of NCBI NO: 15236895 NR Description: hypothetical protein; protein id: At4g00690.1

SEQ ID NO: 71824 - protein, 463 aa, Arabidopsis thaliana
  peptide (1)..(463): Ceres Seq. ID no. 4814857
  misc_feature (1)..(463): Homolog of NCBI NO: 6728998 NR Description: hypothetical protein [Arabidopsis thaliana]
  misc_feature (1)..(463): Homolog of NCBI NO: 30680058 NR Description: Ulp1 protease family [Arabidopsis thaliana]
  misc_feature (1)..(463): Homolog of NCBI NO: 26450144 NR Description: unknown protein [Arabidopsis thaliana]
  misc_feature (6)..(463): Homolog of NCBI NO: 18414542 NR Description: Expressed protein; protein id: At4g15880.1, by cDNA: gi_14423393, supported by cDNA: gi_20148438 [Arabidopsis >gi|14423394|gb|AAK62379.1|AF386934_1 Unknown protein
  misc_feature (6)..(463): Homolog of NCBI NO: 34787206 NR Description: SUMO protease [Arabidopsis thaliana]
  misc_feature (17)..(420): Homolog of NCBI NO: 25371728 NR Description: hypothetical protein AT4g15880 [imported] - thaliana >gi|5281021|emb|CAB45994.1| hypothetical protein thaliana] >gi|7268336|emb|CAB78630.1| hypothetical protein
  misc_feature (17)..(414): Homolog of NCBI NO: 2326343 NR Description: G14587-5 [Arabidopsis thaliana]
  misc_feature (17)..(414): Homolog of NCBI NO: 7485126 NR Description: hypothetical protein - Arabidopsis thaliana
  misc_feature (177)..(463): Homolog of NCBI NO: 34915036 NR Description: P0458A05.23 [Oryza sativa (japonica
  misc_feature (241)..(463): Homolog of NCBI NO: 15236895 NR Description: hypothetical protein; protein id: At4g00690.1
MDGYHKRSAGLNPCKHSGFSHSSRPMAPGIYRYPEVKSSLRRQVHAPVRILNSGRDRSTRQGSGNVLGTFLTRNNDMWKRNALDSSLRYRTDREVIDVDDELGDVEMISDDTSREGVENVAMEVDEVEEKAEMGNGLFSEVASLKNGSLRVGECSKANSSSLVVNRPVTDVTSFEAYRKVLESAVNRTSKLKDRGFVDFFKERGRALLRSLSSFWRQDEEPVEVVQREAFVPLSREEETAVRRAFSANDSNILVTHKNSNIDITGKILRCLKPGKWLNDEVINLYMVLLKEREAREPKKFLKCHFFNTFFFTKLVNSATGYNYGAVRRWTSMKRLGYHLKDCDKIFIPIHMNIHWTLAVINIKDQKFQYLDSFKGREPKILDALARYFVDEVRDKSEVDLDVSRWRQEFVQDLPMQRNGFDCGMFMVKYIDFYSRGLDLCFTQEQMPYFRARTAKEILQLKAE

SEQ ID NO: 71825 - DNA, 2616 bp, Arabidopsis thaliana
  misc_feature (1)..(2616): Ceres Seq. ID no. 4814858
  misc_feature: MA Experiment ID: 20000307 Result: Down-regulated in Transcription
  misc_feature: MA Experiment 20000307 PARAMETER Experiment Name: At_Germinating_Seeds_Sub_P Parameter: Age (hr) Value: 24 vs. 0
  misc_feature: MA Experiment 20000307 PARAMETER Experiment Name: At_Germinating_Seeds_Sub_P Parameter: Organism Value: A. thaliana
  misc_feature: MA Experiment 20000307 PARAMETER Experiment Name: At_Germinating_Seeds_Sub_P Parameter: Plant Line Value: WS
  misc_feature: MA Experiment 20000307 PARAMETER Experiment Name: At_Germinating_Seeds_Sub_P Parameter: Tissue Value: Germinating Seeds
atggtgggattcgctagaacaaaattttgtaagaacttatcatctttatctgataatggcgaaaatcatgagaaaccatatacatttgagggtaataggcaaactgttaatgatatttgcaatgttttggagactggtccatggggaccttcagctgagaatactctatctgctctaagttttaaaccacaaccagaatttgtcattggggttttacggaggctgaaagatgttaatcgggctattgagtatttccgttggtatgagagaagaaccgagctgcctcattgtcctgaatcatacaactccttgcttttggtgatggctcgttgtagaaattttgatgctttggaccagattcttggagaaatgagtgttgcaggatttggcccttctgttaacacttgtattgagatggttttgggctgcgttaaggctaataagcttagggaaggttatgatgttgtgcagatgatgaggaagttcaagttccgacctgctttttcagcttacacaactcttatcggtgctttctcggcagttaatcattctgatatgatgttgacactctttcagcaaatgcaggagttaggatatgaaccgaccgttcatctgtttacaacattgattcggggatttgccaaagagggtcgagttgattctgctctatctttacttgatgagatgaagagcagctctcttgatgccgacattgttctttataatgtatgtattgatagctttggtaaagtgggcaaggttgatatggcatggaaattttttcatgagattgaagcgaatggtttaaagcctgatgaagtcacttataccagcatgataggagttctgtgcaaggcaaacagattggatgaagctgtagagatgtttgagcatctagagaagaatagacgggttccttgcacttatgcttacaacacgatgattatgggttatggttcggctggaaaatttgatgaagcatacagtctcctagagagacagagggctaaagggtctataccgagtgtgattgcatataattgcattcttacatgcttaaggaaaatgggaaaagtggacgaagctttgaaagttttcgaggagatgaaaaaagacgctgctccaaatctttcaacctataatattctcattgacatgctgtgtagagctggtaaacttgacactgcttttgagctacgcgattctatgcagaaggctggtctgtttcctaatgtgaggactgtgaacataatggttgatcggctctgtaaatcccaaaaacttgatgaagcatgtgctatgttcgaggagatggattataaggtttgtaccccagatgagattacattttgctccctcatagatggcttaggaaaggtcggaagagttgatgacgcttacaaagtctatgaaaagatgttggattctgattgtcgtactaactctatcgtttacacatccctcataaaaaacttcttcaaccacggtagaaaagaagatggacacaagatatacaaggacatgattaatcaaaactgttctcctgatttacagcttcttaatacgtacatggattgcatgttcaaggctggagaaccagaaaagggaagggccatgtttgaagaaataaaagcccgtcggtttgtcccagatgctcgaagctactcgattttaattcatggactaataaaagcaggatttgcaaatgaaacttatgagttgttttattccatgaaagagcaagggtgtgtcttggacacacgtgcttacaatattgtcattgacggtttctgcaagtgtggaaaagttaacaaagcttatcagctgctggaggaaatgaagacaaaaggttttgagccaactgttgttacgtatggttcagtcatcgacgggcttgcaaaaatagatcggcttgatgaagcttatatgctctttgaggaagcaaaatcgaagagaatagagctaaacgtggtgatttacagtagtcttattgatgggtttggaaaagttggtaggatagatgaagcttaccttatcttggaagagcttatgcagaaaggattaacacctaatctttacacatggaactcattgcttgatgcattggtcaaagctgaggaaatcaacgaagcgcttgtctgttttcagtcgatgaaagaactgaaatgcacgccaaaccaagttacttatggtatcctaataaatggtctttgtaaggtcaggaagttcaataaagcctttgtcttttggcaggagatgcagaaacaggggatgaaacccagtactatttcttacaccaccatgatatcaggacttgcaaaggctgggaatattgcagaggctggggcgctcttcgatcggttcaaggcaaacggtggtgttccagactctgcttgttataatgccatgatcgaaggtctaagtaacggaaacagggcaatggatgctttttctctttttgaggaaacacgtcgaagaggattacctatccataacaaaacctgtgttgttcttttggatactttgcataagaatgattgtcttgagcaagcagctattgtgggagctgttttgagggaaacgggaaaggcacggcatgctgcccgatcttggtag

SEQ ID NO: 71826 - protein, 871 aa, Arabidopsis thaliana
  peptide (1)..(871): Ceres Seq. ID no. 4814859
  misc_feature (483)..(517): Pfam Name: PPR repeat Pfam Description: PPR repeat
  misc_feature (38)..(870): Homolog of NCBI NO: 33146978 NR Description: putative pentatricopeptide (PPR)
  misc_feature (38)..(819): Homolog of NCBI NO: 34900768 NR Description: hypothetical protein~similar to Arabidopsis
  misc_feature (88)..(828): Homolog of NCBI NO: 15236546 NR Description: putative protein; protein id: At4g31850.1
  misc_feature (62)..(821): Homolog of NCBI NO: 15236546 NR Description: putative protein; protein id: At4g31850.1
  misc_feature (115)..(785): Homolog of NCBI NO: 34394343 NR Description: putative fertility restorer homologue [Oryza
  misc_feature (741)..(850): Homolog of NCBI NO: 34394343 NR Description: putative fertility restorer homologue [Oryza
  misc_feature (144)..(828): Homolog of NCBI NO: 15238562 NR Description: putative protein; protein id: At5g59900.1 thaliana] >gi|9757911|dbj|BAB08358.1|
  misc_feature (194)..(827): Homolog of NCBI NO: 34900768 NR Description: hypothetical protein~similar to Arabidopsis
  misc_feature (102)..(778): Homolog of NCBI NO: 34394343 NR Description: putative fertility restorer homologue [Oryza
  misc_feature (68)..(827): Homolog of NCBI NO: 37534450 NR Description: unknown protein [Oryza sativa (japonica
MVGFARTKFCKNLSSLSDNGENHEKPYTFEGNRQTVNDICNVLETGPWGPSAENTLSALSFKPQPEFVIGVLRRLKDVNRAIEYFRWYERRTELPHCPESYNSLLLVMARCRNFDALDQILGEMSVAGFGPSVNTCIEMVLGCVKANKLREGYDVVQMMRKFKFRPAFSAYTTLIGAFSAVNHSDMMLTLFQQMQELGYEPTVHLFTTLIRGFAKEGRVDSALSLLDEMKSSSLDADIVLYNVCIDSFGKVGKVDMAWKFFHEIEANGLKPDEVTYTSMIGVLCKANRLDEAVEMFEHLEKNRRVPCTYAYNTMIMGYGSAGKFDEAYSLLERQRAKGSIPSVIAYNCILTCLRKMGKVDEALKVFEEMKKDAAPNLSTYNILIDMLCRAGKLDTAFELRDSMQKAGLFPNVRTVNIMVDRLCKSQKLDEACAMFEEMDYKVCTPDEITFCSLIDGLGKVGRVDDAYKVYEKMLDSDCRTNSIVYTSLIKNFFNHGRKEDGHKIYKDMINQNCSPDLQLLNTYMDCMFKAGEPEKGRAMFEEIKARRFVPDARSYSILIHGLIKAGFANETYELFYSMKEQGCVLDTRAYNIVIDGFCKCGKVNKAYQLLEEMKTKGFEPTVVTYGSVIDGLAKIDRLDEAYMLFEEAKSKRIELNVVIYSSLIDGFGKVGRIDEAYLILEELMQKGLTPNLYTWNSLLDALVKAEEINEALVCFQSMKELKCTPNQVTYGILINGLCKVRKFNKAFVFWQEMQKQGMKPSTISYTTMISGLAKAGNIAEAGALFDRFKANGGVPDSACYNAMIEGLSNGNRAMDAFSLFEETRRRGLPIHNKTCVVLLDTLHKNDCLEQAAIVGAVLRETGKARHAARSW

SEQ ID NO: 71827 - protein, 764 aa, Arabidopsis thaliana; identical to SEQ ID NO: 71631
  peptide (1)..(764): Ceres Seq. ID no. 4814860
  misc_feature (376)..(410): Pfam Name: PPR repeat Pfam Description: PPR repeat
  misc_feature (1)..(763): Homolog of NCBI NO: 33146978 NR Description: putative pentatricopeptide (PPR)
  misc_feature (1)..(712): Homolog of NCBI NO: 34900768 NR Description: hypothetical protein~similar to Arabidopsis
  misc_feature (1)..(721): Homolog of NCBI NO: 15236546 NR Description: putative protein; protein id: At4g31850.1
  misc_feature (1)..(714): Homolog of NCBI NO: 15236546 NR Description: putative protein; protein id: At4g31850.1
  misc_feature (8)..(678): Homolog of NCBI NO: 34394343 NR Description: putative fertility restorer homologue [Oryza
  misc_feature (634)..(743): Homolog of NCBI NO: 34394343 NR Description: putative fertility restorer homologue [Oryza
  misc_feature (37)..(721): Homolog of NCBI NO: 15238562 NR Description: putative protein; protein id: At5g59900.1 thaliana] >gi|9757911|dbj|BAB08358.1|
  misc_feature (87)..(720): Homolog of NCBI NO: 34900768 NR Description: hypothetical protein~similar to Arabidopsis
  misc_feature (1)..(671): Homolog of NCBI NO: 34394343 NR Description: putative fertility restorer homologue [Oryza
  misc_feature (1)..(720): Homolog of NCBI NO: 37534450 NR Description: unknown protein [Oryza sativa (japonica

SEQ ID NO: 71828 - protein, 748 aa, Arabidopsis thaliana
  peptide (1)..(748): Ceres Seq. ID no. 4814861
  misc_feature (360)..(394): Pfam Name: PPR repeat Pfam Description: PPR repeat
  misc_feature (1)..(747): Homolog of NCBI NO: 33146978 NR Description: putative pentatricopeptide (PPR)
  misc_feature (1)..(696): Homolog of NCBI NO: 34900768 NR Description: hypothetical protein~similar to Arabidopsis
  misc_feature (1)..(705): Homolog of NCBI NO: 15236546 NR Description: putative protein; protein id: At4g31850.1
  misc_feature (1)..(698): Homolog of NCBI NO: 15236546 NR Description: putative protein; protein id: At4g31850.1
  misc_feature (1)..(662): Homolog of NCBI NO: 34394343 NR Description: putative fertility restorer homologue [Oryza
  misc_feature (618)..(727): Homolog of NCBI NO: 34394343 NR Description: putative fertility restorer homologue [Oryza
  misc_feature (21)..(705): Homolog of NCBI NO: 15238562 NR Description: putative protein; protein id: At5g59900.1 thaliana] >gi|9757911|dbj|BAB08358.1|
  misc_feature (71)..(704): Homolog of NCBI NO: 34900768 NR Description: hypothetical protein~similar to Arabidopsis
  misc_feature (1)..(655): Homolog of NCBI NO: 34394343 NR Description: putative fertility restorer homologue [Oryza
  misc_feature (1)..(704): Homolog of NCBI NO: 37534450 NR Description: unknown protein [Oryza sativa (japonica
MSVAGFGPSVNTCIEMVLGCVKANKLREGYDVVQMMRKFKFRPAFSAYTTLIGAFSAVNHSDMMLTLFQQMQELGYEPTVHLFTTLIRGFAKEGRVDSALSLLDEMKSSSLDADIVLYNVCIDSFGKVGKVDMAWKFFHEIEANGLKPDEVTYTSMIGVLCKANRLDEAVEMFEHLEKNRRVPCTYAYNTMIMGYGSAGKFDEAYSLLERQRAKGSIPSVIAYNCILTCLRKMGKVDEALKVFEEMKKDAAPNLSTYNILIDMLCRAGKLDTAFELRDSMQKAGLFPNVRTVNIMVDRLCKSQKLDEACAMFEEMDYKVCTPDEITFCSLIDGLGKVGRVDDAYKVYEKMLDSDCRTNSIVYTSLIKNFFNHGRKEDGHKIYKDMINQNCSPDLQLLNTYMDCMFKAGEPEKGRAMFEEIKARRFVPDARSYSILIHGLIKAGFANETYELFYSMKEQGCVLDTRAYNIVIDGFCKCGKVNKAYQLLEEMKTKGFEPTVVTYGSVIDGLAKIDRLDEAYMLFEEAKSKRIELNVVIYSSLIDGFGKVGRIDEAYLILEELMQKGLTPNLYTWNSLLDALVKAEEINEALVCFQSMKELKCTPNQVTYGILINGLCKVRKFNKAFVFWQEMQKQGMKPSTISYTTMISGLAKAGNIAEAGALFDRFKANGGVPDSACYNAMIEGLSNGNRAMDAFSLFEETRRRGLPIHNKTCVVLLDTLHKNDCLEQAAIVGAVLRETGKARHAARSW

SEQ ID NO: 71829 - DNA, 1458 bp, Arabidopsis thaliana
  misc_feature (1)..(1458): Ceres Seq. ID no. 4814877
  misc_feature: MA Experiment ID: 20000180 Result: Down-regulated in Transcription
  misc_feature: MA Experiment 20000180 PARAMETER Experiment Name: At_Germinating_Seeds_P Parameter: Age (hr) Value: 24 vs. 0
  misc_feature: MA Experiment 20000180 PARAMETER Experiment Name: At_Germinating_Seeds_P Parameter: Tissue Value: Germinating Seeds
  misc_feature: MA Experiment ID: 20000227 Result: Up-regulated in Transcription
  misc_feature: MA Experiment 20000227 PARAMETER Experiment Name: At_Root-Tips-vs-Tops_P Parameter: Tissue Value: Root Tips vs. Root Tops
  misc_feature: Pfam Name: Alba Pfam Description: Alba
atggatagataccagagagtcgctaaaccgaaaccagagtctccgattaacgagaatgagatccgtatcaccagtaaaggccttatccgaaactacatcagttatgccaccagtcttcttcaggagaaaagtgttaaagacattgtgttgaaggcaatggggcaggcaatcagcaagactgtggctatctctgagatactaaaaaataaaatcccaggtttgcatcaagatattgcaatcagttctattagcattactgatgtctgggagcctactgaggagggtttgtttccggtggagttgacgcgccatgtttccatgatttcaatcacattgtcattgagcgagctaaacaaagattctcctgggtatcaagctccagcacagtcagatcagtctaagcctcaatatcagccacaacaagggagacaagcccgcctaccatacaatgcttatggtgaaggtaatgccttaaactttcttgacgatttaaatctgtcaatgttgattcgtatgggagagggagaggtcgtggcagagggagaagcaggggaagaggtggatatggaaactaccaagggagttatgaaggaaaagaccaagggaactatcaagaagattatcaaggtattgttttgccatagaaggcgatcatttcgtctaatgacaatgaaggtgggtattcaaactcgggcagaggccgtggacgtggtggacgaagctatggctatcgtgattctggatatcagggtggcagaggcgggtatggtggtgggagagatggtggatatggtggtgggagagatgacgggtatggggaaaggagaaatgacgggtatggggaaaggagaaatgacaggtatggtggaggaagagacgacgggtatggtggagggagagatgacggatatggtggaggcagaaacgatggatatgggggaagaagaggcggatttcgtggcggtcgtggtggaggcagagatgaaggatacggtggcggccgaggtggatatggaggtagaagtggcggccaaggtgatgggtatggcggaggcagaggtgacgggtatggtggaggcagaggtgacgggtatggtggaggcagaggtgatggctatggtggtggccgagttgataggtatgatggaggaagacgtgatggctatggtggaggccgatatgatggctatggtgggggtaaaagtgatggttatggaggtggccgaggcggataccgtggaggtagaggcggatatggtcgtggacgtggaaggatgggtaatggtggtcgttcaagggatggtgctagtaaccaaaacgaagcctaagctgtttcatatcccattttctaagctgtatgggttagctgctgcatatttttccgttgccttaaagacccttcaaattcttagcacaatcccaaggggtttgatatgttttaaaaaaggttatggttaa

SEQ ID NO: 71830 - protein, 485 aa, Arabidopsis thaliana
  peptide (1)..(485): Ceres Seq. ID no. 4814878
  misc_feature: Pfam Name: Alba Pfam Description: Alba
  misc_feature (1)..(485): Homolog of NCBI NO: 15231369 NR Description: unknown protein; protein id: At3g07030.1 thaliana] >gi|6729010|gb|AAF27007.1|AC016827_18 unknown protein
  misc_feature (1)..(155): Homolog of NCBI NO: 18410994 NR Description: expressed protein; protein id: At1g76010.1, by cDNA: gi_15724323, supported by cDNA: gi_15809881, supported cDNA: gi_16226598 [Arabidopsis thaliana]
  misc_feature (1)..(142): Homolog of NCBI NO: 18394837 NR Description: expressed protein; protein id: At1g20220.1, by cDNA: gi_16612273 [Arabidopsis thaliana]
  misc_feature (1)..(142): Homolog of NCBI NO: 25518088 NR Description: T20H2.2 protein - Arabidopsis thaliana Contains similarity to pigpen protein from Mus musculus and contains protein of unknown function DUF78 PF|01918 domain.
  misc_feature (1)..(155): Homolog of NCBI NO: 34897552 NR Description: OSJNBa0042L16.13 [Oryza sativa (japonica
  misc_feature (1)..(142): Homolog of NCBI NO: 24417384 NR Description: unknown [Arabidopsis thaliana]
  misc_feature (1)..(148): Homolog of NCBI NO: 32526671 NR Description: chloroplast nucleoid DNA-binding protein -like
  misc_feature (56)..(123): Homolog of NCBI NO: 25404999 NR Description: protein T4O12.22 [imported] - Arabidopsis >gi|8778814|gb|AAF79819.1|AC007396_20 T4O12.22 [Arabidopsis
  misc_feature (1)..(41): Homolog of NCBI NO: 25404999 NR Description: protein T4O12.22 [imported] - Arabidopsis >gi|8778814|gb|AAF79819.1|AC007396_20 T4O12.22 [Arabidopsis
  misc_feature (17)..(68): Homolog of NCBI NO: 25404999 NR Description: protein T4O12.22 [imported] - Arabidopsis >gi|8778814|gb|AAF79819.1|AC007396_20 T4O12.22 [Arabidopsis
MDRYQRVAKPKPESPINENEIRITSKGLIRNYISYATSLLQEKSVKDIVLKAMGQAISKTVAISEILKNKIPGLHQDIAISSISITDVWEPTEEGLFPVELTRHVSMISITLSLSELNKDSPGYQAPAQSDQSKPQYQPQQGRQARLPYNAYGEGNALNFLDDLNLSMLIRMGEGEVVAEGEAGEEVDMETTKGVMKEKTKGTIKKIIKVLFCHRRRSFRLMTMKVGIQTRAEAVDVVDEAMAIVILDIRVAEAGMVVGEMVDMVVGEMTGMGKGEMTGMGKGEMTGMVEEETTGMVEGEMTDMVEAETMDMGEEEADFVAVVVEAEMKDTVAAEVDMEVEVAAKVMGMAEAEVTGMVEAEVTGMVEAEVMAMVVAELIGMMEEDVMAMVEADMMAMVGVKVMVMEVAEADTVEVEADMVVDVEGWVMVVVQGMVLVTKTKPKLFHIPFSKLYGLAAAYFSVALKTLQILSTIPRGLICFKKGYG

SEQ ID NO: 71831 - protein, 433 aa, Arabidopsis thaliana
  peptide (1)..(433): Ceres Seq. ID no. 4814879
  misc_feature: Pfam Name: Alba Pfam Description: Alba
  misc_feature (1)..(433): Homolog of NCBI NO: 15231369 NR Description: unknown protein; protein id: At3g07030.1 thaliana] >gi|6729010|gb|AAF27007.1|AC016827_18 unknown protein
  misc_feature (1)..(103): Homolog of NCBI NO: 18410994 NR Description: expressed protein; protein id: At1g76010.1, by cDNA: gi_15724323, supported by cDNA: gi_15809881, supported cDNA: gi_16226598 [Arabidopsis thaliana]
  misc_feature (1)..(90): Homolog of NCBI NO: 18394837 NR Description: expressed protein; protein id: At1g20220.1, by cDNA: gi_16612273 [Arabidopsis thaliana]
  misc_feature (1)..(90): Homolog of NCBI NO: 25518088 NR Description: T20H2.2 protein - Arabidopsis thaliana Contains similarity to pigpen protein from Mus musculus and contains protein of unknown function DUF78 PF|01918 domain.
  misc_feature (1)..(103): Homolog of NCBI NO: 34897552 NR Description: OSJNBa0042L16.13 [Oryza sativa (japonica
  misc_feature (1)..(90): Homolog of NCBI NO: 24417384 NR Description: unknown [Arabidopsis thaliana]
  misc_feature (1)..(96): Homolog of NCBI NO: 32526671 NR Description: chloroplast nucleoid DNA-binding protein -like
  misc_feature (4)..(71): Homolog of NCBI NO: 25404999 NR Description: protein T4O12.22 [imported] - Arabidopsis >gi|8778814|gb|AAF79819.1|AC007396_20 T4O12.22 [Arabidopsis
  misc_feature (1)..(16): Homolog of NCBI NO: 25404999 NR Description: protein T4O12.22 [imported] - Arabidopsis >gi|8778814|gb|AAF79819.1|AC007396_20 T4O12.22 [Arabidopsis
  misc_feature (1)..(75): Homolog of NCBI NO: 34867283 NR Description: similar to hypothetical protein [Rattus
MGQAISKTVAISEILKNKIPGLHQDIAISSISITDVWEPTEEGLFPVELTRHVSMISITLSLSELNKDSPGYQAPAQSDQSKPQYQPQQGRQARLPYNAYGEGNALNFLDDLNLSMLIRMGEGEVVAEGEAGEEVDMETTKGVMKEKTKGTIKKIIKVLFCHRRRSFRLMTMKVGIQTRAEAVDVVDEAMAIVILDIRVAEAGMVVGEMVDMVVGEMTGMGKGEMTGMGKGEMTGMVEEETTGMVEGEMTDMVEAETMDMGEEEADFVAVVVEAEMKDTVAAEVDMEVEVAAKVMGMAEAEVTGMVEAEVTGMVEAEVMAMVVAELIGMMEEDVMAMVEADMMAMVGVKVMVMEVAEADTVEVEADMVVDVEGWVMVVVQGMVLVTKTKPKLFHIPFSKLYGLAAAYFSVALKTLQILSTIPRGLICFKKGYG

SEQ ID NO: 71832 - protein, 379 aa, Arabidopsis thaliana
  peptide (1)..(379): Ceres Seq. ID no. 4814880
  misc_feature: Pfam Name: Alba Pfam Description: Alba
  misc_feature (1)..(379): Homolog of NCBI NO: 15231369 NR Description: unknown protein; protein id: At3g07030.1 thaliana] >gi|6729010|gb|AAF27007.1|AC016827_18 unknown protein
  misc_feature (1)..(49): Homolog of NCBI NO: 18410994 NR Description: expressed protein; protein id: At1g76010.1, by cDNA: gi_15724323, supported by cDNA: gi_15809881, supported cDNA: gi_16226598 [Arabidopsis thaliana]
  misc_feature (1)..(36): Homolog of NCBI NO: 18394837 NR Description: expressed protein; protein id: At1g20220.1, by cDNA: gi_16612273 [Arabidopsis thaliana]
  misc_feature (1)..(36): Homolog of NCBI NO: 25518088 NR Description: T20H2.2 protein - Arabidopsis thaliana Contains similarity to pigpen protein from Mus musculus and contains protein of unknown function DUF78 PF|01918 domain.
  misc_feature (1)..(49): Homolog of NCBI NO: 34897552 NR Description: OSJNBa0042L16.13 [Oryza sativa (japonica
  misc_feature (1)..(36): Homolog of NCBI NO: 24417384 NR Description: unknown [Arabidopsis thaliana]
  misc_feature (1)..(42): Homolog of NCBI NO: 32526671 NR Description: chloroplast nucleoid DNA-binding protein -like
  misc_feature (1)..(17): Homolog of NCBI NO: 25404999 NR Description: protein T4O12.22 [imported] - Arabidopsis >gi|8778814|gb|AAF79819.1|AC007396_20 T4O12.22 [Arabidopsis
  misc_feature (1)..(21): Homolog of NCBI NO: 34867283 NR Description: similar to hypothetical protein [Rattus
  misc_feature (1)..(51): Homolog of NCBI NO: 34864651 NR Description: similar to expressed sequence AI851155 [Rattus
MISITLSLSELNKDSPGYQAPAQSDQSKPQYQPQQGRQARLPYNAYGEGNALNFLDDLNLSMLIRMGEGEVVAEGEAGEEVDMETTKGVMKEKTKGTIKKIIKVLFCHRRRSFRLMTMKVGIQTRAEAVDVVDEAMAIVILDIRVAEAGMVVGEMVDMVVGEMTGMGKGEMTGMGKGEMTGMVEEETTGMVEGEMTDMVEAETMDMGEEEADFVAVVVEAEMKDTVAAEVDMEVEVAAKVMGMAEAEVTGMVEAEVTGMVEAEVMAMVVAELIGMMEEDVMAMVEADMMAMVGVKVMVMEVAEADTVEVEADMVVDVEGWVMVVVQGMVLVTKTKPKLFHIPFSKLYGLAAAYFSVALKTLQILSTIPRGLICFKKGYG

SEQ ID NO: 71833 - DNA, 1947 bp, Arabidopsis thaliana
  misc_feature (1)..(1947): Ceres Seq. ID no. 4814881
  misc_feature: MA Experiment ID: 20000173 Result: Down-regulated in Transcription
  misc_feature: MA Experiment 20000173 PARAMETER Experiment Name: At_42deg_Heat_P Parameter: Age (day) Value: 14
  misc_feature: MA Experiment 20000173 PARAMETER Experiment Name: At_42deg_Heat_P Parameter: Organism Value: A. thaliana
  misc_feature: MA Experiment 20000173 PARAMETER Experiment Name: At_42deg_Heat_P Parameter: Plant Line Value: WS
  misc_feature: MA Experiment 20000173 PARAMETER Experiment Name: At_42deg_Heat_P Parameter: Temperature (deg C) Value: 42 vs. 22
  misc_feature: MA Experiment 20000173 PARAMETER Experiment Name: At_42deg_Heat_P Parameter: Timepoint (hr) Value: 6
  misc_feature: MA Experiment 20000173 PARAMETER Experiment Name: At_42deg_Heat_P Parameter: Tissue Value: Aerial
  misc_feature: MA Experiment ID: 20000184 Result: Down-regulated in Transcription
  misc_feature: MA Experiment 20000184 PARAMETER Experiment Name: At_Shoots__P Parameter: Age (day) Value: 7
  misc_feature: MA Experiment 20000184 PARAMETER Experiment Name: At_Shoots__P Parameter: Tissue Value: Shoots vs. Whole Plant
  misc_feature: MA Experiment ID: 20000265 Result: Up-regulated in Transcription
  misc_feature: MA Experiment 20000265 PARAMETER Experiment Name: At_Open_Flower_P Parameter: Age (day) Value: 21
  misc_feature: MA Experiment 20000265 PARAMETER Experiment Name: At_Open_Flower_P Parameter: Plant Line Value: WS
  misc_feature: MA Experiment 20000265 PARAMETER Experiment Name: At_Open_Flower_P Parameter: Tissue Value: Closed Flower vs. Whole Plant
  misc_feature: Pfam Name: NHL Pfam Description: NHL repeat
atgaacattggatccaagacattggtcgaacaacgtttctctcgcggatttgcatcagtacgacgagtatctcgagcttcttcttcttcttcttcttctccttcctctccacatgttgatttgctctcttttattaaagcttcacttgataaacttgaaggtccttcccatcattggttgaatcgagactttgggaataaacagcttttcaaggacaaaggaacttatgtagttctagctggacatttgctagacggaacaagtgatctgagtggtttctttgagaaactaaagttgcttcagcagaggtctccgggtgtctgtttcatgggcatccacttcagtgatcaagctcgaatcgctgatgatcgaactgctctagctgagttgattttgaaggaatacctcacttttcctgtgctactttccgaaaaagaatttcccaagacaagtggggaagtacgttacatcgtgtttaaagattttaagaatcctctaatctacgaagagaaggatcttgatattgcttctgtagttaaagctcttgacagcctcctcactcaagatactgagaaatccaagtctgtcagacttttcacgaacacttggtcaaaacaagcagaggctatcaaggaatcacatttcccttctttctttcaggatttgttactttactttccaggttgtatctctgcagacgaagttggagaccgtctgtttctttctgataccaaccatcatcgtattattattttcgaaaacagtgggaagattgtagacagtattggttgtttcccaggttttgaggatggagattttgaatctgcaaagatgttacgtcctacagggaccctttacgacgaagcggaggattgtctttacattgtagattctgaggttattaagaaaactggtggcttatggtcttggataatggagaaaatgggtcttggaaaagatgacgatacaacagttgatgctgataccaaatcagaagaatttgatgcacgctctcttttgtttccatggcatatactgaagcgtgacgatgagagtcttttagtcattaacaaaagcttttcgaagttatggataataaattttgcttcaggagagatcgaagaagttgtggaagggttttcgaagataattgagatctgcggtcaatcaatcacagagaagctatcagtgttggaacatatgccttctaactggttgcaacagcaaactgcggctatcgcctcatttaaggagcagccaagtgcttcccttttgtcttcttttactaaacttggagacgacattgtcatgacagatataggtaaaattagcatacggttgaacatagagattcctccatgcacggagcttgttgaaccgatacaagaaagctgcatatggcgacagacaagaggcgcaatcagtgaattctcgagtgctggaagtgcagttgaaccttcagaaaagattggagtttcacaacaatggtatgatgaattagacagcctcgccaaagaaatagccaaccctgaagcagctgaggaagaggaagaagaagatgttaacccctctgaggttgacagagaagaagatggacgtatccacattgattgtcctgtcaaaacaagtcctggctcaagtgagcttattgtttatgcagctttgtatttaagactagcgagaaacgaagagacagaaagtgcgacccaggaagaactggcgagaaaaatagcaaagattttaaagccagtacggaacattacaactatgaaggaagatttgtttgtgaatttgttgtccaagtcaaagagagaattgagagacattgtcttcataaagccgatgcatgtgcggataaggttagactcgaaggatcatccaaaagccgataactcaagagacgtaatcttgactgactcctctgttgaggttgatgtctctctctga

SEQ ID NO: 71834 - protein, 648 aa, Arabidopsis thaliana
  peptide (1)..(648): Ceres Seq. ID no. 4814882
  misc_feature: Pfam Name: NHL Pfam Description: NHL repeat
  misc_feature (150)..(359): Homolog of NCBI NO: 18481710 NR Description: hypothetical protein [Sorghum bicolor]
  misc_feature (441)..(648): Homolog of NCBI NO: 18481710 NR Description: hypothetical protein [Sorghum bicolor]
  misc_feature (23)..(147): Homolog of NCBI NO: 18481710 NR Description: hypothetical protein [Sorghum bicolor]
  misc_feature (224)..(379): Homolog of NCBI NO: 30696124 NR Description: haloacid dehalogenase-like hydrolase family thaliana] >gi|17529226|gb|AAL38840.1| unknown protein
  misc_feature (224)..(299): Homolog of NCBI NO: 25404123 NR Description: hypothetical protein F13N6.21 [imported] - thaliana >gi|12323029|gb|AAG51506.1|AC058785_9 hypothetical
MNIGSKTLVEQRFSRGFASVRRVSRASSSSSSSPSSPHVDLLSFIKASLDKLEGPSHHWLNRDFGNKQLFKDKGTYVVLAGHLLDGTSDLSGFFEKLKLLQQRSPGVCFMGIHFSDQARIADDRTALAELILKEYLTFPVLLSEKEFPKTSGEVRYIVFKDFKNPLIYEEKDLDIASVVKALDSLLTQDTEKSKSVRLFTNTWSKQAEAIKESHFPSFFQDLLLYFPGCISADEVGDRLFLSDTNHHRIIIFENSGKIVDSIGCFPGFEDGDFESAKMLRPTGTLYDEAEDCLYIVDSEVIKKTGGLWSWIMEKMGLGKDDDTTVDADTKSEEFDARSLLFPWHILKRDDESLLVINKSFSKLWIINFASGEIEEVVEGFSKIIEICGQSITEKLSVLEHMPSNWLQQQTAAIASFKEQPSASLLSSFTKLGDDIVMTDIGKISIRLNIEIPPCTELVEPIQESCIWRQTRGAISEFSSAGSAVEPSEKIGVSQQWYDELDSLAKEIANPEAAEEEEEEDVNPSEVDREEDGRIHIDCPVKTSPGSSELIVYAALYLRLARNEETESATQEELARKIAKILKPVRNITTMKEDLFVNLLSKSKRELRDIVFIKPMHVRIRLDSKDHPKADNSRDVILTDSSVEVDVSL

SEQ ID NO: 71835 - protein, 539 aa, Arabidopsis thaliana
  peptide (1)..(539): Ceres Seq. ID no. 4814883
  misc_feature: Pfam Name: NHL Pfam Description: NHL repeat
  misc_feature (41)..(250): Homolog of NCBI NO: 18481710 NR Description: hypothetical protein [Sorghum bicolor]
  misc_feature (332)..(539): Homolog of NCBI NO: 18481710 NR Description: hypothetical protein [Sorghum bicolor]
  misc_feature (1)..(38): Homolog of NCBI NO: 18481710 NR Description: hypothetical protein [Sorghum bicolor]
  misc_feature (115)..(270): Homolog of NCBI NO: 30696124 NR Description: haloacid dehalogenase-like hydrolase family thaliana] >gi|17529226|gb|AAL38840.1| unknown protein
  misc_feature (115)..(190): Homolog of NCBI NO: 25404123 NR Description: hypothetical protein F13N6.21 [imported] - thaliana >gi|12323029|gb|AAG51506.1|AC058785_9 hypothetical
MGIHFSDQARIADDRTALAELILKEYLTFPVLLSEKEFPKTSGEVRYIVFKDFKNPLIYEEKDLDIASVVKALDSLLTQDTEKSKSVRLFTNTWSKQAEAIKESHFPSFFQDLLLYFPGCISADEVGDRLFLSDTNHHRIIIFENSGKIVDSIGCFPGFEDGDFESAKMLRPTGTLYDEAEDCLYIVDSEVIKKTGGLWSWIMEKMGLGKDDDTTVDADTKSEEFDARSLLFPWHILKRDDESLLVINKSFSKLWIINFASGEIEEVVEGFSKIIEICGQSITEKLSVLEHMPSNWLQQQTAAIASFKEQPSASLLSSFTKLGDDIVMTDIGKISIRLNIEIPPCTELVEPIQESCIWRQTRGAISEFSSAGSAVEPSEKIGVSQQWYDELDSLAKEIANPEAAEEEEEEDVNPSEVDREEDGRIHIDCPVKTSPGSSELIVYAALYLRLARNEETESATQEELARKIAKILKPVRNITTMKEDLFVNLLSKSKRELRDIVFIKPMHVRIRLDSKDHPKADNSRDVILTDSSVEVDVSL

SEQ ID NO: 71836 - protein, 371 aa, Arabidopsis thaliana
  peptide (1)..(371): Ceres Seq. ID no. 4814884
  misc_feature: Pfam Name: NHL Pfam Description: NHL repeat
  misc_feature (1)..(82): Homolog of NCBI NO: 18481710 NR Description: hypothetical protein [Sorghum bicolor]
  misc_feature (164)..(371): Homolog of NCBI NO: 18481710 NR Description: hypothetical protein [Sorghum bicolor]
  misc_feature (1)..(102): Homolog of NCBI NO: 30696124 NR Description: haloacid dehalogenase-like hydrolase family thaliana] >gi|17529226|gb|AAL38840.1| unknown protein
  misc_feature (1)..(22): Homolog of NCBI NO: 25404123 NR Description: hypothetical protein F13N6.21 [imported] - thaliana >gi|12323029|gb|AAG51506.1|AC058785_9 hypothetical
MLRPTGTLYDEAEDCLYIVDSEVIKKTGGLWSWIMEKMGLGKDDDTTVDADTKSEEFDARSLLFPWHILKRDDESLLVINKSFSKLWIINFASGEIEEVVEGFSKIIEICGQSITEKLSVLEHMPSNWLQQQTAAIASFKEQPSASLLSSFTKLGDDIVMTDIGKISIRLNIEIPPCTELVEPIQESCIWRQTRGAISEFSSAGSAVEPSEKIGVSQQWYDELDSLAKEIANPEAAEEEEEEDVNPSEVDREEDGRIHIDCPVKTSPGSSELIVYAALYLRLARNEETESATQEELARKIAKILKPVRNITTMKEDLFVNLLSKSKRELRDIVFIKPMHVRIRLDSKDHPKADNSRDVILTDSSVEVDVSL

SEQ ID NO: 71837 - DNA, 993 bp, Arabidopsis thaliana
  misc_feature (1)..(993): Ceres Seq. ID no. 4814964
  misc_feature: MA Experiment ID: 20000264 Result: Up-regulated in Transcription
  misc_feature: MA Experiment 20000264 PARAMETER Experiment Name: At_Open_Flower_P Parameter: Age (day) Value: 21
  misc_feature: MA Experiment 20000264 PARAMETER Experiment Name: At_Open_Flower_P Parameter: Plant Line Value: WS
  misc_feature: MA Experiment 20000264 PARAMETER Experiment Name: At_Open_Flower_P Parameter: Tissue Value: Open Flower vs. Whole Plant
  misc_feature: MA Experiment ID: 20000265 Result: Up-regulated in Transcription
  misc_feature: MA Experiment 20000265 PARAMETER Experiment Name: At_Open_Flower_P Parameter: Age (day) Value: 21
  misc_feature: MA Experiment 20000265 PARAMETER Experiment Name: At_Open_Flower_P Parameter: Plant Line Value: WS
  misc_feature: MA Experiment 20000265 PARAMETER Experiment Name: At_Open_Flower_P Parameter: Tissue Value: Closed Flower vs. Whole Plant
  misc_feature: MA Experiment ID: 20000286 Result: Up-regulated in Transcription
  misc_feature: MA Experiment 20000286 PARAMETER Experiment Name: At_Open_Flower_P Parameter: Age (day) Value: 21
  misc_feature: MA Experiment 20000286 PARAMETER Experiment Name: At_Open_Flower_P Parameter: Plant Line Value: WS
  misc_feature: MA Experiment 20000286 PARAMETER Experiment Name: At_Open_Flower_P Parameter: Tissue Value: Half Open vs. Whole Plant
  misc_feature: MA Experiment ID: 20000438 Result: Down-regulated in Transcription
  misc_feature: MA Experiment 20000438 PARAMETER Experiment Name: At_Shoots__P Parameter: Age (day) Value: 14
  misc_feature: MA Experiment 20000438 PARAMETER Experiment Name: At_Shoots__P Parameter: Tissue Value: Shoots vs. Whole Plant
  misc_feature: MA Experiment ID: 20001247 Result: Down-regulated in Transcription
  misc_feature: MA Experiment 20001247 PARAMETER Experiment Name: At_Far-red-induction_P Parameter: Age (day) Value: 7
  misc_feature: MA Experiment 20001247 PARAMETER Experiment Name: At_Far-red-induction_P Parameter: Light Value: Far-red vs. White
  misc_feature: MA Experiment 20001247 PARAMETER Experiment Name: At_Far-red-induction_P Parameter: Organism Value: A. thaliana
  misc_feature: MA Experiment 20001247 PARAMETER Experiment Name: At_Far-red-induction_P Parameter: Plant Line Value: Columbia
  misc_feature: MA Experiment 20001247 PARAMETER Experiment Name: At_Far-red-induction_P Parameter: Timepoint (hr) Value: 1
  misc_feature: MA Experiment 20001247 PARAMETER Experiment Name: At_Far-red-induction_P Parameter: Tissue Value: Whole Plant
  misc_feature: MA Experiment ID: 20001450 Result: Down-regulated in Transcription
  misc_feature: MA Experiment 20001450 PARAMETER Experiment Name: At_Far-red-induction_P Parameter: Age (day) Value: 7
  misc_feature: MA Experiment 20001450 PARAMETER Experiment Name: At_Far-red-induction_P Parameter: Light Value: Far-red vs. White
  misc_feature: MA Experiment 20001450 PARAMETER Experiment Name: At_Far-red-induction_P Parameter: Organism Value: A. thaliana
  misc_feature: MA Experiment 20001450 PARAMETER Experiment Name: At_Far-red-induction_P Parameter: Plant Line Value: Columbia
  misc_feature: MA Experiment 20001450 PARAMETER Experiment Name: At_Far-red-induction_P Parameter: Timepoint (hr) Value: 8
  misc_feature: MA Experiment 20001450 PARAMETER Experiment Name: At_Far-red-induction_P Parameter: Tissue Value: Whole Plant
  misc_feature: MA Experiment ID: 20001558 Result: Up-regulated in Transcription
  misc_feature: MA Experiment 20001558 PARAMETER Experiment Name: At_Drought_Soil_Dry_P Parameter: Age (day) Value: 27
  misc_feature: MA Experiment 20001558 PARAMETER Experiment Name: At_Drought_Soil_Dry_P Parameter: Organism Value: A. thaliana
  misc_feature: MA Experiment 20001558 PARAMETER Experiment Name: At_Drought_Soil_Dry_P Parameter: Plant Line Value: WS
  misc_feature: MA Experiment 20001558 PARAMETER Experiment Name: At_Drought_Soil_Dry_P Parameter: Post Timepoint (hr) Value: 6
  misc_feature: MA Experiment 20001558 PARAMETER Experiment Name: At_Drought_Soil_Dry_P Parameter: Post-Treatment Value: Re-Water vs. No Drought
  misc_feature: MA Experiment 20001558 PARAMETER Experiment Name: At_Drought_Soil_Dry_P Parameter: Timepoint (day) Value: 13
  misc_feature: MA Experiment 20001558 PARAMETER Experiment Name: At_Drought_Soil_Dry_P Parameter: Treatment Value: Drought vs. No Drought
  misc_feature: MA Experiment ID: 20001911 Result: Down-regulated in Transcription
  misc_feature: MA Experiment 20001911 PARAMETER Experiment Name: At_Drought_Reproduction_P Parameter: Age (day) Value: 40
  misc_feature: MA Experiment 20001911 PARAMETER Experiment Name: At_Drought_Reproduction_P Parameter: Organism Value: A. thaliana
  misc_feature: MA Experiment 20001911 PARAMETER Experiment Name: At_Drought_Reproduction_P Parameter: Plant Line Value: WS
  misc_feature: MA Experiment 20001911 PARAMETER Experiment Name: At_Drought_Reproduction_P Parameter: Timepoint (day) Value: 10
  misc_feature: MA Experiment 20001911 PARAMETER Experiment Name: At_Drought_Reproduction_P Parameter: Tissue Value: Flowers
  misc_feature: MA Experiment 20001911 PARAMETER Experiment Name: At_Drought_Reproduction_P Parameter: Treatment Value: Drought vs. No Drought
  misc_feature: Pfam Name: B3 Pfam Description: B3 DNA binding domain
atgtgggcaacgaagtcgcgtcggtgtgccgttcatacgtcttccatggcttccggtgatgttcttcctagattcttcactgtcttcctctcccattgcagctccgaatccatggtgataccaaggtcttactacaatcttttaccacgtccgttgcccaagactgcgattctcatcggaactggtggaagattttggaaagtagcaatgacgagcaagcaagagcaagtgtattttgaacaaggctggggaaatttcgttgctgataaccagttaaaagagggagaattcttaacttttgtgtttgatgggcacaaaagttatgaagtaagtatctatggtcgtggagattgcaaagagactcgagcagtcattcaagttgaagagatctctgatgatacagaagatgacaacgtttctcttcatagccctagcaatgtttcacttgatagccttagcaacgattctcatcatagcactagcaacgtttctcttcgaagccttagcaacgattctcttcatggtgatgctgagatagagagcgacagtgagtattctcccgagaacctaccctcagcctctatatctgttgaatccgttgaggtggtgaatccaacaacaagcaggcagagaagttacaagaggaagaccattgagaatccacatctgtatttggatgatccaaacaatgtctgttttgagacgtgtcttaagcttagaaagtttgagctgttagttcatgcacagttggtgaaagactacggcttgatattcagcgacaatgttgactatattgacggatatggaaaactaaccgcgaaaacgaccaagtgggcagatcaacgggtttgcataaacaaatggcagaaaatatgcgagagaaaccagttcacagagaatgactccatcctatgtgaaattctccgcaacgaggacaaagtggtttatgcaatcaagattcacatcttccgcgatgcagcagcaagcacttga

SEQ ID NO: 71838 - protein, 330 aa, Arabidopsis thaliana
  peptide (1)..(330): Ceres Seq. ID no. 4814965
  misc_feature: Pfam Name: B3 Pfam Description: B3 DNA binding domain
  misc_feature (1)..(330): Homolog of NCBI NO: 15230649 NR Description: hypothetical protein; protein id: At3g06160.1 thaliana] >gi|6862920|gb|AAF30309.1|AC018907_9 hypothetical
  misc_feature (16)..(185): Homolog of NCBI NO: 15230669 NR Description: hypothetical protein; protein id: At3g06220.1 thaliana] >gi|6862926|gb|AAF30315.1|AC018907_15 hypothetical
  misc_feature (23)..(325): Homolog of NCBI NO: 15242851 NR Description: putative protein; protein id: At5g57720.1 thaliana] >gi|9759269|dbj|BAB09590.1|
  misc_feature (148)..(324): Homolog of NCBI NO: 15235362 NR Description: putative protein; protein id: At4g34400.1
  misc_feature (14)..(216): Homolog of NCBI NO: 15235362 NR Description: putative protein; protein id: At4g34400.1
  misc_feature (22)..(322): Homolog of NCBI NO: 8777352 NR Description: gene_id:MGO3.11~pir||T12971~similar to unknown
  misc_feature (38)..(322): Homolog of NCBI NO: 15238622 NR Description: putative protein; protein id: At5g60130.1
  misc_feature (20)..(238): Homolog of NCBI NO: 11357788 NR Description: hypothetical protein F4P12.10 - Arabidopsis >gi|6729482|emb|CAB67638.1| putative protein [Arabidopsis
  misc_feature (20)..(238): Homolog of NCBI NO: 18409814 NR Description: putative protein; protein id: At3g53310.1, by cDNA: 36830. [Arabidopsis thaliana]
  misc_feature (11)..(322): Homolog of NCBI NO: 15238624 NR Description: putative protein; protein id: At5g60140.1
MWATKSRRCAVHTSSMASGDVLPRFFTVFLSHCSSESMVIPRSYYNLLPRPLPKTAILIGTGGRFWKVAMTSKQEQVYFEQGWGNFVADNQLKEGEFLTFVFDGHKSYEVSIYGRGDCKETRAVIQVEEISDDTEDDNVSLHSPSNVSLDSLSNDSHHSTSNVSLRSLSNDSLHGDAEIESDSEYSPENLPSASISVESVEVVNPTTSRQRSYKRKTIENPHLYLDDPNNVCFETCLKLRKFELLVHAQLVKDYGLIFSDNVDYIDGYGKLTAKTTKWADQRVCINKWQKICERNQFTENDSILCEILRNEDKVVYAIKIHIFRDAAAST

SEQ ID NO: 71839 - protein, 315 aa, Arabidopsis thaliana
  peptide (1)..(315): Ceres Seq. ID no. 4814966
  misc_feature: Pfam Name: B3 Pfam Description: B3 DNA binding domain
  misc_feature (1)..(315): Homolog of NCBI NO: 15230649 NR Description: hypothetical protein; protein id: At3g06160.1 thaliana] >gi|6862920|gb|AAF30309.1|AC018907_9 hypothetical
  misc_feature (1)..(170): Homolog of NCBI NO: 15230669 NR Description: hypothetical protein; protein id: At3g06220.1 thaliana] >gi|6862926|gb|AAF30315.1|AC018907_15 hypothetical
  misc_feature (8)..(310): Homolog of NCBI NO: 15242851 NR Description: putative protein; protein id: At5g57720.1 thaliana] >gi|9759269|dbj|BAB09590.1|
  misc_feature (133)..(309): Homolog of NCBI NO: 15235362 NR Description: putative protein; protein id: At4g34400.1
  misc_feature (1)..(201): Homolog of NCBI NO: 15235362 NR Description: putative protein; protein id: At4g34400.1
  misc_feature (7)..(307): Homolog of NCBI NO: 8777352 NR Description: gene_id:MGO3.11~pir||T12971~similar to unknown
  misc_feature (23)..(307): Homolog of NCBI NO: 15238622 NR Description: putative protein; protein id: At5g60130.1
  misc_feature (5)..(223): Homolog of NCBI NO: 11357788 NR Description: hypothetical protein F4P12.10 - Arabidopsis >gi|6729482|emb|CAB67638.1| putative protein [Arabidopsis
  misc_feature (5)..(223): Homolog of NCBI NO: 18409814 NR Description: putative protein; protein id: At3g53310.1, by cDNA: 36830. [Arabidopsis thaliana]
  misc_feature (1)..(307): Homolog of NCBI NO: 15238624 NR Description: putative protein; protein id: At5g60140.1
MASGDVLPRFFTVFLSHCSSESMVIPRSYYNLLPRPLPKTAILIGTGGRFWKVAMTSKQEQVYFEQGWGNFVADNQLKEGEFLTFVFDGHKSYEVSIYGRGDCKETRAVIQVEEISDDTEDDNVSLHSPSNVSLDSLSNDSHHSTSNVSLRSLSNDSLHGDAEIESDSEYSPENLPSASISVESVEVVNPTTSRQRSYKRKTIENPHLYLDDPNNVCFETCLKLRKFELLVHAQLVKDYGLIFSDNVDYIDGYGKLTAKTTKWADQRVCINKWQKICERNQFTENDSILCEILRNEDKVVYAIKIHIFRDAAAST

SEQ ID NO: 71840 - protein, 293 aa, Arabidopsis thaliana
  peptide (1)..(293): Ceres Seq. ID no. 4814967
  misc_feature: Pfam Name: B3 Pfam Description: B3 DNA binding domain
  misc_feature (1)..(293): Homolog of NCBI NO: 15230649 NR Description: hypothetical protein; protein id: At3g06160.1 thaliana] >gi|6862920|gb|AAF30309.1|AC018907_9 hypothetical
  misc_feature (1)..(148): Homolog of NCBI NO: 15230669 NR Description: hypothetical protein; protein id: At3g06220.1 thaliana] >gi|6862926|gb|AAF30315.1|AC018907_15 hypothetical
  misc_feature (1)..(288): Homolog of NCBI NO: 15242851 NR Description: putative protein; protein id: At5g57720.1 thaliana] >gi|9759269|dbj|BAB09590.1|
  misc_feature (111)..(287): Homolog of NCBI NO: 15235362 NR Description: putative protein; protein id: At4g34400.1
  misc_feature (1)..(179): Homolog of NCBI NO: 15235362 NR Description: putative protein; protein id: At4g34400.1
  misc_feature (1)..(285): Homolog of NCBI NO: 8777352 NR Description: gene_id:MGO3.11~pir||T12971~similar to unknown
  misc_feature (1)..(285): Homolog of NCBI NO: 15238622 NR Description: putative protein; protein id: At5g60130.1
  misc_feature (1)..(201): Homolog of NCBI NO: 11357788 NR Description: hypothetical protein F4P12.10 - Arabidopsis >gi|6729482|emb|CAB67638.1| putative protein [Arabidopsis
  misc_feature (1)..(201): Homolog of NCBI NO: 18409814 NR Description: putative protein; protein id: At3g53310.1, by cDNA: 36830. [Arabidopsis thaliana]
  misc_feature (1)..(285): Homolog of NCBI NO: 15238624 NR Description: putative protein; protein id: At5g60140.1
MVIPRSYYNLLPRPLPKTAILIGTGGRFWKVAMTSKQEQVYFEQGWGNFVADNQLKEGEFLTFVFDGHKSYEVSIYGRGDCKETRAVIQVEEISDDTEDDNVSLHSPSNVSLDSLSNDSHHSTSNVSLRSLSNDSLHGDAEIESDSEYSPENLPSASISVESVEVVNPTTSRQRSYKRKTIENPHLYLDDPNNVCFETCLKLRKFELLVHAQLVKDYGLIFSDNVDYIDGYGKLTAKTTKWADQRVCINKWQKICERNQFTENDSILCEILRNEDKVVYAIKIHIFRDAAAST

SEQ ID NO: 71841 - DNA, 840 bp, Arabidopsis thaliana
  misc_feature (1)..(840): Ceres Seq. ID no. 4815026
  misc_feature: MA Experiment ID: 20001906 Result: Up-regulated in Transcription
  misc_feature: MA Experiment 20001906 PARAMETER Experiment Name: At_Drought_Reproduction_P Parameter: Age (day) Value: 35
  misc_feature: MA Experiment 20001906 PARAMETER Experiment Name: At_Drought_Reproduction_P Parameter: Organism Value: A. thaliana
  misc_feature: MA Experiment 20001906 PARAMETER Experiment Name: At_Drought_Reproduction_P Parameter: Plant Line Value: WS
  misc_feature: MA Experiment 20001906 PARAMETER Experiment Name: At_Drought_Reproduction_P Parameter: Timepoint (day) Value: 5
  misc_feature: MA Experiment 20001906 PARAMETER Experiment Name: At_Drought_Reproduction_P Parameter: Tissue Value: Siliques
  misc_feature: MA Experiment 20001906 PARAMETER Experiment Name: At_Drought_Reproduction_P Parameter: Treatment Value: Drought vs. No Drought
  misc_feature: Pfam Name: Sterol_desat Pfam Description: Sterol desaturase
atggcggcgactatggcagattataatgatcagatcgtcaatgagacctctttttacaaccgaatggttctgagtcaccttttgccggtgaatctatgggaacctttaccacatttcctccagacatggctccggaactacctcgccggaaacatactctacttcatctccggcttcctctggtgcttctacatctattaccttaaactcaacgtttacgtccccaaagaatccattcctacgagaaaggcaatgcttttgcaaatatacgtggcaatgaaggctatgccttggtacactcttcttccagctgtctctgagtatatgatcgagcatggttggaccaaatgttactctacacttgaccatttcaactggttcctctgtttcctctacatagctctctatcttgttttagttgagtttatgatttattgggttcacaaagagcttcatgacattaaatttctctataagcatctccatgctacccatcatatgtacaacaagcaaaacacactctctccatttgccgggctcgcattccatccgctggacgggatacttcaggctataccgcacgtgatagcgctgtttatagtgccgattcatctcataacacatctgagtcttttgtttttggaagggatatggacagcaagcatccatgattgcatacatggtaacatctggcctataatgggtgcaggataccataccatacaccatacaacatacaagcataactatggtcattataccatatggatggactggatgtttggctctcttatggttcctttagcagaaaaagacagtttcaaggagaaagaaaagtga

SEQ ID NO: 71842 - protein, 279 aa, Arabidopsis thaliana
  peptide (1)..(279): Ceres Seq. ID no. 4815027
  misc_feature: Pfam Name: Sterol_desat Pfam Description: Sterol desaturase
  misc_feature (1)..(279): Homolog of NCBI NO: 15232937 NR Description: putative sterol-C5-desaturase; protein id:
  misc_feature (1)..(278): Homolog of NCBI NO: 5031219 NR Description: delta7 sterol C-5 desaturase [Arabidopsis
  misc_feature (1)..(278): Homolog of NCBI NO: 15232935 NR Description: sterol-C5-desaturase; protein id: At3g02580.1,
  misc_feature (1)..(278): Homolog of NCBI NO: 21594971 NR Description: sterol-C5-desaturase [Arabidopsis thaliana]
  misc_feature (1)..(278): Homolog of NCBI NO: 2129741 NR Description: C-5 sterol desaturase (EC 1.-.-.-) - Arabidopsis
  misc_feature (5)..(275): Homolog of NCBI NO: 33301670 NR Description: Delta-7-sterol-C5(6)-desaturase (Delta-7-C-5
  misc_feature (5)..(271): Homolog of NCBI NO: 4426627 NR Description: sterol-C5(6)-desaturase homolog [Nicotiana
  misc_feature (1)..(178): Homolog of NCBI NO: 34895618 NR Description: putative sterol-C5(6)-desaturase [Oryza sativa
  misc_feature (213)..(272): Homolog of NCBI NO: 34895618 NR Description: putative sterol-C5(6)-desaturase [Oryza sativa
  misc_feature (48)..(267): Homolog of NCBI NO: 25742651 NR Description: sterol-C5-desaturase (fungal ERG3,
MAATMADYNDQIVNETSFYNRMVLSHLLPVNLWEPLPHFLQTWLRNYLAGNILYFISGFLWCFYIYYLKLNVYVPKESIPTRKAMLLQIYVAMKAMPWYTLLPAVSEYMIEHGWTKCYSTLDHFNWFLCFLYIALYLVLVEFMIYWVHKELHDIKFLYKHLHATHHMYNKQNTLSPFAGLAFHPLDGILQAIPHVIALFIVPIHLITHLSLLFLEGIWTASIHDCIHGNIWPIMGAGYHTIHHTTYKHNYGHYTIWMDWMFGSLMVPLAEKDSFKEKEK

SEQ ID NO: 71843 - protein, 275 aa, Arabidopsis thaliana
  peptide (1)..(275): Ceres Seq. ID no. 4815028
  misc_feature: Pfam Name: Sterol_desat Pfam Description: Sterol desaturase
  misc_feature (1)..(275): Homolog of NCBI NO: 15232937 NR Description: putative sterol-C5-desaturase; protein id:
  misc_feature (1)..(274): Homolog of NCBI NO: 5031219 NR Description: delta7 sterol C-5 desaturase [Arabidopsis
  misc_feature (1)..(274): Homolog of NCBI NO: 15232935 NR Description: sterol-C5-desaturase; protein id: At3g02580.1,
  misc_feature (1)..(274): Homolog of NCBI NO: 21594971 NR Description: sterol-C5-desaturase [Arabidopsis thaliana]
  misc_feature (1)..(274): Homolog of NCBI NO: 2129741 NR Description: C-5 sterol desaturase (EC 1.-.-.-) - Arabidopsis
  misc_feature (1)..(271): Homolog of NCBI NO: 33301670 NR Description: Delta-7-sterol-C5(6)-desaturase (Delta-7-C-5
  misc_feature (1)..(267): Homolog of NCBI NO: 4426627 NR Description: sterol-C5(6)-desaturase homolog [Nicotiana
  misc_feature (1)..(174): Homolog of NCBI NO: 34895618 NR Description: putative sterol-C5(6)-desaturase [Oryza sativa
  misc_feature (209)..(268): Homolog of NCBI NO: 34895618 NR Description: putative sterol-C5(6)-desaturase [Oryza sativa
  misc_feature (44)..(263): Homolog of NCBI NO: 25742651 NR Description: sterol-C5-desaturase (fungal ERG3,
MADYNDQIVNETSFYNRMVLSHLLPVNLWEPLPHFLQTWLRNYLAGNILYFISGFLWCFYIYYLKLNVYVPKESIPTRKAMLLQIYVAMKAMPWYTLLPAVSEYMIEHGWTKCYSTLDHFNWFLCFLYIALYLVLVEFMIYWVHKELHDIKFLYKHLHATHHMYNKQNTLSPFAGLAFHPLDGILQAIPHVIALFIVPIHLITHLSLLFLEGIWTASIHDCIHGNIWPIMGAGYHTIHHTTYKHNYGHYTIWMDWMFGSLMVPLAEKDSFKEKEK

SEQ ID NO: 71844 - protein, 258 aa, Arabidopsis thaliana
  peptide (1)..(258): Ceres Seq. ID no. 4815029
  misc_feature: Pfam Name: Sterol_desat Pfam Description: Sterol desaturase
  misc_feature (1)..(258): Homolog of NCBI NO: 15232937 NR Description: putative sterol-C5-desaturase; protein id:
  misc_feature (1)..(257): Homolog of NCBI NO: 5031219 NR Description: delta7 sterol C-5 desaturase [Arabidopsis
  misc_feature (1)..(257): Homolog of NCBI NO: 15232935 NR Description: sterol-C5-desaturase; protein id: At3g02580.1,
  misc_feature (1)..(257): Homolog of NCBI NO: 21594971 NR Description: sterol-C5-desaturase [Arabidopsis thaliana]
  misc_feature (1)..(257): Homolog of NCBI NO: 2129741 NR Description: C-5 sterol desaturase (EC 1.-.-.-) - Arabidopsis
  misc_feature (1)..(254): Homolog of NCBI NO: 33301670 NR Description: Delta-7-sterol-C5(6)-desaturase (Delta-7-C-5
  misc_feature (1)..(250): Homolog of NCBI NO: 4426627 NR Description: sterol-C5(6)-desaturase homolog [Nicotiana
  misc_feature (1)..(157): Homolog of NCBI NO: 34895618 NR Description: putative sterol-C5(6)-desaturase [Oryza sativa
  misc_feature (192)..(251): Homolog of NCBI NO: 34895618 NR Description: putative sterol-C5(6)-desaturase [Oryza sativa
  misc_feature (27)..(246): Homolog of NCBI NO: 25742651 NR Description: sterol-C5-desaturase (fungal ERG3,
MVLSHLLPVNLWEPLPHFLQTWLRNYLAGNILYFISGFLWCFYIYYLKLNVYVPKESIPTRKAMLLQIYVAMKAMPWYTLLPAVSEYMIEHGWTKCYSTLDHFNWFLCFLYIALYLVLVEFMIYWVHKELHDIKFLYKHLHATHHMYNKQNTLSPFAGLAFHPLDGILQAIPHVIALFIVPIHLITHLSLLFLEGIWTASIHDCIHGNIWPIMGAGYHTIHHTTYKHNYGHYTIWMDWMFGSLMVPLAEKDSFKEKEK

SEQ ID NO: 71845 - DNA, 1236 bp, Arabidopsis thaliana
  misc_feature (1)..(1236): Ceres Seq. ID no. 4815034
  misc_feature: MA Experiment ID: 20000314 Result: Up-regulated in Transcription
  misc_feature: MA Experiment 20000314 PARAMETER Experiment Name: At_14day_Shoots-Roots_Sub_P Parameter: Age (day) Value: 14
  misc_feature: MA Experiment 20000314 PARAMETER Experiment Name: At_14day_Shoots-Roots_Sub_P Parameter: Organism Value: A. thaliana
  misc_feature: MA Experiment 20000314 PARAMETER Experiment Name: At_14day_Shoots-Roots_Sub_P Parameter: Plant Line Value: WS
  misc_feature: MA Experiment 20000314 PARAMETER Experiment Name: At_14day_Shoots-Roots_Sub_P Parameter: Tissue Value: Roots vs. Whole Plant
  misc_feature: MA Experiment ID: 20000352 Result: Down-regulated in Transcription
  misc_feature: MA Experiment 20000352 PARAMETER Experiment Name: At_Drought_Sub_P Parameter: Age (day) Value: 7
  misc_feature: MA Experiment 20000352 PARAMETER Experiment Name: At_Drought_Sub_P Parameter: Organism Value: A. thaliana
  misc_feature: MA Experiment 20000352 PARAMETER Experiment Name: At_Drought_Sub_P Parameter: Plant Line Value: WS
  misc_feature: MA Experiment 20000352 PARAMETER Experiment Name: At_Drought_Sub_P Parameter: Timepoint (hr) Value: 6
  misc_feature: MA Experiment 20000352 PARAMETER Experiment Name: At_Drought_Sub_P Parameter: Tissue Value: Whole Plant
  misc_feature: MA Experiment 20000352 PARAMETER Experiment Name: At_Drought_Sub_P Parameter: Treatment Value: Drought vs. No Drought
  misc_feature: Pfam Name: FA_desaturase_2 Pfam Description: Fatty acid desaturase
atggctcttctcttgaactcgacgataacggtggctatgaagcagaatccgctggtcgcggtatcttttccgcggactacttgcttgggatctagtttttctcctcctcgtcttcttcgagtttcgtgtgttgccacaaaccctagcaagacgagtgaagaaacagacaagaaaaagtttcgacccatcaaagaagtaccaaaccaagtgacccacacaataacacaagagaaactggagatcttcaaatcaatggagaattgggcccaagaaaacttattatcttacctcaaacccgtcgaagcttcctggcaaccacaagactttttgccggaaaccaacgacgaagaccgattctacgaacaagtaaaagagctaagagatcgaacaaaagagatccctgacgattactttgtagttcttgtcggagatatgatcaccgaagaagctttaccaacttatcaaactactttgaacactctcgacggcgtaaaagacgagaccggtggtagtctaacgccgtgggcggtttgggttcgagcatggacggcggaggaaaatcgacacggtgatttgttgaataagtatctttacttatcaggtcgtgttgacatgcgacatgttgaaaagactattcaatatcttatcggatccggcatggactccaaatttgagaacaatccctataatggcttcatctatacttcttttcaagagagagccactttcatctcccatggcaacacggcgaagctagccacaacctacggcgacacaactctcgccaaaatctgcggaacaatcgcggcggatgagaagcggcatgagacggcgtatacacggatcgtcgagaagcttttcgagatcgatcccgatggtaccgtacaagctctagcgagtatgatgaggaagcgaatcacgatgccggctcatctgatgcacgacggtcgcgacgacgatctgttcgatcattacgctgcggtggcgcagagaatcggagtttataccgcgacggattacgcagggattttggagtttttgttgcggcggtgggaggtggagaagttagggatgggtttgtccggcgaaggaaggagagcacaggattatctgtgtaccttgccgcagaggatcaggaggttagaggaaagagctaacgatagagtcaaacttgcgtcaaagtcaaaaccttctgtttccttcagctggatttatgggagagaagttgaactataa

SEQ ID NO: 71846 - protein, 411 aa, Arabidopsis thaliana
  peptide (1)..(411): Ceres Seq. ID no. 4815035
  misc_feature: Pfam Name: FA_desaturase_2 Pfam Description: Fatty acid desaturase
  misc_feature (1)..(411): Homolog of NCBI NO: 15232941 NR Description: putative stearoyl-acyl carrier protein protein id: At3g02610.1 [Arabidopsis thaliana]
  misc_feature (1)..(411): Homolog of NCBI NO: 34222062 NR Description: At3g02610 [Arabidopsis thaliana]
  misc_feature (1)..(411): Homolog of NCBI NO: 15232942 NR Description: putative stearoyl-acyl carrier protein protein id: At3g02620.1 [Arabidopsis thaliana]
  misc_feature (1)..(411): Homolog of NCBI NO: 15237307 NR Description: stearoyl-acyl carrier protein desaturase; protein
  misc_feature (11)..(411): Homolog of NCBI NO: 3355632 NR Description: stearoyl-acyl carrier protein desaturase [Linum
  misc_feature (11)..(411): Homolog of NCBI NO: 3355634 NR Description: stearoyl-acyl carrier protein desaturase [Linum
  misc_feature (1)..(411): Homolog of NCBI NO: 134946 NR Description: Acyl-[acyl-carrier protein] desaturase,
  misc_feature (10)..(411): Homolog of NCBI NO: 951427 NR Description: stearoyl-acyl-carrier protein desaturase
  misc_feature (11)..(411): Homolog of NCBI NO: 417820 NR Description: Acyl-[acyl-carrier protein] desaturase,
  misc_feature (11)..(411): Homolog of NCBI NO: 134945 NR Description: Acyl-[acyl-carrier protein] desaturase,
MALLLNSTITVAMKQNPLVAVSFPRTTCLGSSFSPPRLLRVSCVATNPSKTSEETDKKKFRPIKEVPNQVTHTITQEKLEIFKSMENWAQENLLSYLKPVEASWQPQDFLPETNDEDRFYEQVKELRDRTKEIPDDYFVVLVGDMITEEALPTYQTTLNTLDGVKDETGGSLTPWAVWVRAWTAEENRHGDLLNKYLYLSGRVDMRHVEKTIQYLIGSGMDSKFENNPYNGFIYTSFQERATFISHGNTAKLATTYGDTTLAKICGTIAADEKRHETAYTRIVEKLFEIDPDGTVQALASMMRKRITMPAHLMHDGRDDDLFDHYAAVAQRIGVYTATDYAGILEFLLRRWEVEKLGMGLSGEGRRAQDYLCTLPQRIRRLEERANDRVKLASKSKPSVSFSWIYGREVEL

SEQ ID NO: 71847 - protein, 399 aa, Arabidopsis thaliana
  peptide (1)..(399): Ceres Seq. ID no. 4815036
  misc_feature: Pfam Name: FA_desaturase_2 Pfam Description: Fatty acid desaturase
  misc_feature (1)..(399): Homolog of NCBI NO: 15232941 NR Description: putative stearoyl-acyl carrier protein protein id: At3g02610.1 [Arabidopsis thaliana]
  misc_feature (1)..(399): Homolog of NCBI NO: 34222062 NR Description: At3g02610 [Arabidopsis thaliana]
  misc_feature (1)..(399): Homolog of NCBI NO: 15232942 NR Description: putative stearoyl-acyl carrier protein protein id: At3g02620.1 [Arabidopsis thaliana]
  misc_feature (1)..(399): Homolog of NCBI NO: 15237307 NR Description: stearoyl-acyl carrier protein desaturase; protein
  misc_feature (1)..(399): Homolog of NCBI NO: 3355632 NR Description: stearoyl-acyl carrier protein desaturase [Linum
  misc_feature (1)..(399): Homolog of NCBI NO: 3355634 NR Description: stearoyl-acyl carrier protein desaturase [Linum
  misc_feature (1)..(399): Homolog of NCBI NO: 134946 NR Description: Acyl-[acyl-carrier protein] desaturase,
  misc_feature (1)..(399): Homolog of NCBI NO: 951427 NR Description: stearoyl-acyl-carrier protein desaturase
  misc_feature (1)..(399): Homolog of NCBI NO: 417820 NR Description: Acyl-[acyl-carrier protein] desaturase,
  misc_feature (1)..(399): Homolog of NCBI NO: 134945 NR Description: Acyl-[acyl-carrier protein] desaturase,
MKQNPLVAVSFPRTTCLGSSFSPPRLLRVSCVATNPSKTSEETDKKKFRPIKEVPNQVTHTITQEKLEIFKSMENWAQENLLSYLKPVEASWQPQDFLPETNDEDRFYEQVKELRDRTKEIPDDYFVVLVGDMITEEALPTYQTTLNTLDGVKDETGGSLTPWAVWVRAWTAEENRHGDLLNKYLYLSGRVDMRHVEKTIQYLIGSGMDSKFENNPYNGFIYTSFQERATFISHGNTAKLATTYGDTTLAKICGTIAADEKRHETAYTRIVEKLFEIDPDGTVQALASMMRKRITMPAHLMHDGRDDDLFDHYAAVAQRIGVYTATDYAGILEFLLRRWEVEKLGMGLSGEGRRAQDYLCTLPQRIRRLEERANDRVKLASKSKPSVSFSWIYGREVEL

SEQ ID NO: 71848 - protein, 327 aa, Arabidopsis thaliana
  peptide (1)..(327): Ceres Seq. ID no. 4815037
  misc_feature: Pfam Name: FA_desaturase_2 Pfam Description: Fatty acid desaturase
  misc_feature (1)..(327): Homolog of NCBI NO: 15232941 NR Description: putative stearoyl-acyl carrier protein protein id: At3g02610.1 [Arabidopsis thaliana]
  misc_feature (1)..(327): Homolog of NCBI NO: 34222062 NR Description: At3g02610 [Arabidopsis thaliana]
  misc_feature (1)..(327): Homolog of NCBI NO: 15232942 NR Description: putative stearoyl-acyl carrier protein protein id: At3g02620.1 [Arabidopsis thaliana]
  misc_feature (1)..(327): Homolog of NCBI NO: 15237307 NR Description: stearoyl-acyl carrier protein desaturase; protein
  misc_feature (1)..(327): Homolog of NCBI NO: 3355632 NR Description: stearoyl-acyl carrier protein desaturase [Linum
  misc_feature (1)..(327): Homolog of NCBI NO: 3355634 NR Description: stearoyl-acyl carrier protein desaturase [Linum
  misc_feature (1)..(327): Homolog of NCBI NO: 134946 NR Description: Acyl-[acyl-carrier protein] desaturase,
  misc_feature (1)..(327): Homolog of NCBI NO: 951427 NR Description: stearoyl-acyl-carrier protein desaturase
  misc_feature (1)..(327): Homolog of NCBI NO: 417820 NR Description: Acyl-[acyl-carrier protein] desaturase,
  misc_feature (1)..(327): Homolog of NCBI NO: 134945 NR Description: Acyl-[acyl-carrier protein] desaturase,
MENWAQENLLSYLKPVEASWQPQDFLPETNDEDRFYEQVKELRDRTKEIPDDYFVVLVGDMITEEALPTYQTTLNTLDGVKDETGGSLTPWAVWVRAWTAEENRHGDLLNKYLYLSGRVDMRHVEKTIQYLIGSGMDSKFENNPYNGFIYTSFQERATFISHGNTAKLATTYGDTTLAKICGTIAADEKRHETAYTRIVEKLFEIDPDGTVQALASMMRKRITMPAHLMHDGRDDDLFDHYAAVAQRIGVYTATDYAGILEFLLRRWEVEKLGMGLSGEGRRAQDYLCTLPQRIRRLEERANDRVKLASKSKPSVSFSWIYGREVEL

SEQ ID NO: 71849 - DNA, 1281 bp, Arabidopsis thaliana
  misc_feature (1)..(1281): Ceres Seq. ID no. 4815194
  misc_feature: MA Experiment ID: 20000314 Result: Up-regulated in Transcription
  misc_feature: MA Experiment 20000314 PARAMETER Experiment Name: At_14day_Shoots-Roots_Sub_P Parameter: Age (day) Value: 14
  misc_feature: MA Experiment 20000314 PARAMETER Experiment Name: At_14day_Shoots-Roots_Sub_P Parameter: Organism Value: A. thaliana
  misc_feature: MA Experiment 20000314 PARAMETER Experiment Name: At_14day_Shoots-Roots_Sub_P Parameter: Plant Line Value: WS
  misc_feature: MA Experiment 20000314 PARAMETER Experiment Name: At_14day_Shoots-Roots_Sub_P Parameter: Tissue Value: Roots vs. Whole Plant
  misc_feature: MA Experiment ID: 20000352 Result: Down-regulated in Transcription
  misc_feature: MA Experiment 20000352 PARAMETER Experiment Name: At_Drought_Sub_P Parameter: Age (day) Value: 7
  misc_feature: MA Experiment 20000352 PARAMETER Experiment Name: At_Drought_Sub_P Parameter: Organism Value: A. thaliana
  misc_feature: MA Experiment 20000352 PARAMETER Experiment Name: At_Drought_Sub_P Parameter: Plant Line Value: WS
  misc_feature: MA Experiment 20000352 PARAMETER Experiment Name: At_Drought_Sub_P Parameter: Timepoint (hr) Value: 6
  misc_feature: MA Experiment 20000352 PARAMETER Experiment Name: At_Drought_Sub_P Parameter: Tissue Value: Whole Plant
  misc_feature: MA Experiment 20000352 PARAMETER Experiment Name: At_Drought_Sub_P Parameter: Treatment Value: Drought vs. No Drought
atggttaggatttcagttttagtgtgtttggttcttttggttacaataggagtcatggttagtgtctcactcgctgacaacaacgaagagaaatcgactgatctgaagaaattcaaaggaggagtaactgatcactcgattagtaaggcaaatgataatgatcacgacgatgatgatcatgatcaagacgatgataatgatggagatcacgatgacgatgaccatgacgatgataatgatcatgacgatgataataatgatcatgatgatgatgataataatgatgataataatgatggagacgatgaccatgatgatgataataacgatgatggtgatgacgaaaagaagacgttgagggtacacgagctaaagaaggggaatctaacggtcaaatttacaaaccggggtgcttctatcatgtctctccttttccccaatataaatggaaaattagaggacattgttctgggatatgacagcgtcaatgaccacatgattgacacggtattttgtggagtgacgttggcacgtgtagccagtaaaaaggaaaaggccgctgcaaacgatggcaaaaacacgatccatggtgggacgaaagagtctagcgatgtgatttggagagttaagaaacacaaacataatggcaaaaaaccttatattgttttcacatacacaacaagtcctgatggcgatcaagggaaacttgaagtcactgtgacatataagctggtaggagaaaacagattgaaaatggtgatgcaagcaaaggctaaagagaaaactactccgttgaatttggttcatcgttcttattggaatcttggtggtcataacaatgaagatatcttctctgaagaaattcaaattctcggttccggttatactcatctcgacgataatctcactccaaccgggaaaatcctcgccgttaaaggaacacccttcgattttcgccaactccgacctattaaagacaacatcaatgagcttaagacagggtatggtataaattattgtctagatggtgttgcaaataagatgagaaaagtcgtggagcttgtggacaataaatcgaagataaaaatggagttatctacagaccaatccggtctaaggttgaaaaccactaaaccaaaaaatggatcggttcataaagcttactctggtttatgtctagaatcacatgcaatcaattaccaatatcgttcttcgcagataattgaaccgggggaaacttataagcatactatgctctttaagttttcttttgttccgtaa

SEQ ID NO: 71850 - protein, 426 aa, Arabidopsis thaliana
  peptide (1)..(426): Ceres Seq. ID no. 4815195
  misc_feature (20)..(121): Pfam Name: Aldose 1-epimerase Pfam Description: Aldose 1-epimerase
  misc_feature (180)..(426): Homolog of NCBI NO: 15232072 NR Description: putative aldose 1-epimerase; protein id:
  misc_feature (19)..(163): Homolog of NCBI NO: 15232072 NR Description: putative aldose 1-epimerase; protein id:
  misc_feature (158)..(387): Homolog of NCBI NO: 6094558 NR Description: putative aldose 1-epimerase, 3' partial
  misc_feature (19)..(121): Homolog of NCBI NO: 6094558 NR Description: putative aldose 1-epimerase, 3' partial
  misc_feature (26)..(425): Homolog of NCBI NO: 15242223 NR Description: putative aldose 1-epimerase - like protein;
  misc_feature (28)..(376): Homolog of NCBI NO: 15242223 NR Description: putative aldose 1-epimerase - like protein;
  misc_feature (152)..(425): Homolog of NCBI NO: 26452398 NR Description: putative aldose 1-epimerase [Arabidopsis thaliana]
  misc_feature (121)..(423): Homolog of NCBI NO: 7430313 NR Description: probable aldose 1-epimerase (EC 5.1.3.3) - common
  misc_feature (117)..(423): Homolog of NCBI NO: 15824567 NR Description: non-cell-autonomous protein pathway2;
  misc_feature (119)..(423): Homolog of NCBI NO: 15228261 NR Description: aldose 1-epimerase - like protein; protein id: supported by cDNA: 119313., supported by cDNA: gi_17381241
MVRISVLVCLVLLVTIGVMVSVSLADNNEEKSTDLKKFKGGVTDHSISKANDNDHDDDDHDQDDDNDGDHDDDDHDDDNDHDDDNNDHDDDDNNDDNNDGDDDHDDDNNDDGDDEKKTLRVHELKKGNLTVKFTNRGASIMSLLFPNINGKLEDIVLGYDSVNDHMIDTVFCGVTLARVASKKEKAAANDGKNTIHGGTKESSDVIWRVKKHKHNGKKPYIVFTYTTSPDGDQGKLEVTVTYKLVGENRLKMVMQAKAKEKTTPLNLVHRSYWNLGGHNNEDIFSEEIQILGSGYTHLDDNLTPTGKILAVKGTPFDFRQLRPIKDNINELKTGYGINYCLDGVANKMRKVVELVDNKSKIKMELSTDQSGLRLKTTKPKNGSVHKAYSGLCLESHAINYQYRSSQIIEPGETYKHTMLFKFSFVP

SEQ ID NO: 71851 - protein, 408 aa, Arabidopsis thaliana
  peptide (1)..(408): Ceres Seq. ID no. 4815196
  misc_feature (2)..(103): Pfam Name: Aldose 1-epimerase Pfam Description: Aldose 1-epimerase
  misc_feature (162)..(408): Homolog of NCBI NO: 15232072 NR Description: putative aldose 1-epimerase; protein id:
  misc_feature (1)..(145): Homolog of NCBI NO: 15232072 NR Description: putative aldose 1-epimerase; protein id:
  misc_feature (140)..(369): Homolog of NCBI NO: 6094558 NR Description: putative aldose 1-epimerase, 3' partial
  misc_feature (1)..(103): Homolog of NCBI NO: 6094558 NR Description: putative aldose 1-epimerase, 3' partial
  misc_feature (8)..(407): Homolog of NCBI NO: 15242223 NR Description: putative aldose 1-epimerase - like protein;
  misc_feature (10)..(358): Homolog of NCBI NO: 15242223 NR Description: putative aldose 1-epimerase - like protein;
  misc_feature (134)..(407): Homolog of NCBI NO: 26452398 NR Description: putative aldose 1-epimerase [Arabidopsis thaliana]
  misc_feature (103)..(405): Homolog of NCBI NO: 7430313 NR Description: probable aldose 1-epimerase (EC 5.1.3.3) - common
  misc_feature (99)..(405): Homolog of NCBI NO: 15824567 NR Description: non-cell-autonomous protein pathway2;
  misc_feature (101)..(405): Homolog of NCBI NO: 15228261 NR Description: aldose 1-epimerase - like protein; protein id: supported by cDNA: 119313., supported by cDNA: gi_17381241
MVSVSLADNNEEKSTDLKKFKGGVTDHSISKANDNDHDDDDHDQDDDNDGDHDDDDHDDDNDHDDDNNDHDDDDNNDDNNDGDDDHDDDNNDDGDDEKKTLRVHELKKGNLTVKFTNRGASIMSLLFPNINGKLEDIVLGYDSVNDHMIDTVFCGVTLARVASKKEKAAANDGKNTIHGGTKESSDVIWRVKKHKHNGKKPYIVFTYTTSPDGDQGKLEVTVTYKLVGENRLKMVMQAKAKEKTTPLNLVHRSYWNLGGHNNEDIFSEEIQILGSGYTHLDDNLTPTGKILAVKGTPFDFRQLRPIKDNINELKTGYGINYCLDGVANKMRKVVELVDNKSKIKMELSTDQSGLRLKTTKPKNGSVHKAYSGLCLESHAINYQYRSSQIIEPGETYKHTMLFKFSFVP

SEQ ID NO: 71852 - protein, 286 aa, Arabidopsis thaliana
  peptide (1)..(286): Ceres Seq. ID no. 4815197
  misc_feature (18)..(246): Pfam Name: Aldose 1-epimerase Pfam Description: Aldose 1-epimerase
  misc_feature (40)..(286): Homolog of NCBI NO: 15232072 NR Description: putative aldose 1-epimerase; protein id:
  misc_feature (1)..(23): Homolog of NCBI NO: 15232072 NR Description: putative aldose 1-epimerase; protein id:
  misc_feature (18)..(247): Homolog of NCBI NO: 6094558 NR Description: putative aldose 1-epimerase, 3' partial
  misc_feature (1)..(285): Homolog of NCBI NO: 15242223 NR Description: putative aldose 1-epimerase - like protein;
  misc_feature (1)..(236): Homolog of NCBI NO: 15242223 NR Description: putative aldose 1-epimerase - like protein;
  misc_feature (12)..(285): Homolog of NCBI NO: 26452398 NR Description: putative aldose 1-epimerase [Arabidopsis thaliana]
  misc_feature (1)..(283): Homolog of NCBI NO: 7430313 NR Description: probable aldose 1-epimerase (EC 5.1.3.3) - common
  misc_feature (1)..(283): Homolog of NCBI NO: 15824567 NR Description: non-cell-autonomous protein pathway2;
  misc_feature (1)..(283): Homolog of NCBI NO: 15228261 NR Description: aldose 1-epimerase - like protein; protein id: supported by cDNA: 119313., supported by cDNA: gi_17381241
  misc_feature (1)..(283): Homolog of NCBI NO: 21537069 NR Description: aldose 1-epimerase-like protein [Arabidopsis
MSLLFPNINGKLEDIVLGYDSVNDHMIDTVFCGVTLARVASKKEKAAANDGKNTIHGGTKESSDVIWRVKKHKHNGKKPYIVFTYTTSPDGDQGKLEVTVTYKLVGENRLKMVMQAKAKEKTTPLNLVHRSYWNLGGHNNEDIFSEEIQILGSGYTHLDDNLTPTGKILAVKGTPFDFRQLRPIKDNINELKTGYGINYCLDGVANKMRKVVELVDNKSKIKMELSTDQSGLRLKTTKPKNGSVHKAYSGLCLESHAINYQYRSSQIIEPGETYKHTMLFKFSFVP

SEQ ID NO: 71853 - DNA, 1380 bp, Arabidopsis thaliana
  misc_feature (1)..(1380): Ceres Seq. ID no. 4815714
  misc_feature: MA Experiment ID: 20000440 Result: Up-regulated in Transcription
  misc_feature: MA Experiment 20000440 PARAMETER Experiment Name: At_Closed-Flower__Sub_P Parameter: Tissue Value: Closed Flower vs. Whole Plant
atgttcattgcaatggcagatttcaagcttcttttgcttatactcatccttctatctctctttgaacttgatctacttcactttcaccatgacttcttctctccttttccggtcaagatcggtttactcctgatatccatcttcttctatgcctactcaaccacccggtctaaaccggtttacctagtggatttctcatgtcaccaacccacggattcttgcaaaatctcatccgaaacgttcttcaacatggccaaaggcgctcaactctacaccgaagaaacaatccaattcatgacgaggatactaaaccggtccggtttaggagacgatacgtactccccacgttgcatgttaacctctccaccaactccatcaatgtacgaggcgagacatgaatccgaattagtcatcttcggagctcttaactcactatttaagaaaaccggaatcgaaccgagagaagtcggaatcttcatcgtaaactgcagcttgtttaaccctaacccatctctctcgtccatgatcgtaaaccggtacaagcttaaaaccgacgtcaaaacttacaatctctccggaatctccgtggacctcgccacaaatctactaaaggcaaaccctaatacctacgcagttattgttagtacggagaacatgactctaagcatgtatcgaggcaacgaccggtcaatgttagtccctaactgtctattccgagtaggtggcgctgcggttatgctctcaaaccggagtcaagaccgagtccggtctaagtacgaattgactcatattgtaaggactcacaaaggctctagcgataaacactacacttgtgctgaacaaaaagaagatagtaaaggtatcgttggagtcgcactctctaaagaactaacggttgttgctggtgacacgttaaagacgaatctaacagcacttggtccgcttgttttgcctttatctgaaaaactccggtttatcctctttttggtaaagagtaagcttttccggttaaaggttagtccatatgttccggattttaaactatgtttcaagcatttctgtattcacgctggtggtagagcgttacttgacgcggttgaaaaaggtcttggacttagtgagtttgatcttgagccgtctcggatgactttgcaccgctttggaaacacttcaagctcgtcgctgtggtacgagctggcttacgtggaggctaaatgtcgggtcaaacgaggagatagggtttggcagttggcgtttgggtcgggttttaaatgtaatagtattgtgtggagagcattgagaacgattccggctaacgagtcattggtgggtaacccgtggggtgactcggttcataagtatccagttcacgtgacctaa

SEQ ID NO: 71854 - protein, 459 aa, Arabidopsis thaliana
  peptide (1)..(459): Ceres Seq. ID no. 4815715
  misc_feature (289)..(434): Pfam Name: Chalcone and stilbene synthases, C-terminal domain Pfam Description: Chalcone and stilbene synthases, C-terminal
  misc_feature (1)..(459): Homolog of NCBI NO: 15228247 NR Description: putative fatty acid elongase 3-ketoacyl-CoA
  misc_feature (1)..(459): Homolog of NCBI NO: 15226428 NR Description: putative beta-ketoacyl-CoA synthase; protein id:
  misc_feature (42)..(458): Homolog of NCBI NO: 4091810 NR Description: fatty acid elongase 3-ketoacyl-CoA synthase 1
  misc_feature (42)..(458): Homolog of NCBI NO: 22329274 NR Description: fatty acid elongase 3-ketoacyl-CoA synthase 1; id: At1g01120.1, supported by cDNA: gi_18377663, supported by
  misc_feature (10)..(458): Homolog of NCBI NO: 15225767 NR Description: putative beta-ketoacyl-CoA synthase; protein id:
  misc_feature (1)..(458): Homolog of NCBI NO: 15219676 NR Description: putative beta-ketoacyl-CoA synthase; protein id:
  misc_feature (1)..(458): Homolog of NCBI NO: 18377979 NR Description: putative beta-ketoacyl-CoA synthase [Arabidopsis
  misc_feature (8)..(456): Homolog of NCBI NO: 3551960 NR Description: senescence-associated protein 15 [Hemerocallis
  misc_feature (18)..(458): Homolog of NCBI NO: 14334714 NR Description: putative beta-ketoacyl-CoA synthase [Arabidopsis
  misc_feature (18)..(458): Homolog of NCBI NO: 15239981 NR Description: beta-ketoacyl-CoA synthase; protein id: supported by cDNA: gi_14334713, supported by cDNA: gi_15983490
MFIAMADFKLLLLILILLSLFELDLLHFHHDFFSPFPVKIGLLLISIFFYAYSTTRSKPVYLVDFSCHQPTDSCKISSETFFNMAKGAQLYTEETIQFMTRILNRSGLGDDTYSPRCMLTSPPTPSMYEARHESELVIFGALNSLFKKTGIEPREVGIFIVNCSLFNPNPSLSSMIVNRYKLKTDVKTYNLSGISVDLATNLLKANPNTYAVIVSTENMTLSMYRGNDRSMLVPNCLFRVGGAAVMLSNRSQDRVRSKYELTHIVRTHKGSSDKHYTCAEQKEDSKGIVGVALSKELTVVAGDTLKTNLTALGPLVLPLSEKLRFILFLVKSKLFRLKVSPYVPDFKLCFKHFCIHAGGRALLDAVEKGLGLSEFDLEPSRMTLHRFGNTSSSSLWYELAYVEAKCRVKRGDRVWQLAFGSGFKCNSIVWRALRTIPANESLVGNPWGDSVHKYPVHVT

SEQ ID NO: 71855 - protein, 455 aa, Arabidopsis thaliana
  peptide (1)..(455): Ceres Seq. ID no. 4815716
  misc_feature (285)..(430): Pfam Name: Chalcone and stilbene synthases, C-terminal domain Pfam Description: Chalcone and stilbene synthases, C-terminal
  misc_feature (1)..(455): Homolog of NCBI NO: 15228247 NR Description: putative fatty acid elongase 3-ketoacyl-CoA
  misc_feature (1)..(455): Homolog of NCBI NO: 15226428 NR Description: putative beta-ketoacyl-CoA synthase; protein id:
  misc_feature (38)..(454): Homolog of NCBI NO: 4091810 NR Description: fatty acid elongase 3-ketoacyl-CoA synthase 1
  misc_feature (38)..(454): Homolog of NCBI NO: 22329274 NR Description: fatty acid elongase 3-ketoacyl-CoA synthase 1; id: At1g01120.1, supported by cDNA: gi_18377663, supported by
  misc_feature (6)..(454): Homolog of NCBI NO: 15225767 NR Description: putative beta-ketoacyl-CoA synthase; protein id:
  misc_feature (1)..(454): Homolog of NCBI NO: 15219676 NR Description: putative beta-ketoacyl-CoA synthase; protein id:
  misc_feature (1)..(454): Homolog of NCBI NO: 18377979 NR Description: putative beta-ketoacyl-CoA synthase [Arabidopsis
  misc_feature (4)..(452): Homolog of NCBI NO: 3551960 NR Description: senescence-associated protein 15 [Hemerocallis
  misc_feature (14)..(454): Homolog of NCBI NO: 14334714 NR Description: putative beta-ketoacyl-CoA synthase [Arabidopsis
  misc_feature (14)..(454): Homolog of NCBI NO: 15239981 NR Description: beta-ketoacyl-CoA synthase; protein id: supported by cDNA: gi_14334713, supported by cDNA: gi_15983490
MADFKLLLLILILLSLFELDLLHFHHDFFSPFPVKIGLLLISIFFYAYSTTRSKPVYLVDFSCHQPTDSCKISSETFFNMAKGAQLYTEETIQFMTRILNRSGLGDDTYSPRCMLTSPPTPSMYEARHESELVIFGALNSLFKKTGIEPREVGIFIVNCSLFNPNPSLSSMIVNRYKLKTDVKTYNLSGISVDLATNLLKANPNTYAVIVSTENMTLSMYRGNDRSMLVPNCLFRVGGAAVMLSNRSQDRVRSKYELTHIVRTHKGSSDKHYTCAEQKEDSKGIVGVALSKELTVVAGDTLKTNLTALGPLVLPLSEKLRFILFLVKSKLFRLKVSPYVPDFKLCFKHFCIHAGGRALLDAVEKGLGLSEFDLEPSRMTLHRFGNTSSSSLWYELAYVEAKCRVKRGDRVWQLAFGSGFKCNSIVWRALRTIPANESLVGNPWGDSVHKYPVHVT

SEQ ID NO: 71856 - protein, 376 aa, Arabidopsis thaliana
  peptide (1)..(376): Ceres Seq. ID no. 4815717
  misc_feature (206)..(351): Pfam Name: Chalcone and stilbene synthases, C-terminal domain Pfam Description: Chalcone and stilbene synthases, C-terminal
  misc_feature (1)..(376): Homolog of NCBI NO: 15228247 NR Description: putative fatty acid elongase 3-ketoacyl-CoA
  misc_feature (1)..(376): Homolog of NCBI NO: 15226428 NR Description: putative beta-ketoacyl-CoA synthase; protein id:
  misc_feature (1)..(375): Homolog of NCBI NO: 4091810 NR Description: fatty acid elongase 3-ketoacyl-CoA synthase 1
  misc_feature (1)..(375): Homolog of NCBI NO: 22329274 NR Description: fatty acid elongase 3-ketoacyl-CoA synthase 1; id: At1g01120.1, supported by cDNA: gi_18377663, supported by
  misc_feature (1)..(375): Homolog of NCBI NO: 15225767 NR Description: putative beta-ketoacyl-CoA synthase; protein id:
  misc_feature (1)..(375): Homolog of NCBI NO: 15219676 NR Description: putative beta-ketoacyl-CoA synthase; protein id:
  misc_feature (1)..(375): Homolog of NCBI NO: 18377979 NR Description: putative beta-ketoacyl-CoA synthase [Arabidopsis
  misc_feature (1)..(373): Homolog of NCBI NO: 3551960 NR Description: senescence-associated protein 15 [Hemerocallis
  misc_feature (1)..(375): Homolog of NCBI NO: 14334714 NR Description: putative beta-ketoacyl-CoA synthase [Arabidopsis
  misc_feature (1)..(375): Homolog of NCBI NO: 15239981 NR Description: beta-ketoacyl-CoA synthase; protein id: supported by cDNA: gi_14334713, supported by cDNA: gi_15983490
MAKGAQLYTEETIQFMTRILNRSGLGDDTYSPRCMLTSPPTPSMYEARHESELVIFGALNSLFKKTGIEPREVGIFIVNCSLFNPNPSLSSMIVNRYKLKTDVKTYNLSGISVDLATNLLKANPNTYAVIVSTENMTLSMYRGNDRSMLVPNCLFRVGGAAVMLSNRSQDRVRSKYELTHIVRTHKGSSDKHYTCAEQKEDSKGIVGVALSKELTVVAGDTLKTNLTALGPLVLPLSEKLRFILFLVKSKLFRLKVSPYVPDFKLCFKHFCIHAGGRALLDAVEKGLGLSEFDLEPSRMTLHRFGNTSSSSLWYELAYVEAKCRVKRGDRVWQLAFGSGFKCNSIVWRALRTIPANESLVGNPWGDSVHKYPVHVT

SEQ ID NO: 71857 - DNA, 1887 bp, Arabidopsis thaliana
  misc_feature (1)..(1887): Ceres Seq. ID no. 4815811
  misc_feature: MA Experiment ID: 20000306 Result: Up-regulated in Transcription
  misc_feature: MA Experiment 20000306 PARAMETER Experiment Name: At_Germinating_Seeds_Sub_P Parameter: Age (hr) Value: 6 vs. 0
  misc_feature: MA Experiment 20000306 PARAMETER Experiment Name: At_Germinating_Seeds_Sub_P Parameter: Organism Value: A. thaliana
  misc_feature: MA Experiment 20000306 PARAMETER Experiment Name: At_Germinating_Seeds_Sub_P Parameter: Plant Line Value: WS
  misc_feature: MA Experiment 20000306 PARAMETER Experiment Name: At_Germinating_Seeds_Sub_P Parameter: Tissue Value: Germinating Seeds
  misc_feature: MA Experiment ID: 20000307 Result: Up-regulated in Transcription
  misc_feature: MA Experiment 20000307 PARAMETER Experiment Name: At_Germinating_Seeds_Sub_P Parameter: Age (hr) Value: 24 vs. 0
  misc_feature: MA Experiment 20000307 PARAMETER Experiment Name: At_Germinating_Seeds_Sub_P Parameter: Organism Value: A. thaliana
  misc_feature: MA Experiment 20000307 PARAMETER Experiment Name: At_Germinating_Seeds_Sub_P Parameter: Plant Line Value: WS
  misc_feature: MA Experiment 20000307 PARAMETER Experiment Name: At_Germinating_Seeds_Sub_P Parameter: Tissue Value: Germinating Seeds
  misc_feature: MA Experiment ID: 20000329 Result: Up-regulated in Transcription
  misc_feature: MA Experiment 20000329 PARAMETER Experiment Name: At_4deg_Cold_Sub_P Parameter: Age (day) Value: 14
  misc_feature: MA Experiment 20000329 PARAMETER Experiment Name: At_4deg_Cold_Sub_P Parameter: Organism Value: A. thaliana
  misc_feature: MA Experiment 20000329 PARAMETER Experiment Name: At_4deg_Cold_Sub_P Parameter: Plant Line Value: WS
  misc_feature: MA Experiment 20000329 PARAMETER Experiment Name: At_4deg_Cold_Sub_P Parameter: Temperature (deg C) Value: 4 vs. 22
  misc_feature: MA Experiment 20000329 PARAMETER Experiment Name: At_4deg_Cold_Sub_P Parameter: Timepoint (hr) Value: 6
  misc_feature: MA Experiment 20000329 PARAMETER Experiment Name: At_4deg_Cold_Sub_P Parameter: Tissue Value: Aerial
  misc_feature: MA Experiment ID: 20000355 Result: Down-regulated in Transcription
  misc_feature: MA Experiment 20000355 PARAMETER Experiment Name: At_Siliques_Sub_P Parameter: Age (day) Value: 21
  misc_feature: MA Experiment 20000355 PARAMETER Experiment Name: At_Siliques_Sub_P Parameter: Organism Value: A. thaliana
  misc_feature: MA Experiment 20000355 PARAMETER Experiment Name: At_Siliques_Sub_P Parameter: Plant Line Value: WS
  misc_feature: MA Experiment 20000355 PARAMETER Experiment Name: At_Siliques_Sub_P Parameter: Tissue Value: Less Than 5mm Siliques vs. Whole Plant
atgatgacgagaaaagcaatgataaacatttgttgcgtggccacaacgccgtccaagtatccacctcctcctcctcttacgttaacccctcgccagagtttggaatcggcggctatctatggagtcattgaatccgcggcggatataatcgagagatggaacactgagaccaacactttcgctaaagttacttgtatgttctacgagaacaaacctgaagccatgatgttcatcgaacgtgtgaaggatcttcagaagacgatggacgtactcgtgagtgaggatccaaactctgagagactcttgagatcgcataagcttatgcaaatcgctatgaagaggttgcaaaaagagttttaccagattctttcgatgaatcgtgcttatcttgatccagaatcagtgtccactcgatcttcacttacttccgcaagatctagctactcagatttccccgactatgtcgaagatctagatacgatcatcgaactggaggaggtttctaccaacgtcatgacggatttgaaatccatcgctgagtgcatgatcggttctggttacgctaaggagtgtctaagcatctataaaagcattaggaaatcgatcatcgacgaagggatttatcgtttagaagtggagaagacgagtactgggaaggtgaagaaaatgtcatgggaagttatggagttgaagatcagaagctggttaaaagcagtcaaagtttctatggagactcttttcaaaggtgagaagattttgtgtgatcatgtctttgaatcctctgacgcaattagagagtcttgctttagtgatatctctcgagacggtgcgcttcttctctttggattcccggagatcattaatactaaaactagcaagaaacactctccgccggagaaagttttccggctgcttgacatgtacaccgccatcgccggaaactggcaagcgattgagtctatcttctcgtttgattcgatctccgtcgtcagatctcttgctcttaaatctctaatctctctcagcgaatcaattcgatcactacttgtggaattcgaatccggaatccagaaggactcgtcgaaggtggtggttcccggcggaggagtacatccactgacgatctccgtcatggatcacctctctctcctcgctgactacagcaacgtactagtcgatatcctcgccggatctccaccaccggacaggtcgctgttaccggagtcttacttcaacgtctcagaatccgacgactctccttcgtcggagctgacgatccgtttcgcttggatcatcctcgtcctcctttgtaaaatcgatcgtaaatcaattcactacaaagacttctctatacagtatctcttcctcaccaacaatctccagcacgtggtctcacgtgctcgttcctcaaacctgaagaaccttctcggcgaggattggatcacgagacatttcgctaagatgagacaattcgccggcagctataagcggctagcttggggaccggtggttgctactttacctgagaatcgtacggtggagatgacgccggaggaagtgaaggagcggtttgaaaaattcagcgagagcttcgaaaacgcgtatagtaagcacagtgtctgcgtcgtagctgatccaaatatacgagacgagatcaaagtatcgatatcgagaaagctggtgccgatctatcgcgagttttacaacacgagaggttctgttatcttgggagaaggcgatggcgcgagaaacctgaactcagttgtccgatttacccctgaagatattgaaaactatttgtctgatttgttcagagagaagggtagttcggggaattcgtcagcctcttctccttcctcttgtcggtcaaggcaatccatgtcctaa

SEQ ID NO: 71858 - protein, 628 aa, Arabidopsis thaliana
  peptide (1)..(628): Ceres Seq. ID no. 4815812
  misc_feature (31)..(605): Pfam Name: Exo70 exocyst complex subunit Pfam Description: Exo70 exocyst complex subunit
  misc_feature (24)..(621): Homolog of NCBI NO: 15232699 NR Description: hypothetical protein; protein id: At3g09530.1 thaliana] >gi|6682232|gb|AAF23284.1|AC016661_9 hypothetical
  misc_feature (18)..(623): Homolog of NCBI NO: 15225082 NR Description: hypothetical protein; protein id: At2g39380.1
  misc_feature (14)..(627): Homolog of NCBI NO: 11278980 NR Description: hypothetical protein T26I12.30 - Arabidopsis >gi|7019648|emb|CAB75749.1| putative protein [Arabidopsis
  misc_feature (14)..(627): Homolog of NCBI NO: 22331801 NR Description: putative protein; protein id: At3g55150.1, by cDNA: gi_18377617, supported by cDNA: gi_20465378 [Arabidopsis >gi|18377618|gb|AAL66959.1| unknown protein [Arabidopsis
  misc_feature (23)..(620): Homolog of NCBI NO: 15238510 NR Description: putative protein; protein id: At5g59730.1, by cDNA: gi_13430533, supported by cDNA: gi_14334437, supported cDNA: gi_15010739, supported by cDNA: gi_16974428, supported by
  misc_feature (23)..(620): Homolog of NCBI NO: 23397263 NR Description: unknown protein [Arabidopsis thaliana]
  misc_feature (23)..(561): Homolog of NCBI NO: 23397289 NR Description: unknown protein [Arabidopsis thaliana]
  misc_feature (30)..(610): Homolog of NCBI NO: 15226917 NR Description: unknown protein; protein id: At2g28640.1
  misc_feature (31)..(610): Homolog of NCBI NO: 25308573 NR Description: hypothetical protein [imported] - Arabidopsis >gi|8439895|gb|AAF75081.1|AC007583_17 It contains a interferon domain PF|00143. EST gb|N96176 comes from this gene. [Arabidopsis
  misc_feature (134)..(604): Homolog of NCBI NO: 15218495 NR Description: unknown protein; protein id: At1g72470.1
MMTRKAMINICCVATTPSKYPPPPPLTLTPRQSLESAAIYGVIESAADIIERWNTETNTFAKVTCMFYENKPEAMMFIERVKDLQKTMDVLVSEDPNSERLLRSHKLMQIAMKRLQKEFYQILSMNRAYLDPESVSTRSSLTSARSSYSDFPDYVEDLDTIIELEEVSTNVMTDLKSIAECMIGSGYAKECLSIYKSIRKSIIDEGIYRLEVEKTSTGKVKKMSWEVMELKIRSWLKAVKVSMETLFKGEKILCDHVFESSDAIRESCFSDISRDGALLLFGFPEIINTKTSKKHSPPEKVFRLLDMYTAIAGNWQAIESIFSFDSISVVRSLALKSLISLSESIRSLLVEFESGIQKDSSKVVVPGGGVHPLTISVMDHLSLLADYSNVLVDILAGSPPPDRSLLPESYFNVSESDDSPSSELTIRFAWIILVLLCKIDRKSIHYKDFSIQYLFLTNNLQHVVSRARSSNLKNLLGEDWITRHFAKMRQFAGSYKRLAWGPVVATLPENRTVEMTPEEVKERFEKFSESFENAYSKHSVCVVADPNIRDEIKVSISRKLVPIYREFYNTRGSVILGEGDGARNLNSVVRFTPEDIENYLSDLFREKGSSGNSSASSPSSCRSRQSMS

SEQ ID NO: 71859 - protein, 627 aa, Arabidopsis thaliana
  peptide (1)..(627): Ceres Seq. ID no. 4815813
  misc_feature (30)..(604): Pfam Name: Exo70 exocyst complex subunit Pfam Description: Exo70 exocyst complex subunit
  misc_feature (23)..(620): Homolog of NCBI NO: 15232699 NR Description: hypothetical protein; protein id: At3g09530.1 thaliana] >gi|6682232|gb|AAF23284.1|AC016661_9 hypothetical
  misc_feature (17)..(622): Homolog of NCBI NO: 15225082 NR Description: hypothetical protein; protein id: At2g39380.1
  misc_feature (13)..(626): Homolog of NCBI NO: 11278980 NR Description: hypothetical protein T26I12.30 - Arabidopsis >gi|7019648|emb|CAB75749.1| putative protein [Arabidopsis
  misc_feature (13)..(626): Homolog of NCBI NO: 22331801 NR Description: putative protein; protein id: At3g55150.1, by cDNA: gi_18377617, supported by cDNA: gi_20465378 [Arabidopsis >gi|18377618|gb|AAL66959.1| unknown protein [Arabidopsis
  misc_feature (22)..(619): Homolog of NCBI NO: 15238510 NR Description: putative protein; protein id: At5g59730.1, by cDNA: gi_13430533, supported by cDNA: gi_14334437, supported cDNA: gi_15010739, supported by cDNA: gi_16974428, supported by
  misc_feature (22)..(619): Homolog of NCBI NO: 23397263 NR Description: unknown protein [Arabidopsis thaliana]
  misc_feature (22)..(560): Homolog of NCBI NO: 23397289 NR Description: unknown protein [Arabidopsis thaliana]
  misc_feature (29)..(609): Homolog of NCBI NO: 15226917 NR Description: unknown protein; protein id: At2g28640.1
  misc_feature (30)..(609): Homolog of NCBI NO: 25308573 NR Description: hypothetical protein [imported] - Arabidopsis >gi|8439895|gb|AAF75081.1|AC007583_17 It contains a interferon domain PF|00143. EST gb|N96176 comes from this gene. [Arabidopsis
  misc_feature (133)..(603): Homolog of NCBI NO: 15218495 NR Description: unknown protein; protein id: At1g72470.1
MTRKAMINICCVATTPSKYPPPPPLTLTPRQSLESAAIYGVIESAADIIERWNTETNTFAKVTCMFYENKPEAMMFIERVKDLQKTMDVLVSEDPNSERLLRSHKLMQIAMKRLQKEFYQILSMNRAYLDPESVSTRSSLTSARSSYSDFPDYVEDLDTIIELEEVSTNVMTDLKSIAECMIGSGYAKECLSIYKSIRKSIIDEGIYRLEVEKTSTGKVKKMSWEVMELKIRSWLKAVKVSMETLFKGEKILCDHVFESSDAIRESCFSDISRDGALLLFGFPEIINTKTSKKHSPPEKVFRLLDMYTAIAGNWQAIESIFSFDSISVVRSLALKSLISLSESIRSLLVEFESGIQKDSSKVVVPGGGVHPLTISVMDHLSLLADYSNVLVDILAGSPPPDRSLLPESYFNVSESDDSPSSELTIRFAWIILVLLCKIDRKSIHYKDFSIQYLFLTNNLQHVVSRARSSNLKNLLGEDWITRHFAKMRQFAGSYKRLAWGPVVATLPENRTVEMTPEEVKERFEKFSESFENAYSKHSVCVVADPNIRDEIKVSISRKLVPIYREFYNTRGSVILGEGDGARNLNSVVRFTPEDIENYLSDLFREKGSSGNSSASSPSSCRSRQSMS

SEQ ID NO: 71860 - protein, 622 aa, Arabidopsis thaliana
  peptide (1)..(622): Ceres Seq. ID no. 4815814
  misc_feature (25)..(599): Pfam Name: Exo70 exocyst complex subunit Pfam Description: Exo70 exocyst complex subunit
  misc_feature (18)..(615): Homolog of NCBI NO: 15232699 NR Description: hypothetical protein; protein id: At3g09530.1 thaliana] >gi|6682232|gb|AAF23284.1|AC016661_9 hypothetical
  misc_feature (12)..(617): Homolog of NCBI NO: 15225082 NR Description: hypothetical protein; protein id: At2g39380.1
  misc_feature (8)..(621): Homolog of NCBI NO: 11278980 NR Description: hypothetical protein T26I12.30 - Arabidopsis >gi|7019648|emb|CAB75749.1| putative protein [Arabidopsis
  misc_feature (8)..(621): Homolog of NCBI NO: 22331801 NR Description: putative protein; protein id: At3g55150.1, by cDNA: gi_18377617, supported by cDNA: gi_20465378 [Arabidopsis >gi|18377618|gb|AAL66959.1| unknown protein [Arabidopsis
  misc_feature (17)..(614): Homolog of NCBI NO: 15238510 NR Description: putative protein; protein id: At5g59730.1, by cDNA: gi_13430533, supported by cDNA: gi_14334437, supported cDNA: gi_15010739, supported by cDNA: gi_16974428, supported by
  misc_feature (17)..(614): Homolog of NCBI NO: 23397263 NR Description: unknown protein [Arabidopsis thaliana]
  misc_feature (17)..(555): Homolog of NCBI NO: 23397289 NR Description: unknown protein [Arabidopsis thaliana]
  misc_feature (24)..(604): Homolog of NCBI NO: 15226917 NR Description: unknown protein; protein id: At2g28640.1
  misc_feature (25)..(604): Homolog of NCBI NO: 25308573 NR Description: hypothetical protein [imported] - Arabidopsis >gi|8439895|gb|AAF75081.1|AC007583_17 It contains a interferon domain PF|00143. EST gb|N96176 comes from this gene. [Arabidopsis
  misc_feature (128)..(598): Homolog of NCBI NO: 15218495 NR Description: unknown protein; protein id: At1g72470.1
MINICCVATTPSKYPPPPPLTLTPRQSLESAAIYGVIESAADIIERWNTETNTFAKVTCMFYENKPEAMMFIERVKDLQKTMDVLVSEDPNSERLLRSHKLMQIAMKRLQKEFYQILSMNRAYLDPESVSTRSSLTSARSSYSDFPDYVEDLDTIIELEEVSTNVMTDLKSIAECMIGSGYAKECLSIYKSIRKSIIDEGIYRLEVEKTSTGKVKKMSWEVMELKIRSWLKAVKVSMETLFKGEKILCDHVFESSDAIRESCFSDISRDGALLLFGFPEIINTKTSKKHSPPEKVFRLLDMYTAIAGNWQAIESIFSFDSISVVRSLALKSLISLSESIRSLLVEFESGIQKDSSKVVVPGGGVHPLTISVMDHLSLLADYSNVLVDILAGSPPPDRSLLPESYFNVSESDDSPSSELTIRFAWIILVLLCKIDRKSIHYKDFSIQYLFLTNNLQHVVSRARSSNLKNLLGEDWITRHFAKMRQFAGSYKRLAWGPVVATLPENRTVEMTPEEVKERFEKFSESFENAYSKHSVCVVADPNIRDEIKVSISRKLVPIYREFYNTRGSVILGEGDGARNLNSVVRFTPEDIENYLSDLFREKGSSGNSSASSPSSCRSRQSMS

SEQ ID NO: 71861 - DNA, 1125 bp, Arabidopsis thaliana
  misc_feature (1)..(1125): Ceres Seq. ID no. 4815875
  misc_feature: MA Experiment ID: 20000173 Result: Down-regulated in Transcription
  misc_feature: MA Experiment 20000173 PARAMETER Experiment Name: At_42deg_Heat_P Parameter: Age (day) Value: 14
  misc_feature: MA Experiment 20000173 PARAMETER Experiment Name: At_42deg_Heat_P Parameter: Organism Value: A. thaliana
  misc_feature: MA Experiment 20000173 PARAMETER Experiment Name: At_42deg_Heat_P Parameter: Plant Line Value: WS
  misc_feature: MA Experiment 20000173 PARAMETER Experiment Name: At_42deg_Heat_P Parameter: Temperature (deg C) Value: 42 vs. 22
  misc_feature: MA Experiment 20000173 PARAMETER Experiment Name: At_42deg_Heat_P Parameter: Timepoint (hr) Value: 6
  misc_feature: MA Experiment 20000173 PARAMETER Experiment Name: At_42deg_Heat_P Parameter: Tissue Value: Aerial
  misc_feature: MA Experiment ID: 20001451 Result: Down-regulated in Transcription
  misc_feature: MA Experiment 20001451 PARAMETER Experiment Name: At_Far-red-induction_P Parameter: Age (day) Value: 7
  misc_feature: MA Experiment 20001451 PARAMETER Experiment Name: At_Far-red-induction_P Parameter: Light Value: Far-red vs. White
  misc_feature: MA Experiment 20001451 PARAMETER Experiment Name: At_Far-red-induction_P Parameter: Organism Value: A. thaliana
  misc_feature: MA Experiment 20001451 PARAMETER Experiment Name: At_Far-red-induction_P Parameter: Plant Line Value: Columbia
  misc_feature: MA Experiment 20001451 PARAMETER Experiment Name: At_Far-red-induction_P Parameter: Timepoint (hr) Value: 24
  misc_feature: MA Experiment 20001451 PARAMETER Experiment Name: At_Far-red-induction_P Parameter: Tissue Value: Whole Plant
  misc_feature: MA Experiment ID: 20001560 Result: Down-regulated in Transcription
  misc_feature: MA Experiment 20001560 PARAMETER Experiment Name: At_Drought_Soil_Dry_P Parameter: Age (day) Value: 28
  misc_feature: MA Experiment 20001560 PARAMETER Experiment Name: At_Drought_Soil_Dry_P Parameter: Organism Value: A. thaliana
  misc_feature: MA Experiment 20001560 PARAMETER Experiment Name: At_Drought_Soil_Dry_P Parameter: Plant Line Value: WS
  misc_feature: MA Experiment 20001560 PARAMETER Experiment Name: At_Drought_Soil_Dry_P Parameter: Post Timepoint (hr) Value: None
  misc_feature: MA Experiment 20001560 PARAMETER Experiment Name: At_Drought_Soil_Dry_P Parameter: Post-Treatment Value: None
  misc_feature: MA Experiment 20001560 PARAMETER Experiment Name: At_Drought_Soil_Dry_P Parameter: Timepoint (day) Value: 14
  misc_feature: MA Experiment 20001560 PARAMETER Experiment Name: At_Drought_Soil_Dry_P Parameter: Treatment Value: Drought vs. No Drought
atgtcggaggatgtctggttgacttgcctcactcacgcattatccaccgagaccgaagaaatcatgggtctccttctcggcgacatcgagtactcaaagaacggcgaaagtgccacagctatgatctggggagcatcgcctcagccacgatctgatcggcagaaggatcgagttgaaaccaatcctgaacaattggctgctgcttctgctcaggctgatatatcctttttaatgacgatatcaacgggcagaactacacgggtcattggatggtaccactcccatcctcatattaccgttcttccttcccatgtcgatgttcggacacaagctatgtatcagcttttagattctggttttattggcctcatattttcctgttttagtgaagatgctaacaaggttggtagaatccaagttatcgctttccagtcttctgatggaaagccgaatagtattcctaaatcaatgagcctggttcttgctaataaagattctgtcatcgatatagaatcttcatctagttcttcggactcgatataccagcgatcctcttcttctaagcccgagctagacacaattgatactgctacaacttccggatctaagggtggaggacgggtttcagattttgggcctttctttacaaacaatattgaggccaatatcaccggcagagatgaaactcacaaatcaggcaatctcagcagcacaactataggaattgactcgatggacatgtctgaaagtatgcaagaggcaatgctccgttcaaatttagataccagtggtgcggggtatgttagaaaagaagtcccacttcatgttttgccaacttcatcccttcttccagtcaattcacctttagcatcttttaaaagcctgcaacgagtactgtacgaggaggaacgagcagcgtactaccaatcagtgcagcaaaacatgagcttgagtcctgccattaacgcacttcaagataggcagaaggagaacaagatccggttagcaatgctgatggatgaagctgaggttttggaggcacaaaaacttaaaggagcagagacaagccggagaccatctcatctggttcacggttctggcagccgaagcagaagaggatcgtag

SEQ ID NO: 71862 - protein, 374 aa, Arabidopsis thaliana
  peptide (1)..(374): Ceres Seq. ID no. 4815876
  misc_feature (2)..(119): Pfam Name: Mov34/MPN/PAD-1 family Pfam Description: Mov34/MPN/PAD-1 family
  misc_feature (1)..(374): Homolog of NCBI NO: 7549631 NR Description: unknown protein [Arabidopsis thaliana]
  misc_feature (1)..(315): Homolog of NCBI NO: 30680023 NR Description: expressed protein [Arabidopsis thaliana]
  misc_feature (317)..(374): Homolog of NCBI NO: 30680023 NR Description: expressed protein [Arabidopsis thaliana]
  misc_feature (1)..(315): Homolog of NCBI NO: 19715647 NR Description: AT3g06820/F3E22_4 [Arabidopsis thaliana]
  misc_feature (317)..(374): Homolog of NCBI NO: 19715647 NR Description: AT3g06820/F3E22_4 [Arabidopsis thaliana]
  misc_feature (1)..(314): Homolog of NCBI NO: 20147355 NR Description: At1g80210/F18B13_28 [Arabidopsis thaliana]
  misc_feature (317)..(374): Homolog of NCBI NO: 20147355 NR Description: At1g80210/F18B13_28 [Arabidopsis thaliana]
  misc_feature (107)..(374): Homolog of NCBI NO: 15220090 NR Description: hypothetical protein; protein id: At1g80210.1
  misc_feature (1)..(57): Homolog of NCBI NO: 15220090 NR Description: hypothetical protein; protein id: At1g80210.1
  misc_feature (107)..(374): Homolog of NCBI NO: 25406643 NR Description: hypothetical protein F18B13.28 [imported] - thaliana >gi|5902374|gb|AAD55476.1|AC009322_16 Hypothetical
MSEDVWLTCLTHALSTETEEIMGLLLGDIEYSKNGESATAMIWGASPQPRSDRQKDRVETNPEQLAAASAQADISFLMTISTGRTTRVIGWYHSHPHITVLPSHVDVRTQAMYQLLDSGFIGLIFSCFSEDANKVGRIQVIAFQSSDGKPNSIPKSMSLVLANKDSVIDIESSSSSSDSIYQRSSSSKPELDTIDTATTSGSKGGGRVSDFGPFFTNNIEANITGRDETHKSGNLSSTTIGIDSMDMSESMQEAMLRSNLDTSGAGYVRKEVPLHVLPTSSLLPVNSPLASFKSLQRVLYEEERAAYYQSVQQNMSLSPAINALQDRQKENKIRLAMLMDEAEVLEAQKLKGAETSRRPSHLVHGSGSRSRRGS

SEQ ID NO: 71863 - protein, 353 aa, Arabidopsis thaliana
  peptide (1)..(353): Ceres Seq. ID no. 4815877
  misc_feature (1)..(98): Pfam Name: Mov34/MPN/PAD-1 family Pfam Description: Mov34/MPN/PAD-1 family
  misc_feature (1)..(353): Homolog of NCBI NO: 7549631 NR Description: unknown protein [Arabidopsis thaliana]
  misc_feature (1)..(294): Homolog of NCBI NO: 30680023 NR Description: expressed protein [Arabidopsis thaliana]
  misc_feature (296)..(353): Homolog of NCBI NO: 30680023 NR Description: expressed protein [Arabidopsis thaliana]
  misc_feature (1)..(294): Homolog of NCBI NO: 19715647 NR Description: AT3g06820/F3E22_4 [Arabidopsis thaliana]
  misc_feature (296)..(353): Homolog of NCBI NO: 19715647 NR Description: AT3g06820/F3E22_4 [Arabidopsis thaliana]
  misc_feature (1)..(293): Homolog of NCBI NO: 20147355 NR Description: At1g80210/F18B13_28 [Arabidopsis thaliana]
  misc_feature (296)..(353): Homolog of NCBI NO: 20147355 NR Description: At1g80210/F18B13_28 [Arabidopsis thaliana]
  misc_feature (86)..(353): Homolog of NCBI NO: 15220090 NR Description: hypothetical protein; protein id: At1g80210.1
  misc_feature (1)..(36): Homolog of NCBI NO: 15220090 NR Description: hypothetical protein; protein id: At1g80210.1
  misc_feature (86)..(353): Homolog of NCBI NO: 25406643 NR Description: hypothetical protein F18B13.28 [imported] - thaliana >gi|5902374|gb|AAD55476.1|AC009322_16 Hypothetical
MGLLLGDIEYSKNGESATAMIWGASPQPRSDRQKDRVETNPEQLAAASAQADISFLMTISTGRTTRVIGWYHSHPHITVLPSHVDVRTQAMYQLLDSGFIGLIFSCFSEDANKVGRIQVIAFQSSDGKPNSIPKSMSLVLANKDSVIDIESSSSSSDSIYQRSSSSKPELDTIDTATTSGSKGGGRVSDFGPFFTNNIEANITGRDETHKSGNLSSTTIGIDSMDMSESMQEAMLRSNLDTSGAGYVRKEVPLHVLPTSSLLPVNSPLASFKSLQRVLYEEERAAYYQSVQQNMSLSPAINALQDRQKENKIRLAMLMDEAEVLEAQKLKGAETSRRPSHLVHGSGSRSRRGS

SEQ ID NO: 71864 - protein, 334 aa, Arabidopsis thaliana
  peptide (1)..(334): Ceres Seq. ID no. 4815878
  misc_feature (1)..(79): Pfam Name: Mov34/MPN/PAD-1 family Pfam Description: Mov34/MPN/PAD-1 family
  misc_feature (1)..(334): Homolog of NCBI NO: 7549631 NR Description: unknown protein [Arabidopsis thaliana]
  misc_feature (1)..(275): Homolog of NCBI NO: 30680023 NR Description: expressed protein [Arabidopsis thaliana]
  misc_feature (277)..(334): Homolog of NCBI NO: 30680023 NR Description: expressed protein [Arabidopsis thaliana]
  misc_feature (1)..(275): Homolog of NCBI NO: 19715647 NR Description: AT3g06820/F3E22_4 [Arabidopsis thaliana]
  misc_feature (277)..(334): Homolog of NCBI NO: 19715647 NR Description: AT3g06820/F3E22_4 [Arabidopsis thaliana]
  misc_feature (1)..(274): Homolog of NCBI NO: 20147355 NR Description: At1g80210/F18B13_28 [Arabidopsis thaliana]
  misc_feature (277)..(334): Homolog of NCBI NO: 20147355 NR Description: At1g80210/F18B13_28 [Arabidopsis thaliana]
  misc_feature (67)..(334): Homolog of NCBI NO: 15220090 NR Description: hypothetical protein; protein id: At1g80210.1
  misc_feature (1)..(17): Homolog of NCBI NO: 15220090 NR Description: hypothetical protein; protein id: At1g80210.1
  misc_feature (67)..(334): Homolog of NCBI NO: 25406643 NR Description: hypothetical protein F18B13.28 [imported] - thaliana >gi|5902374|gb|AAD55476.1|AC009322_16 Hypothetical
MIWGASPQPRSDRQKDRVETNPEQLAAASAQADISFLMTISTGRTTRVIGWYHSHPHITVLPSHVDVRTQAMYQLLDSGFIGLIFSCFSEDANKVGRIQVIAFQSSDGKPNSIPKSMSLVLANKDSVIDIESSSSSSDSIYQRSSSSKPELDTIDTATTSGSKGGGRVSDFGPFFTNNIEANITGRDETHKSGNLSSTTIGIDSMDMSESMQEAMLRSNLDTSGAGYVRKEVPLHVLPTSSLLPVNSPLASFKSLQRVLYEEERAAYYQSVQQNMSLSPAINALQDRQKENKIRLAMLMDEAEVLEAQKLKGAETSRRPSHLVHGSGSRSRRGS

SEQ ID NO: 71865 - DNA, 1317 bp, Arabidopsis thaliana
  misc_feature (1)..(1317): Ceres Seq. ID no. 4815930
  misc_feature: MA Experiment ID: 20001451 Result: Down-regulated in Transcription
  misc_feature: MA Experiment 20001451 PARAMETER Experiment Name: At_Far-red-induction_P Parameter: Age (day) Value: 7
  misc_feature: MA Experiment 20001451 PARAMETER Experiment Name: At_Far-red-induction_P Parameter: Light Value: Far-red vs. White
  misc_feature: MA Experiment 20001451 PARAMETER Experiment Name: At_Far-red-induction_P Parameter: Organism Value: A. thaliana
  misc_feature: MA Experiment 20001451 PARAMETER Experiment Name: At_Far-red-induction_P Parameter: Plant Line Value: Columbia
  misc_feature: MA Experiment 20001451 PARAMETER Experiment Name: At_Far-red-induction_P Parameter: Timepoint (hr) Value: 24
  misc_feature: MA Experiment 20001451 PARAMETER Experiment Name: At_Far-red-induction_P Parameter: Tissue Value: Whole Plant
atgacacttgctagcgattttggttttccatccgctatatcttcatcttttacaattctagaagagagataccacaataactttcctaacactttgtgtgtttcatcaggacaggaatcgatgaataacaaccccgtcccctgtcaggtgtttcctctggtctctggtggtagttctggtgggaatttgttttcatcttcttccggattctgcaatggtgtctatgtttcatcttcctcccaggcacggccatctgtttctaccgtgccaagagacagaattactgttgctcacgtctctggtgaagggcagaggcaggaatgccctgtggaaacacattccttgcaattgatcaatcaacctcaagaacagaaaattatgacttggtcttcagaccagattcggggcttcttcgattttcctgttccagatccacaagcagcgagcagcagaactatggtttcatccaaggaagtgctttcaaaatgcgaatggccagactgggcggatcagttgatctctgatgatagtcttgaaccaaattggtcggagcttctaggtgatcctaatgtactcaatctatattcaaaggttcaaacacagtcttctgatatagcaaggcaagagatcgtctttagaaatcagcatcaggtggatccatcaatggagccgtttaatgccaaaagcccaccagctagttcaatgacatctaagcaaagaatgcgttggacaccagaacttcatgaagcatttgtcgaagctatcaatcagctcggtggtagtgaacgagccacccctaaggctgttttgaagctcatcaatagccctgggttgaccgtttatcatgtcaaaagccatttgcagaaatacagaactgcaaggtataaaccagagctttccaaagatacagtaaagaatttgaaaaccattgaagatatcaaatctcttgacttgaagacgagcattgaaatcactgaagctctccggttacagatgaaagttcaaaaacaactccacgagcaacttgagatccaaagatcactgcagttacaaatcgaagaacaaggtcggtatcttcagatgatgattgagaaacaacagaagatgcaagagaacaaaaaagactctacttcctcatcatcaatgccagaagctgacccttcagctccatcaccaaacctttcacaacctttcctccataaagcaaccaattcagaaccatcaataactcagaaactgcagaatggttctagcacaatggatcaaagtgaatctacttctgggactagtaatagaaaacgggttagagaagattag

SEQ ID NO: 71866 - protein, 438 aa, Arabidopsis thaliana
  peptide (1)..(438): Ceres Seq. ID no. 4815931
  misc_feature (240)..(291): Pfam Name: Myb-like DNA-binding domain Pfam Description: Myb-like DNA-binding domain
  misc_feature (1)..(438): Homolog of NCBI NO: 15229298 NR Description: transfactor, putative; protein id: At3g04450.1 thaliana] >gi|7547104|gb|AAF63776.1| transfactor, putative
  misc_feature (41)..(438): Homolog of NCBI NO: 26452281 NR Description: putative transfactor [Arabidopsis thaliana]
  misc_feature (1)..(380): Homolog of NCBI NO: 30692110 NR Description: expressed protein [Arabidopsis thaliana]
  misc_feature (1)..(380): Homolog of NCBI NO: 21537366 NR Description: transfactor, putative [Arabidopsis thaliana]
  misc_feature (36)..(380): Homolog of NCBI NO: 21954075 NR Description: unknown protein [Arabidopsis thaliana]
  misc_feature (43)..(380): Homolog of NCBI NO: 30692105 NR Description: expressed protein [Arabidopsis thaliana]
  misc_feature (29)..(438): Homolog of NCBI NO: 6942190 NR Description: CDPK substrate protein 1; CSP1 [Mesembryanthemum
  misc_feature (62)..(381): Homolog of NCBI NO: 22329004 NR Description: putative protein; protein id: At4g28610.1, by cDNA: gi_19698886 [Arabidopsis thaliana]
  misc_feature (62)..(381): Homolog of NCBI NO: 7487685 NR Description: hypothetical protein T5F17.60 - Arabidopsis >gi|7269716|emb|CAB81449.1| putative protein [Arabidopsis
  misc_feature (175)..(438): Homolog of NCBI NO: 4519671 NR Description: transfactor [Nicotiana tabacum]
MTLASDFGFPSAISSSFTILEERYHNNFPNTLCVSSGQESMNNNPVPCQVFPLVSGGSSGGNLFSSSSGFCNGVYVSSSSQARPSVSTVPRDRITVAHVSGEGQRQECPVETHSLQLINQPQEQKIMTWSSDQIRGFFDFPVPDPQAASSRTMVSSKEVLSKCEWPDWADQLISDDSLEPNWSELLGDPNVLNLYSKVQTQSSDIARQEIVFRNQHQVDPSMEPFNAKSPPASSMTSKQRMRWTPELHEAFVEAINQLGGSERATPKAVLKLINSPGLTVYHVKSHLQKYRTARYKPELSKDTVKNLKTIEDIKSLDLKTSIEITEALRLQMKVQKQLHEQLEIQRSLQLQIEEQGRYLQMMIEKQQKMQENKKDSTSSSSMPEADPSAPSPNLSQPFLHKATNSEPSITQKLQNGSSTMDQSESTSGTSNRKRVRED

SEQ ID NO: 71867 - protein, 398 aa, Arabidopsis thaliana
  peptide (1)..(398): Ceres Seq. ID no. 4815932
  misc_feature (200)..(251): Pfam Name: Myb-like DNA-binding domain Pfam Description: Myb-like DNA-binding domain
  misc_feature (1)..(398): Homolog of NCBI NO: 15229298 NR Description: transfactor, putative; protein id: At3g04450.1 thaliana] >gi|7547104|gb|AAF63776.1| transfactor, putative
  misc_feature (1)..(398): Homolog of NCBI NO: 26452281 NR Description: putative transfactor [Arabidopsis thaliana]
  misc_feature (1)..(340): Homolog of NCBI NO: 30692110 NR Description: expressed protein [Arabidopsis thaliana]
  misc_feature (1)..(340): Homolog of NCBI NO: 21537366 NR Description: transfactor, putative [Arabidopsis thaliana]
  misc_feature (1)..(340): Homolog of NCBI NO: 21954075 NR Description: unknown protein [Arabidopsis thaliana]
  misc_feature (3)..(340): Homolog of NCBI NO: 30692105 NR Description: expressed protein [Arabidopsis thaliana]
  misc_feature (1)..(398): Homolog of NCBI NO: 6942190 NR Description: CDPK substrate protein 1; CSP1 [Mesembryanthemum
  misc_feature (22)..(341): Homolog of NCBI NO: 22329004 NR Description: putative protein; protein id: At4g28610.1, by cDNA: gi_19698886 [Arabidopsis thaliana]
  misc_feature (22)..(341): Homolog of NCBI NO: 7487685 NR Description: hypothetical protein T5F17.60 - Arabidopsis >gi|7269716|emb|CAB81449.1| putative protein [Arabidopsis
  misc_feature (135)..(398): Homolog of NCBI NO: 4519671 NR Description: transfactor [Nicotiana tabacum]
MNNNPVPCQVFPLVSGGSSGGNLFSSSSGFCNGVYVSSSSQARPSVSTVPRDRITVAHVSGEGQRQECPVETHSLQLINQPQEQKIMTWSSDQIRGFFDFPVPDPQAASSRTMVSSKEVLSKCEWPDWADQLISDDSLEPNWSELLGDPNVLNLYSKVQTQSSDIARQEIVFRNQHQVDPSMEPFNAKSPPASSMTSKQRMRWTPELHEAFVEAINQLGGSERATPKAVLKLINSPGLTVYHVKSHLQKYRTARYKPELSKDTVKNLKTIEDIKSLDLKTSIEITEALRLQMKVQKQLHEQLEIQRSLQLQIEEQGRYLQMMIEKQQKMQENKKDSTSSSSMPEADPSAPSPNLSQPFLHKATNSEPSITQKLQNGSSTMDQSESTSGTSNRKRVRED

SEQ ID NO: 71868 - protein, 312 aa, Arabidopsis thaliana
  peptide (1)..(312): Ceres Seq. ID no. 4815933
  misc_feature (114)..(165): Pfam Name: Myb-like DNA-binding domain Pfam Description: Myb-like DNA-binding domain
  misc_feature (1)..(312): Homolog of NCBI NO: 15229298 NR Description: transfactor, putative; protein id: At3g04450.1 thaliana] >gi|7547104|gb|AAF63776.1| transfactor, putative
  misc_feature (1)..(312): Homolog of NCBI NO: 26452281 NR Description: putative transfactor [Arabidopsis thaliana]
  misc_feature (1)..(254): Homolog of NCBI NO: 30692110 NR Description: expressed protein [Arabidopsis thaliana]
  misc_feature (1)..(254): Homolog of NCBI NO: 21537366 NR Description: transfactor, putative [Arabidopsis thaliana]
  misc_feature (1)..(254): Homolog of NCBI NO: 21954075 NR Description: unknown protein [Arabidopsis thaliana]
  misc_feature (1)..(254): Homolog of NCBI NO: 30692105 NR Description: expressed protein [Arabidopsis thaliana]
  misc_feature (1)..(312): Homolog of NCBI NO: 6942190 NR Description: CDPK substrate protein 1; CSP1 [Mesembryanthemum
  misc_feature (1)..(255): Homolog of NCBI NO: 22329004 NR Description: putative protein; protein id: At4g28610.1, by cDNA: gi_19698886 [Arabidopsis thaliana]
  misc_feature (1)..(255): Homolog of NCBI NO: 7487685 NR Description: hypothetical protein T5F17.60 - Arabidopsis >gi|7269716|emb|CAB81449.1| putative protein [Arabidopsis
  misc_feature (49)..(312): Homolog of NCBI NO: 4519671 NR Description: transfactor [Nicotiana tabacum]
MTWSSDQIRGFFDFPVPDPQAASSRTMVSSKEVLSKCEWPDWADQLISDDSLEPNWSELLGDPNVLNLYSKVQTQSSDIARQEIVFRNQHQVDPSMEPFNAKSPPASSMTSKQRMRWTPELHEAFVEAINQLGGSERATPKAVLKLINSPGLTVYHVKSHLQKYRTARYKPELSKDTVKNLKTIEDIKSLDLKTSIEITEALRLQMKVQKQLHEQLEIQRSLQLQIEEQGRYLQMMIEKQQKMQENKKDSTSSSSMPEADPSAPSPNLSQPFLHKATNSEPSITQKLQNGSSTMDQSESTSGTSNRKRVRED

SEQ ID NO: 71869 - DNA, 1626 bp, Arabidopsis thaliana
  misc_feature (1)..(1626): Ceres Seq. ID no. 4816070
  misc_feature: MA Experiment ID: 20000179 Result: Down-regulated in Transcription
  misc_feature: MA Experiment 20000179 PARAMETER Experiment Name: At_Germinating_Seeds_P Parameter: Age (hr) Value: 6 vs. 0
  misc_feature: MA Experiment 20000179 PARAMETER Experiment Name: At_Germinating_Seeds_P Parameter: Tissue Value: Germinating Seeds
  misc_feature: MA Experiment ID: 20000180 Result: Down-regulated in Transcription
  misc_feature: MA Experiment 20000180 PARAMETER Experiment Name: At_Germinating_Seeds_P Parameter: Age (hr) Value: 24 vs. 0
  misc_feature: MA Experiment 20000180 PARAMETER Experiment Name: At_Germinating_Seeds_P Parameter: Tissue Value: Germinating Seeds
  misc_feature: MA Experiment ID: 20000184 Result: Down-regulated in Transcription
  misc_feature: MA Experiment 20000184 PARAMETER Experiment Name: At_Shoots__P Parameter: Age (day) Value: 7
  misc_feature: MA Experiment 20000184 PARAMETER Experiment Name: At_Shoots__P Parameter: Tissue Value: Shoots vs. Whole Plant
  misc_feature: MA Experiment ID: 20000227 Result: Up-regulated in Transcription
  misc_feature: MA Experiment 20000227 PARAMETER Experiment Name: At_Root-Tips-vs-Tops_P Parameter: Tissue Value: Root Tips vs. Root Tops
  misc_feature: MA Experiment ID: 20001247 Result: Down-regulated in Transcription
  misc_feature: MA Experiment 20001247 PARAMETER Experiment Name: At_Far-red-induction_P Parameter: Age (day) Value: 7
  misc_feature: MA Experiment 20001247 PARAMETER Experiment Name: At_Far-red-induction_P Parameter: Light Value: Far-red vs. White
  misc_feature: MA Experiment 20001247 PARAMETER Experiment Name: At_Far-red-induction_P Parameter: Organism Value: A. thaliana
  misc_feature: MA Experiment 20001247 PARAMETER Experiment Name: At_Far-red-induction_P Parameter: Plant Line Value: Columbia
  misc_feature: MA Experiment 20001247 PARAMETER Experiment Name: At_Far-red-induction_P Parameter: Timepoint (hr) Value: 1
  misc_feature: MA Experiment 20001247 PARAMETER Experiment Name: At_Far-red-induction_P Parameter: Tissue Value: Whole Plant
  misc_feature: MA Experiment ID: 20001557 Result: Up-regulated in Transcription
  misc_feature: MA Experiment 20001557 PARAMETER Experiment Name: At_Drought_Soil_Dry_P Parameter: Age (day) Value: 27
  misc_feature: MA Experiment 20001557 PARAMETER Experiment Name: At_Drought_Soil_Dry_P Parameter: Organism Value: A. thaliana
  misc_feature: MA Experiment 20001557 PARAMETER Experiment Name: At_Drought_Soil_Dry_P Parameter: Plant Line Value: WS
  misc_feature: MA Experiment 20001557 PARAMETER Experiment Name: At_Drought_Soil_Dry_P Parameter: Post Timepoint (hr) Value: 3
  misc_feature: MA Experiment 20001557 PARAMETER Experiment Name: At_Drought_Soil_Dry_P Parameter: Post-Treatment Value: Re-Water vs. No Drought
  misc_feature: MA Experiment 20001557 PARAMETER Experiment Name: At_Drought_Soil_Dry_P Parameter: Timepoint (day) Value: 13
  misc_feature: MA Experiment 20001557 PARAMETER Experiment Name: At_Drought_Soil_Dry_P Parameter: Treatment Value: Drought vs. No Drought
  misc_feature: MA Experiment ID: 20001558 Result: Up-regulated in Transcription
  misc_feature: MA Experiment 20001558 PARAMETER Experiment Name: At_Drought_Soil_Dry_P Parameter: Age (day) Value: 27
  misc_feature: MA Experiment 20001558 PARAMETER Experiment Name: At_Drought_Soil_Dry_P Parameter: Organism Value: A. thaliana
  misc_feature: MA Experiment 20001558 PARAMETER Experiment Name: At_Drought_Soil_Dry_P Parameter: Plant Line Value: WS
  misc_feature: MA Experiment 20001558 PARAMETER Experiment Name: At_Drought_Soil_Dry_P Parameter: Post Timepoint (hr) Value: 6
  misc_feature: MA Experiment 20001558 PARAMETER Experiment Name: At_Drought_Soil_Dry_P Parameter: Post-Treatment Value: Re-Water vs. No Drought
  misc_feature: MA Experiment 20001558 PARAMETER Experiment Name: At_Drought_Soil_Dry_P Parameter: Timepoint (day) Value: 13
  misc_feature: MA Experiment 20001558 PARAMETER Experiment Name: At_Drought_Soil_Dry_P Parameter: Treatment Value: Drought vs. No Drought
  misc_feature: MA Experiment ID: 20001560 Result: Up-regulated in Transcription
  misc_feature: MA Experiment 20001560 PARAMETER Experiment Name: At_Drought_Soil_Dry_P Parameter: Age (day) Value: 28
  misc_feature: MA Experiment 20001560 PARAMETER Experiment Name: At_Drought_Soil_Dry_P Parameter: Organism Value: A. thaliana
  misc_feature: MA Experiment 20001560 PARAMETER Experiment Name: At_Drought_Soil_Dry_P Parameter: Plant Line Value: WS
  misc_feature: MA Experiment 20001560 PARAMETER Experiment Name: At_Drought_Soil_Dry_P Parameter: Post Timepoint (hr) Value: None
  misc_feature: MA Experiment 20001560 PARAMETER Experiment Name: At_Drought_Soil_Dry_P Parameter: Post-Treatment Value: None
  misc_feature: MA Experiment 20001560 PARAMETER Experiment Name: At_Drought_Soil_Dry_P Parameter: Timepoint (day) Value: 14
  misc_feature: MA Experiment 20001560 PARAMETER Experiment Name: At_Drought_Soil_Dry_P Parameter: Treatment Value: Drought vs. No Drought
atggagaaaagctcatattttctgtttggtggaacaaacttcaataagaagaagtttgctcctgattttgctaaattcaagaattctacggaggatgatgattccaataagaaagtgaacttctttgtggaagaagaagaggacactgaacagccggaggcggagaaagttattgtgtcctctaagaagaggaaacgaagatcttctaattctgtgccagttgaaggattcgatgtgttcaagagctcaaagaaggcacgtgctaaaggtaaagcagaagaacaaatcacaaagaatgagattgtagagaatcccaagaaggaacttaatcgtcaaatggagcgagatgctttgtcgaggaaacagtacagcattcatgtttccggtaacaatattccaccgccgcttaaaagtttcgcagagttgtcatccaggtatggctgtgaaggatacatattacgcaatttggctgaactaggatttaaagagcctaccccaatccaaagacaggctattccaattctcctatcgggtcgtgaatgctttgcctgtgctccgactgggtcaggaaaaacctttgcttttatttgtcccatgcttataaaactcaagcgcccttcaactgatggaataagagctgttatcctttctcctgctcgggaactggctgcccaaacagctagagaaggaaagaaacttattaaaggaagcaatttccacattagattgatgactaaaccccttgtcaaaacagctgacttctcaaagctgtggtgtgatgttctcatatcaacgccgatgcggttgaaaagagcaatcaaggctaaaaagattgacttaagcaaggtcgagtaccttgtccttgatgaatctgacaagctgtttgagcagagcttgttaaagcagatagattgtgtggttaaggcttgttcaaatccttcgatcatacgttcattgttcagtgctactttgcccgattctgttgaagaacttgcacgttccataatgcatgatgctgttcgtgttatcattggccgaaaaaacacagcatctgaaaccgtcaagcaaaagctggtttttgctggaagtgaagaagggaaacttcttgctcttcgccaaagctttgcagagagtctgaatccaccggtactgatctttgtacaaagcaaagaacgagcaaaagaactctatgatgaactgaaatgtgaaaacatcagagccggagtcatccattccgatctccctccgggagagcgggaaaatgcagttgatcaattcagagcgggagaaaaatgggttttgatagccactgatgtgattgccagaggtatggatttcaaaggcatcaactgcgtgataaactatgatttcccggattcagcttctgcatacatccacaggattggacggtctgggagagcgggaaggagcggagaagcgataactttctacacggaacaagatgtgcctttcctaaggaacatagccaacacaatgatgtcatcaggctgtgaggttccatcgtggatcatgtctttgaagaagaagaaatggaggaagcataggccgagacgtgattctatatctactaaaccaaaagccgataaaaacgatacagatgagtaa

SEQ ID NO: 71870 - protein, 541 aa, Arabidopsis thaliana
  peptide (1)..(541): Ceres Seq. ID no. 4816071
  misc_feature (154)..(357): Pfam Name: DEAD/DEAH box helicase Pfam Description: DEAD/DEAH box helicase
  misc_feature (1)..(541): Homolog of NCBI NO: 22330935 NR Description: DEAD/DEAH box RNA helicase protein, putative; id: At3g09720.1 [Arabidopsis thaliana]
  misc_feature (1)..(541): Homolog of NCBI NO: 6682259 NR Description: putative RNA helicase [Arabidopsis thaliana]
  misc_feature (1)..(535): Homolog of NCBI NO: 34898932 NR Description: putative ATP-dependent RNA helicase [Oryza sativa
  misc_feature (13)..(539): Homolog of NCBI NO: 28829300 NR Description: similar to Rattus norvegicus (Rat). ROK1-like
  misc_feature (22)..(533): Homolog of NCBI NO: 16758984 NR Description: ATP-dependent, RNA helicase [Rattus norvegicus]
  misc_feature (22)..(533): Homolog of NCBI NO: 26348749 NR Description: unnamed protein product [Mus musculus]
  misc_feature (22)..(533): Homolog of NCBI NO: 33859746 NR Description: DEAD (Asp-Glu-Ala-Asp) box polypeptide 52; DEAD/H
  misc_feature (4)..(533): Homolog of NCBI NO: 38569505 NR Description: ATP-dependent RNA helicase ROK1 isoform a;
  misc_feature (4)..(533): Homolog of NCBI NO: 34582345 NR Description: DEAD-box protein 52 (Putative ATP-dependent RNA
  misc_feature (89)..(533): Homolog of NCBI NO: 38569503 NR Description: ATP-dependent RNA helicase ROK1 isoform b;
MEKSSYFLFGGTNFNKKKFAPDFAKFKNSTEDDDSNKKVNFFVEEEEDTEQPEAEKVIVSSKKRKRRSSNSVPVEGFDVFKSSKKARAKGKAEEQITKNEIVENPKKELNRQMERDALSRKQYSIHVSGNNIPPPLKSFAELSSRYGCEGYILRNLAELGFKEPTPIQRQAIPILLSGRECFACAPTGSGKTFAFICPMLIKLKRPSTDGIRAVILSPARELAAQTAREGKKLIKGSNFHIRLMTKPLVKTADFSKLWCDVLISTPMRLKRAIKAKKIDLSKVEYLVLDESDKLFEQSLLKQIDCVVKACSNPSIIRSLFSATLPDSVEELARSIMHDAVRVIIGRKNTASETVKQKLVFAGSEEGKLLALRQSFAESLNPPVLIFVQSKERAKELYDELKCENIRAGVIHSDLPPGERENAVDQFRAGEKWVLIATDVIARGMDFKGINCVINYDFPDSASAYIHRIGRSGRAGRSGEAITFYTEQDVPFLRNIANTMMSSGCEVPSWIMSLKKKKWRKHRPRRDSISTKPKADKNDTDE

SEQ ID NO: 71871 - protein, 429 aa, Arabidopsis thaliana
  peptide (1)..(429): Ceres Seq. ID no. 4816072
  misc_feature (42)..(245): Pfam Name: DEAD/DEAH box helicase Pfam Description: DEAD/DEAH box helicase
  misc_feature (1)..(429): Homolog of NCBI NO: 22330935 NR Description: DEAD/DEAH box RNA helicase protein, putative; id: At3g09720.1 [Arabidopsis thaliana]
  misc_feature (1)..(429): Homolog of NCBI NO: 6682259 NR Description: putative RNA helicase [Arabidopsis thaliana]
  misc_feature (1)..(423): Homolog of NCBI NO: 34898932 NR Description: putative ATP-dependent RNA helicase [Oryza sativa
  misc_feature (1)..(427): Homolog of NCBI NO: 28829300 NR Description: similar to Rattus norvegicus (Rat). ROK1-like
  misc_feature (1)..(421): Homolog of NCBI NO: 16758984 NR Description: ATP-dependent, RNA helicase [Rattus norvegicus]
  misc_feature (1)..(421): Homolog of NCBI NO: 26348749 NR Description: unnamed protein product [Mus musculus]
  misc_feature (1)..(421): Homolog of NCBI NO: 33859746 NR Description: DEAD (Asp-Glu-Ala-Asp) box polypeptide 52; DEAD/H
  misc_feature (1)..(421): Homolog of NCBI NO: 38569505 NR Description: ATP-dependent RNA helicase ROK1 isoform a;
  misc_feature (1)..(421): Homolog of NCBI NO: 34582345 NR Description: DEAD-box protein 52 (Putative ATP-dependent RNA
  misc_feature (1)..(421): Homolog of NCBI NO: 38569503 NR Description: ATP-dependent RNA helicase ROK1 isoform b;
MERDALSRKQYSIHVSGNNIPPPLKSFAELSSRYGCEGYILRNLAELGFKEPTPIQRQAIPILLSGRECFACAPTGSGKTFAFICPMLIKLKRPSTDGIRAVILSPARELAAQTAREGKKLIKGSNFHIRLMTKPLVKTADFSKLWCDVLISTPMRLKRAIKAKKIDLSKVEYLVLDESDKLFEQSLLKQIDCVVKACSNPSIIRSLFSATLPDSVEELARSIMHDAVRVIIGRKNTASETVKQKLVFAGSEEGKLLALRQSFAESLNPPVLIFVQSKERAKELYDELKCENIRAGVIHSDLPPGERENAVDQFRAGEKWVLIATDVIARGMDFKGINCVINYDFPDSASAYIHRIGRSGRAGRSGEAITFYTEQDVPFLRNIANTMMSSGCEVPSWIMSLKKKKWRKHRPRRDSISTKPKADKNDTDE

SEQ ID NO: 71872 - protein, 343 aa, Arabidopsis thaliana
  peptide (1)..(343): Ceres Seq. ID no. 4816073
  misc_feature (1)..(159): Pfam Name: DEAD/DEAH box helicase Pfam Description: DEAD/DEAH box helicase
  misc_feature (1)..(343): Homolog of NCBI NO: 22330935 NR Description: DEAD/DEAH box RNA helicase protein, putative; id: At3g09720.1 [Arabidopsis thaliana]
  misc_feature (1)..(343): Homolog of NCBI NO: 6682259 NR Description: putative RNA helicase [Arabidopsis thaliana]
  misc_feature (1)..(337): Homolog of NCBI NO: 34898932 NR Description: putative ATP-dependent RNA helicase [Oryza sativa
  misc_feature (1)..(341): Homolog of NCBI NO: 28829300 NR Description: similar to Rattus norvegicus (Rat). ROK1-like
  misc_feature (1)..(335): Homolog of NCBI NO: 16758984 NR Description: ATP-dependent, RNA helicase [Rattus norvegicus]
  misc_feature (1)..(335): Homolog of NCBI NO: 26348749 NR Description: unnamed protein product [Mus musculus]
  misc_feature (1)..(335): Homolog of NCBI NO: 33859746 NR Description: DEAD (Asp-Glu-Ala-Asp) box polypeptide 52; DEAD/H
  misc_feature (1)..(335): Homolog of NCBI NO: 38569505 NR Description: ATP-dependent RNA helicase ROK1 isoform a;
  misc_feature (1)..(335): Homolog of NCBI NO: 34582345 NR Description: DEAD-box protein 52 (Putative ATP-dependent RNA
  misc_feature (1)..(335): Homolog of NCBI NO: 38569503 NR Description: ATP-dependent RNA helicase ROK1 isoform b;
MLIKLKRPSTDGIRAVILSPARELAAQTAREGKKLIKGSNFHIRLMTKPLVKTADFSKLWCDVLISTPMRLKRAIKAKKIDLSKVEYLVLDESDKLFEQSLLKQIDCVVKACSNPSIIRSLFSATLPDSVEELARSIMHDAVRVIIGRKNTASETVKQKLVFAGSEEGKLLALRQSFAESLNPPVLIFVQSKERAKELYDELKCENIRAGVIHSDLPPGERENAVDQFRAGEKWVLIATDVIARGMDFKGINCVINYDFPDSASAYIHRIGRSGRAGRSGEAITFYTEQDVPFLRNIANTMMSSGCEVPSWIMSLKKKKWRKHRPRRDSISTKPKADKNDTDE

SEQ ID NO: 71873 - DNA, 702 bp, Arabidopsis thaliana
  misc_feature (1)..(702): Ceres Seq. ID no. 4816221
  misc_feature: MA Experiment ID: 20000179 Result: Down-regulated in Transcription
  misc_feature: MA Experiment 20000179 PARAMETER Experiment Name: At_Germinating_Seeds_P Parameter: Age (hr) Value: 6 vs. 0
  misc_feature: MA Experiment 20000179 PARAMETER Experiment Name: At_Germinating_Seeds_P Parameter: Tissue Value: Germinating Seeds
  misc_feature: MA Experiment ID: 20000180 Result: Down-regulated in Transcription
  misc_feature: MA Experiment 20000180 PARAMETER Experiment Name: At_Germinating_Seeds_P Parameter: Age (hr) Value: 24 vs. 0
  misc_feature: MA Experiment 20000180 PARAMETER Experiment Name: At_Germinating_Seeds_P Parameter: Tissue Value: Germinating Seeds
  misc_feature: MA Experiment ID: 20000264 Result: Up-regulated in Transcription
  misc_feature: MA Experiment 20000264 PARAMETER Experiment Name: At_Open_Flower_P Parameter: Age (day) Value: 21
  misc_feature: MA Experiment 20000264 PARAMETER Experiment Name: At_Open_Flower_P Parameter: Plant Line Value: WS
  misc_feature: MA Experiment 20000264 PARAMETER Experiment Name: At_Open_Flower_P Parameter: Tissue Value: Open Flower vs. Whole Plant
  misc_feature: MA Experiment ID: 20000286 Result: Up-regulated in Transcription
  misc_feature: MA Experiment 20000286 PARAMETER Experiment Name: At_Open_Flower_P Parameter: Age (day) Value: 21
  misc_feature: MA Experiment 20000286 PARAMETER Experiment Name: At_Open_Flower_P Parameter: Plant Line Value: WS
  misc_feature: MA Experiment 20000286 PARAMETER Experiment Name: At_Open_Flower_P Parameter: Tissue Value: Half Open vs. Whole Plant
atgtcaatcccaccatcttcaggttcttcttcttcatcttcctcgtctcagtacacatacgcagctaattcttactattccgctccgtatcagcctccacagccttacgcggcggcgccttcgcctgctgtaccggcgcctgtggcatccattcccggagctacggtctatcctcagcctgttggaccggttcctgccgtctacgcttaccctcagtaccaacaggcacatcaattgttccaaagagatgcacagacaattacaccagaagctcttgagaatgtaaaagctgctttggcaagtagtgaaaccgaacacaaagcagaaactaaaaagagagccattcctcgtaaagctgctggacagtcttgggaggatcctactctttcagaatggccagaaaatgactatcgtctgttctgtggtgatcttgggaacgaagtgaatgatgatgttctttccaaagcatttgctagattccccaccttcaatatggccaaggtcattagagataagcggactggtaaaaccaagggttatgggtttgtgagtttcttaaatcctgcggatctagcagcagccttaaaagaaatgaatggtaagtatgttggaaatcgtccgataaaactacgaaagagtagctggaaagagagaacagatcaggaggctgctgaaagacaaaaggcaacatcacagcaataa

SEQ ID NO: 71874 - protein, 233 aa, Arabidopsis thaliana
  peptide (1)..(233): Ceres Seq. ID no. 4816222
  misc_feature (139)..(210): Pfam Name: RNA recognition motif. (a.k.a. RRM, RBD, or RNP domain) Pfam Description: RNA recognition motif. (a.k.a. RRM, RBD, or RNP
  misc_feature (1)..(233): Homolog of NCBI NO: 15229308 NR Description: RRM-containing protein; protein id: At3g04500.1 thaliana] >gi|7547109|gb|AAF63781.1| unknown protein [Arabidopsis >gi|26451670|dbj|BAC42931.1| unknown protein [Arabidopsis protein
  misc_feature (91)..(228): Homolog of NCBI NO: 2098575 NR Description: F25451_2 [Homo sapiens]
  misc_feature (91)..(228): Homolog of NCBI NO: 12804031 NR Description: Unknown (protein for MGC:10433) [Homo sapiens]
  misc_feature (91)..(228): Homolog of NCBI NO: 19526864 NR Description: RIKEN cDNA 3100004P22 [Mus musculus] Similar to hypothetical protein MGC10433 [Mus musculus] Unknown (protein for MGC:19415) [Mus musculus]
  misc_feature (91)..(228): Homolog of NCBI NO: 21594922 NR Description: hypothetical protein MGC10433 [Homo sapiens]
  misc_feature (91)..(228): Homolog of NCBI NO: 21359951 NR Description: hypothetical protein MGC10433 [Homo sapiens]
  misc_feature (91)..(228): Homolog of NCBI NO: 34855705 NR Description: similar to RIKEN cDNA 3100004P22 [Rattus
  misc_feature (30)..(228): Homolog of NCBI NO: 17556216 NR Description: RNA recognition motif containing protein elegans] >gi|7332094|gb|AAF60781.1| Hypothetical protein Y54H5A.3
  misc_feature (29)..(228): Homolog of NCBI NO: 39582665 NR Description: Hypothetical protein CBG21313 [Caenorhabditis
  misc_feature (1)..(228): Homolog of NCBI NO: 21357051 NR Description: CG2931-PA [Drosophila melanogaster]
MSIPPSSGSSSSSSSSQYTYAANSYYSAPYQPPQPYAAAPSPAVPAPVASIPGATVYPQPVGPVPAVYAYPQYQQAHQLFQRDAQTITPEALENVKAALASSETEHKAETKKRAIPRKAAGQSWEDPTLSEWPENDYRLFCGDLGNEVNDDVLSKAFARFPTFNMAKVIRDKRTGKTKGYGFVSFLNPADLAAALKEMNGKYVGNRPIKLRKSSWKERTDQEAAERQKATSQQ

SEQ ID NO: 71875 - DNA, 2085 bp, Arabidopsis thaliana
  misc_feature (1)..(2085): Ceres Seq. ID no. 4816279
  misc_feature: MA Experiment ID: 20000173 Result: Down-regulated in Transcription
  misc_feature: MA Experiment 20000173 PARAMETER Experiment Name: At_42deg_Heat_P Parameter: Age (day) Value: 14
  misc_feature: MA Experiment 20000173 PARAMETER Experiment Name: At_42deg_Heat_P Parameter: Organism Value: A. thaliana
  misc_feature: MA Experiment 20000173 PARAMETER Experiment Name: At_42deg_Heat_P Parameter: Plant Line Value: WS
  misc_feature: MA Experiment 20000173 PARAMETER Experiment Name: At_42deg_Heat_P Parameter: Temperature (deg C) Value: 42 vs. 22
  misc_feature: MA Experiment 20000173 PARAMETER Experiment Name: At_42deg_Heat_P Parameter: Timepoint (hr) Value: 6
  misc_feature: MA Experiment 20000173 PARAMETER Experiment Name: At_42deg_Heat_P Parameter: Tissue Value: Aerial
  misc_feature: MA Experiment ID: 20000180 Result: Up-regulated in Transcription
  misc_feature: MA Experiment 20000180 PARAMETER Experiment Name: At_Germinating_Seeds_P Parameter: Age (hr) Value: 24 vs. 0
  misc_feature: MA Experiment 20000180 PARAMETER Experiment Name: At_Germinating_Seeds_P Parameter: Tissue Value: Germinating Seeds
  misc_feature: MA Experiment ID: 20000235 Result: Up-regulated in Transcription
  misc_feature: MA Experiment 20000235 PARAMETER Experiment Name: At_Siliques_P Parameter: Age (day) Value: 21
  misc_feature: MA Experiment 20000235 PARAMETER Experiment Name: At_Siliques_P Parameter: Organism Value: A. thaliana
  misc_feature: MA Experiment 20000235 PARAMETER Experiment Name: At_Siliques_P Parameter: Plant Line Value: WS
  misc_feature: MA Experiment 20000235 PARAMETER Experiment Name: At_Siliques_P Parameter: Tissue Value: 5-10mm Siliques vs. Whole Plant
  misc_feature: MA Experiment ID: 20001451 Result: Down-regulated in Transcription
  misc_feature: MA Experiment 20001451 PARAMETER Experiment Name: At_Far-red-induction_P Parameter: Age (day) Value: 7
  misc_feature: MA Experiment 20001451 PARAMETER Experiment Name: At_Far-red-induction_P Parameter: Light Value: Far-red vs. White
  misc_feature: MA Experiment 20001451 PARAMETER Experiment Name: At_Far-red-induction_P Parameter: Organism Value: A. thaliana
  misc_feature: MA Experiment 20001451 PARAMETER Experiment Name: At_Far-red-induction_P Parameter: Plant Line Value: Columbia
  misc_feature: MA Experiment 20001451 PARAMETER Experiment Name: At_Far-red-induction_P Parameter: Timepoint (hr) Value: 24
  misc_feature: MA Experiment 20001451 PARAMETER Experiment Name: At_Far-red-induction_P Parameter: Tissue Value: Whole Plant
atggctatgcctagggcaacctctggtcccgcttacccggagaggttctacgctgctgcatcttatgtcggtctcgacggatctgattcgtcggcgaaaaacgtcatctcgaaattccccgatgatactgcactacttctctatgcgctataccagcaggctactgtaggaccatgcaacactccgaaacctagtgcctggagaccagtggagcaaagcaaatggaaaaggagatgtcttagatttcatcaattactagagcgtaagaatccaaatgcattagggaaacgggaaaggagtactttagtttggcaggggctcggaaccatgccctccattgaggcaatgcgtctctttgtgaaaattctggaggaagatgatcctggttggtattcgagggcatctaatgatattccagatcctgttgtagatgtccaaattaatagagcaaaagatgagcctgttgttgagaatgggagcacatttagtgagacaaaaacaatttctacggagaatggacgtttggctgaaacccaagataaagatgtagtctcagaagactcaaatactgtttctgtatataaccagtggactgcaccccaaacatcaggtcagcgtccaaaagctcgttacgagcatggcgcagcagttattcaagataagatgtatatatatggtggaaatcacaatggccgttaccttggtgatcttcatgttctagatttaaaaagttggacttggtcaagagttgaaaccaaggttgcaacagaatctcaggaaacatcaactccgacattgttagctccttgtgctggtcattctttgatagcatgggacaacaagctgctgtctatcggtggtcacacaaaggatccctcagaatctatgcaagtgaaggtctttgatccccataccattacatggtcaatgttaaagacatatggaaaaccaccggtttcacgtggaggccagtcagttacaatggtgggtaaaaccttggtgatatttggcgggcaagatgcaaagagatcacttctgaacgatttgcatatacttgacctagacacgatgacctgggatgagatagatgccgtgggtgtatctccatctccgaggtctgatcatgctgctgcagtgcatgcagaacggttccttcttatctttggtggcggctcacatgcaacctgtttcgatgacctgcatgtccttgatttgcaaactatggagtggtcaagaccagcacagcaaggtgatgcaccaactccaagagctggacatgctggcgtgacaattggggagaactggtttattgttggtggcggtgataacaagagtggggcatcggagagtgttgtactaaacatgtcaactcttgcatggtcggtcgttgcttcagttcaaggacgtgtacctcttgctagcgagggattaagtttagtggtgagttcatacaatggtgaagatgtactagtcgcttttggtggatacaatggacgttacaataacgaaattaatcttcttaaaccaagccacaaatcaacattgcaaacaaagactctggaagcgcctttgccaggtagtctttctgctgttaataatgccacaaccagagacattgagtctgaggttgaggtgagccaagaaggcagggtacgggaaattgtcatggacaatgttaaccctggatcaaaggttgaaggaaacagcgaacgcattattgcgactattaaatctgagaaggaagagctggaggcatcactgaacaaagagaggatgcagactctccaactaaggcaagagttaggagaagcagaattacgaaacacagatttgtacaaggaacttcaatctgttcgtggccaacttgcagccgaacaatcaaggtgtttcaaactggaggttgatgttgcagagctaagacaaaagcttcaaacattggaaacactacagaaggaactcgaactcctgcaacgtcaaaaggctgcctcagaacaagctgcaatgaacgctaaacgacagggctcgggtggcgtatggggctggctcgctggaagccctcaggaaaaagatgatgattcgccttga

SEQ ID NO: 71876 - protein, 694 aa, Arabidopsis thaliana
  peptide (1)..(694): Ceres Seq. ID no. 4816280
  misc_feature (12)..(76): Pfam Name: Acyl CoA binding protein Pfam Description: Acyl CoA binding protein
  misc_feature (91)..(691): Homolog of NCBI NO: 40714674 NR Description: putative transcription factor [Oryza sativa
  misc_feature (6)..(75): Homolog of NCBI NO: 40714674 NR Description: putative transcription factor [Oryza sativa
  misc_feature (91)..(634): Homolog of NCBI NO: 22327105 NR Description: putative protein; protein id: At5g27630.1, by cDNA: gi_20260513 [Arabidopsis thaliana]
  misc_feature (3)..(76): Homolog of NCBI NO: 22327105 NR Description: putative protein; protein id: At5g27630.1, by cDNA: gi_20260513 [Arabidopsis thaliana]
  misc_feature (181)..(680): Homolog of NCBI NO: 15237715 NR Description: putative protein; protein id: At5g04420.1, by cDNA: gi_15724205 [Arabidopsis thaliana]
  misc_feature (181)..(680): Homolog of NCBI NO: 15724206 NR Description: AT5g04420/T32M21_20 [Arabidopsis thaliana]
  misc_feature (564)..(689): Homolog of NCBI NO: 22327105 NR Description: putative protein; protein id: At5g27630.1, by cDNA: gi_20260513 [Arabidopsis thaliana]
  misc_feature (169)..(571): Homolog of NCBI NO: 21950739 NR Description: RanGAP1 interacting protein [Arabidopsis thaliana]
  misc_feature (169)..(571): Homolog of NCBI NO: 30686896 NR Description: RanGAP1 interacting protein [Arabidopsis >gi|30686901|ref|NP_850846.1| RanGAP1 interacting protein
  misc_feature (197)..(606): Homolog of NCBI NO: 34905476 NR Description: P0682B08.13 [Oryza sativa (japonica
MAMPRATSGPAYPERFYAAASYVGLDGSDSSAKNVISKFPDDTALLLYALYQQATVGPCNTPKPSAWRPVEQSKWKRRCLRFHQLLERKNPNALGKRERSTLVWQGLGTMPSIEAMRLFVKILEEDDPGWYSRASNDIPDPVVDVQINRAKDEPVVENGSTFSETKTISTENGRLAETQDKDVVSEDSNTVSVYNQWTAPQTSGQRPKARYEHGAAVIQDKMYIYGGNHNGRYLGDLHVLDLKSWTWSRVETKVATESQETSTPTLLAPCAGHSLIAWDNKLLSIGGHTKDPSESMQVKVFDPHTITWSMLKTYGKPPVSRGGQSVTMVGKTLVIFGGQDAKRSLLNDLHILDLDTMTWDEIDAVGVSPSPRSDHAAAVHAERFLLIFGGGSHATCFDDLHVLDLQTMEWSRPAQQGDAPTPRAGHAGVTIGENWFIVGGGDNKSGASESVVLNMSTLAWSVVASVQGRVPLASEGLSLVVSSYNGEDVLVAFGGYNGRYNNEINLLKPSHKSTLQTKTLEAPLPGSLSAVNNATTRDIESEVEVSQEGRVREIVMDNVNPGSKVEGNSERIIATIKSEKEELEASLNKERMQTLQLRQELGEAELRNTDLYKELQSVRGQLAAEQSRCFKLEVDVAELRQKLQTLETLQKELELLQRQKAASEQAAMNAKRQGSGGVWGWLAGSPQEKDDDSP

SEQ ID NO: 71877 - protein, 692 aa, Arabidopsis thaliana
  peptide (1)..(692): Ceres Seq. ID no. 4816281
  misc_feature (10)..(74): Pfam Name: Acyl CoA binding protein Pfam Description: Acyl CoA binding protein
  misc_feature (89)..(689): Homolog of NCBI NO: 40714674 NR Description: putative transcription factor [Oryza sativa
  misc_feature (4)..(73): Homolog of NCBI NO: 40714674 NR Description: putative transcription factor [Oryza sativa
  misc_feature (89)..(632): Homolog of NCBI NO: 22327105 NR Description: putative protein; protein id: At5g27630.1, by cDNA: gi_20260513 [Arabidopsis thaliana]
  misc_feature (1)..(74): Homolog of NCBI NO: 22327105 NR Description: putative protein; protein id: At5g27630.1, by cDNA: gi_20260513 [Arabidopsis thaliana]
  misc_feature (179)..(678): Homolog of NCBI NO: 15237715 NR Description: putative protein; protein id: At5g04420.1, by cDNA: gi_15724205 [Arabidopsis thaliana]
  misc_feature (179)..(678): Homolog of NCBI NO: 15724206 NR Description: AT5g04420/T32M21_20 [Arabidopsis thaliana]
  misc_feature (562)..(687): Homolog of NCBI NO: 22327105 NR Description: putative protein; protein id: At5g27630.1, by cDNA: gi_20260513 [Arabidopsis thaliana]
  misc_feature (167)..(569): Homolog of NCBI NO: 21950739 NR Description: RanGAP1 interacting protein [Arabidopsis thaliana]
  misc_feature (167)..(569): Homolog of NCBI NO: 30686896 NR Description: RanGAP1 interacting protein [Arabidopsis >gi|30686901|ref|NP_850846.1| RanGAP1 interacting protein
  misc_feature (195)..(604): Homolog of NCBI NO: 34905476 NR Description: P0682B08.13 [Oryza sativa (japonica
MPRATSGPAYPERFYAAASYVGLDGSDSSAKNVISKFPDDTALLLYALYQQATVGPCNTPKPSAWRPVEQSKWKRRCLRFHQLLERKNPNALGKRERSTLVWQGLGTMPSIEAMRLFVKILEEDDPGWYSRASNDIPDPVVDVQINRAKDEPVVENGSTFSETKTISTENGRLAETQDKDVVSEDSNTVSVYNQWTAPQTSGQRPKARYEHGAAVIQDKMYIYGGNHNGRYLGDLHVLDLKSWTWSRVETKVATESQETSTPTLLAPCAGHSLIAWDNKLLSIGGHTKDPSESMQVKVFDPHTITWSMLKTYGKPPVSRGGQSVTMVGKTLVIFGGQDAKRSLLNDLHILDLDTMTWDEIDAVGVSPSPRSDHAAAVHAERFLLIFGGGSHATCFDDLHVLDLQTMEWSRPAQQGDAPTPRAGHAGVTIGENWFIVGGGDNKSGASESVVLNMSTLAWSVVASVQGRVPLASEGLSLVVSSYNGEDVLVAFGGYNGRYNNEINLLKPSHKSTLQTKTLEAPLPGSLSAVNNATTRDIESEVEVSQEGRVREIVMDNVNPGSKVEGNSERIIATIKSEKEELEASLNKERMQTLQLRQELGEAELRNTDLYKELQSVRGQLAAEQSRCFKLEVDVAELRQKLQTLETLQKELELLQRQKAASEQAAMNAKRQGSGGVWGWLAGSPQEKDDDSP

SEQ ID NO: 71878 - protein, 585 aa, Arabidopsis thaliana
  peptide (1)..(585): Ceres Seq. ID no. 4816282
  misc_feature (160)..(206): Pfam Name: Kelch motif Pfam Description: Kelch motif
  misc_feature (1)..(582): Homolog of NCBI NO: 40714674 NR Description: putative transcription factor [Oryza sativa
  misc_feature (1)..(525): Homolog of NCBI NO: 22327105 NR Description: putative protein; protein id: At5g27630.1, by cDNA: gi_20260513 [Arabidopsis thaliana]
  misc_feature (72)..(571): Homolog of NCBI NO: 15237715 NR Description: putative protein; protein id: At5g04420.1, by cDNA: gi_15724205 [Arabidopsis thaliana]
  misc_feature (72)..(571): Homolog of NCBI NO: 15724206 NR Description: AT5g04420/T32M21_20 [Arabidopsis thaliana]
  misc_feature (455)..(580): Homolog of NCBI NO: 22327105 NR Description: putative protein; protein id: At5g27630.1, by cDNA: gi_20260513 [Arabidopsis thaliana]
  misc_feature (60)..(462): Homolog of NCBI NO: 21950739 NR Description: RanGAP1 interacting protein [Arabidopsis thaliana]
  misc_feature (60)..(462): Homolog of NCBI NO: 30686896 NR Description: RanGAP1 interacting protein [Arabidopsis >gi|30686901|ref|NP_850846.1| RanGAP1 interacting protein
  misc_feature (88)..(497): Homolog of NCBI NO: 34905476 NR Description: P0682B08.13 [Oryza sativa (japonica
  misc_feature (79)..(336): Homolog of NCBI NO: 25518069 NR Description: F25I16.5 protein - Arabidopsis thaliana
  misc_feature (88)..(336): Homolog of NCBI NO: 15221823 NR Description: hypothetical protein; protein id: At1g18610.1
MPSIEAMRLFVKILEEDDPGWYSRASNDIPDPVVDVQINRAKDEPVVENGSTFSETKTISTENGRLAETQDKDVVSEDSNTVSVYNQWTAPQTSGQRPKARYEHGAAVIQDKMYIYGGNHNGRYLGDLHVLDLKSWTWSRVETKVATESQETSTPTLLAPCAGHSLIAWDNKLLSIGGHTKDPSESMQVKVFDPHTITWSMLKTYGKPPVSRGGQSVTMVGKTLVIFGGQDAKRSLLNDLHILDLDTMTWDEIDAVGVSPSPRSDHAAAVHAERFLLIFGGGSHATCFDDLHVLDLQTMEWSRPAQQGDAPTPRAGHAGVTIGENWFIVGGGDNKSGASESVVLNMSTLAWSVVASVQGRVPLASEGLSLVVSSYNGEDVLVAFGGYNGRYNNEINLLKPSHKSTLQTKTLEAPLPGSLSAVNNATTRDIESEVEVSQEGRVREIVMDNVNPGSKVEGNSERIIATIKSEKEELEASLNKERMQTLQLRQELGEAELRNTDLYKELQSVRGQLAAEQSRCFKLEVDVAELRQKLQTLETLQKELELLQRQKAASEQAAMNAKRQGSGGVWGWLAGSPQEKDDDSP

SEQ ID NO: 71879 - DNA, 761 bp, Arabidopsis thaliana
  misc_feature (1)..(761): Ceres Seq. ID no. 4901034
  misc_feature: MA Experiment ID: 108434 Result: Up-regulated in Transcription
  misc_feature: MA Experiment 108434 PARAMETER Experiment Name: At_Root_Tips_cDNA_P Parameter: Tissue Value: Root Tips
  misc_feature: MA Experiment ID: 108461 Result: Down-regulated in Transcription
  misc_feature: MA Experiment 108461 PARAMETER Experiment Name: At_Germinating_Seeds_cDNA_P Parameter: Age (day) Value: 1 vs. 0
  misc_feature: MA Experiment 108461 PARAMETER Experiment Name: At_Germinating_Seeds_cDNA_P Parameter: Tissue Value: Germinating Seeds
  misc_feature: MA Experiment ID: 108462 Result: Down-regulated in Transcription
  misc_feature: MA Experiment 108462 PARAMETER Experiment Name: At_Germinating_Seeds_cDNA_P Parameter: Age (day) Value: 2 vs. 0
  misc_feature: MA Experiment 108462 PARAMETER Experiment Name: At_Germinating_Seeds_cDNA_P Parameter: Tissue Value: Germinating Seeds
  misc_feature: MA Experiment ID: 108463 Result: Down-regulated in Transcription
  misc_feature: MA Experiment 108463 PARAMETER Experiment Name: At_Germinating_Seeds_cDNA_P Parameter: Age (day) Value: 3 vs. 0
  misc_feature: MA Experiment 108463 PARAMETER Experiment Name: At_Germinating_Seeds_cDNA_P Parameter: Tissue Value: Germinating Seeds
  misc_feature: MA Experiment ID: 108464 Result: Down-regulated in Transcription
  misc_feature: MA Experiment 108464 PARAMETER Experiment Name: At_Germinating_Seeds_cDNA_P Parameter: Age (day) Value: 4 vs. 0
  misc_feature: MA Experiment 108464 PARAMETER Experiment Name: At_Germinating_Seeds_cDNA_P Parameter: Tissue Value: Germinating Seeds
  misc_feature: MA Experiment ID: 108488 Result: Up-regulated in Transcription
  misc_feature: MA Experiment ID: 108489 Result: Up-regulated in Transcription
  misc_feature: MA Experiment ID: 108572 Result: Down-regulated in Transcription
  misc_feature: MA Experiment 108572 PARAMETER Experiment Name: At_Drought_cDNA_P Parameter: Timepoint (hr) Value: 1
  misc_feature: MA Experiment 108572 PARAMETER Experiment Name: At_Drought_cDNA_P Parameter: Tissue Value: Aerial
  misc_feature: MA Experiment 108572 PARAMETER Experiment Name: At_Drought_cDNA_P Parameter: Treatment Value: Drought vs. No Drought
  misc_feature: MA Experiment ID: 108573 Result: Down-regulated in Transcription
  misc_feature: MA Experiment 108573 PARAMETER Experiment Name: At_Drought_cDNA_P Parameter: Timepoint (hr) Value: 6
  misc_feature: MA Experiment 108573 PARAMETER Experiment Name: At_Drought_cDNA_P Parameter: Tissue Value: Aerial
  misc_feature: MA Experiment 108573 PARAMETER Experiment Name: At_Drought_cDNA_P Parameter: Treatment Value: Drought vs. No Drought
  misc_feature: MA Experiment ID: 20000111 Result: Up-regulated in Transcription
  misc_feature: MA Experiment 20000111 PARAMETER Experiment Name: At_42deg_Heat_cDNA_P Parameter: Temperature (deg C) Value: 42 vs. 22
  misc_feature: MA Experiment 20000111 PARAMETER Experiment Name: At_42deg_Heat_cDNA_P Parameter: Timepoint (hr) Value: 6
  misc_feature: MA Experiment 20000111 PARAMETER Experiment Name: At_42deg_Heat_cDNA_P Parameter: Tissue Value: Aerial
  misc_feature: MA Experiment ID: 20000113 Result: Up-regulated in Transcription
  misc_feature: MA Experiment 20000113 PARAMETER Experiment Name: At_42deg_Heat_cDNA_P Parameter: Temperature (deg C) Value: 42 vs. 22
  misc_feature: MA Experiment 20000113 PARAMETER Experiment Name: At_42deg_Heat_cDNA_P Parameter: Timepoint (hr) Value: 8
  misc_feature: MA Experiment 20000113 PARAMETER Experiment Name: At_42deg_Heat_cDNA_P Parameter: Tissue Value: Aerial
  misc_feature: MA Experiment ID: 20000180 Result: Down-regulated in Transcription
  misc_feature: MA Experiment 20000180 PARAMETER Experiment Name: At_Germinating_Seeds_P Parameter: Age (hr) Value: 24 vs. 0
  misc_feature: MA Experiment 20000180 PARAMETER Experiment Name: At_Germinating_Seeds_P Parameter: Tissue Value: Germinating Seeds
  misc_feature: MA Experiment ID: 20000437 Result: Down-regulated in Transcription
  misc_feature: MA Experiment 20000437 PARAMETER Experiment Name: At_Drought_P Parameter: Age (day) Value: 8
  misc_feature: MA Experiment 20000437 PARAMETER Experiment Name: At_Drought_P Parameter: Organism Value: A. thaliana
  misc_feature: MA Experiment 20000437 PARAMETER Experiment Name: At_Drought_P Parameter: Plant Line Value: WS
  misc_feature: MA Experiment 20000437 PARAMETER Experiment Name: At_Drought_P Parameter: Timepoint (hr) Value: 24
  misc_feature: MA Experiment 20000437 PARAMETER Experiment Name: At_Drought_P Parameter: Tissue Value: Whole Plant
  misc_feature: MA Experiment 20000437 PARAMETER Experiment Name: At_Drought_P Parameter: Treatment Value: Drought vs. No Drought
  misc_feature: MA Experiment ID: 20000794 Result: Down-regulated in Transcription
  misc_feature: MA Experiment 20000794 PARAMETER Experiment Name: At_Petals_P Parameter: Age (day) Value: 23-25 days
  misc_feature: MA Experiment 20000794 PARAMETER Experiment Name: At_Petals_P Parameter: Plant Line Value: WS
  misc_feature: MA Experiment 20000794 PARAMETER Experiment Name: At_Petals_P Parameter: Tissue Value: Petals vs. Whole plant
  misc_feature: MA Experiment ID: 20001458 Result: Up-regulated in Transcription
  misc_feature: MA Experiment 20001458 PARAMETER Experiment Name: At_50mM_NH4NO3_L-to-H_P Parameter: Age (day) Value: Undefined
  misc_feature: MA Experiment 20001458 PARAMETER Experiment Name: At_50mM_NH4NO3_L-to-H_P Parameter: Organism Value: Undefined
  misc_feature: MA Experiment 20001458 PARAMETER Experiment Name: At_50mM_NH4NO3_L-to-H_P Parameter: Plant Line Value: Undefined
  misc_feature: MA Experiment 20001458 PARAMETER Experiment Name: At_50mM_NH4NO3_L-to-H_P Parameter: Timepoint (hr) Value: 2
  misc_feature: MA Experiment 20001458 PARAMETER Experiment Name: At_50mM_NH4NO3_L-to-H_P Parameter: Tissue Value: Siliques
  misc_feature: MA Experiment 20001458 PARAMETER Experiment Name: At_50mM_NH4NO3_L-to-H_P Parameter: Treatment Value: 50mM NH4NO3 vs. 100mM Manitol
  misc_feature: MA Experiment ID: 20001557 Result: Up-regulated in Transcription
  misc_feature: MA Experiment 20001557 PARAMETER Experiment Name: At_Drought_Soil_Dry_P Parameter: Age (day) Value: 27
  misc_feature: MA Experiment 20001557 PARAMETER Experiment Name: At_Drought_Soil_Dry_P Parameter: Organism Value: A. thaliana
  misc_feature: MA Experiment 20001557 PARAMETER Experiment Name: At_Drought_Soil_Dry_P Parameter: Plant Line Value: WS
  misc_feature: MA Experiment 20001557 PARAMETER Experiment Name: At_Drought_Soil_Dry_P Parameter: Post Timepoint (hr) Value: 3
  misc_feature: MA Experiment 20001557 PARAMETER Experiment Name: At_Drought_Soil_Dry_P Parameter: Post-Treatment Value: Re-Water vs. No Drought
  misc_feature: MA Experiment 20001557 PARAMETER Experiment Name: At_Drought_Soil_Dry_P Parameter: Timepoint (day) Value: 13
  misc_feature: MA Experiment 20001557 PARAMETER Experiment Name: At_Drought_Soil_Dry_P Parameter: Treatment Value: Drought vs. No Drought
  misc_feature: MA Experiment ID: 20001558 Result: Up-regulated in Transcription
  misc_feature: MA Experiment 20001558 PARAMETER Experiment Name: At_Drought_Soil_Dry_P Parameter: Age (day) Value: 27
  misc_feature: MA Experiment 20001558 PARAMETER Experiment Name: At_Drought_Soil_Dry_P Parameter: Organism Value: A. thaliana
  misc_feature: MA Experiment 20001558 PARAMETER Experiment Name: At_Drought_Soil_Dry_P Parameter: Plant Line Value: WS
  misc_feature: MA Experiment 20001558 PARAMETER Experiment Name: At_Drought_Soil_Dry_P Parameter: Post Timepoint (hr) Value: 6
  misc_feature: MA Experiment 20001558 PARAMETER Experiment Name: At_Drought_Soil_Dry_P Parameter: Post-Treatment Value: Re-Water vs. No Drought
  misc_feature: MA Experiment 20001558 PARAMETER Experiment Name: At_Drought_Soil_Dry_P Parameter: Timepoint (day) Value: 13
  misc_feature: MA Experiment 20001558 PARAMETER Experiment Name: At_Drought_Soil_Dry_P Parameter: Treatment Value: Drought vs. No Drought
  misc_feature: MA Experiment ID: 20001560 Result: Up-regulated in Transcription
  misc_feature: MA Experiment 20001560 PARAMETER Experiment Name: At_Drought_Soil_Dry_P Parameter: Age (day) Value: 28
  misc_feature: MA Experiment 20001560 PARAMETER Experiment Name: At_Drought_Soil_Dry_P Parameter: Organism Value: A. thaliana
  misc_feature: MA Experiment 20001560 PARAMETER Experiment Name: At_Drought_Soil_Dry_P Parameter: Plant Line Value: WS
  misc_feature: MA Experiment 20001560 PARAMETER Experiment Name: At_Drought_Soil_Dry_P Parameter: Post Timepoint (hr) Value: None
  misc_feature: MA Experiment 20001560 PARAMETER Experiment Name: At_Drought_Soil_Dry_P Parameter: Post-Treatment Value: None
  misc_feature: MA Experiment 20001560 PARAMETER Experiment Name: At_Drought_Soil_Dry_P Parameter: Timepoint (day) Value: 14
  misc_feature: MA Experiment 20001560 PARAMETER Experiment Name: At_Drought_Soil_Dry_P Parameter: Treatment Value: Drought vs. No Drought
  misc_feature: MA Experiment ID: 20001757 Result: Up-regulated in Transcription
  misc_feature: MA Experiment 20001757 PARAMETER Experiment Name: At_50mM_NH4NO3_L-to-H_P Parameter: Timepoint (hr) Value: 6
  misc_feature: MA Experiment 20001757 PARAMETER Experiment Name: At_50mM_NH4NO3_L-to-H_P Parameter: Tissue Value: Leaf
  misc_feature: MA Experiment 20001757 PARAMETER Experiment Name: At_50mM_NH4NO3_L-to-H_P Parameter: Treatment Value: 50mM NH4NO3 vs 100mM Mannitol
aaaaaaacacaatccctcttagaaacagagagcttctcttctttctccattattcatcactttcttccccgaagatgcgtcctttagacgagaccgagacaaccgtcgtcttcgagaagctcttcaaattcgtcggcaacaacctcaagaagatcgtcgagaacccatcagacgaaggacccgaatctacacccggcagctactgcttccgcctccagaaaaacagagtctactacgtcagcgaagccctcgtgaagcgagccacaaacatctcaggaaaaacctagtctcttcggaacctgcatcgggaaatacactcacgccggtagtttccatctgacgattatgtcactcaatatcttggcggcgaatgctaaacacaaggtatggcttaaacccacttcggagatgtcgtttctttatgggaaccatgtcttgaaaggtggattagggaggattactgatagtattgttcctggagatggtgttgttgtgttctcgatgtctgatgttccgttagggtttgggattgctgcgaagagtacacaggattgtaggaaattggatcctaatggtattgttgtgcttcatcaggctgatattggagagtatttgaggggtgaagatgacctttgaaagtttaaaggttttgtctttgttgtgtcttagtttgattctgcttgttgctttgagttttaaagtatgtagctgttacaagtttcgtggaacttggttctggatctatgaaagtctcgattttt

SEQ ID NO: 71880 - protein, 96 aa, Arabidopsis thaliana
  peptide (1)..(96): Ceres Seq. ID no. 4901035
  misc_feature (1)..(91): Pfam Name: Uncharacterised protein family (UPF0113) Pfam Description: Uncharacterised protein family (UPF0113)
  misc_feature (1)..(96): Homolog of NCBI NO: 22831121 NR Description: putative 60S ribosome subunit biogenesis protein
  misc_feature (1)..(96): Homolog of NCBI NO: 20301988 NR Description: Saccharomyces cerevisiae Nip7p homolog [Rattus
  misc_feature (1)..(96): Homolog of NCBI NO: 7705437 NR Description: hypothetical protein HSPC031 [Homo sapiens]
  misc_feature (1)..(96): Homolog of NCBI NO: 12852038 NR Description: unnamed protein product [Mus musculus]
  misc_feature (1)..(96): Homolog of NCBI NO: 13928674 NR Description: RIKEN cDNA 1110017C15 [Mus musculus]
  misc_feature (1)..(96): Homolog of NCBI NO: 34876605 NR Description: similar to Saccharomyces cerevisiae Nip7p homolog
  misc_feature (1)..(96): Homolog of NCBI NO: 30683394 NR Description: expressed protein [Arabidopsis thaliana]
  misc_feature (1)..(96): Homolog of NCBI NO: 6325045 NR Description: Nip7p is required for 60S ribosome subunit Nip7p [Saccharomyces cerevisiae]
  misc_feature (1)..(96): Homolog of NCBI NO: 17506003 NR Description: 60S ribosome biogenesis (20.1 kD) [Caenorhabditis
  misc_feature (1)..(96): Homolog of NCBI NO: 39589582 NR Description: Hypothetical protein CBG12182 [Caenorhabditis
MSLNILAANAKHKVWLKPTSEMSFLYGNHVLKGGLGRITDSIVPGDGVVVFSMSDVPLGFGIAAKSTQDCRKLDPNGIVVLHQADIGEYLRGEDDL

SEQ ID NO: 71881 - protein, 94 aa, Arabidopsis thaliana
  peptide (1)..(94): Ceres Seq. ID no. 4901036
  misc_feature (25)..(91): Pfam Name: Uncharacterised protein family (UPF0113) Pfam Description: Uncharacterised protein family (UPF0113)
  misc_feature (25)..(91): Homolog of NCBI NO: 22831121 NR Description: putative 60S ribosome subunit biogenesis protein
  misc_feature (25)..(92): Homolog of NCBI NO: 20301988 NR Description: Saccharomyces cerevisiae Nip7p homolog [Rattus
  misc_feature (25)..(92): Homolog of NCBI NO: 7705437 NR Description: hypothetical protein HSPC031 [Homo sapiens]
  misc_feature (25)..(92): Homolog of NCBI NO: 12852038 NR Description: unnamed protein product [Mus musculus]
  misc_feature (25)..(92): Homolog of NCBI NO: 13928674 NR Description: RIKEN cDNA 1110017C15 [Mus musculus]
  misc_feature (25)..(92): Homolog of NCBI NO: 34876605 NR Description: similar to Saccharomyces cerevisiae Nip7p homolog
  misc_feature (25)..(91): Homolog of NCBI NO: 6325045 NR Description: Nip7p is required for 60S ribosome subunit Nip7p [Saccharomyces cerevisiae]
  misc_feature (25)..(91): Homolog of NCBI NO: 17506003 NR Description: 60S ribosome biogenesis (20.1 kD) [Caenorhabditis
  misc_feature (25)..(91): Homolog of NCBI NO: 39589582 NR Description: Hypothetical protein CBG12182 [Caenorhabditis
  misc_feature (25)..(91): Homolog of NCBI NO: 19075218 NR Description: putative protein involved in 60S ribosome subunit [Schizosaccharomyces pombe] >gi|7492919|pir||T41300 protein
KNTIPLRNRELLFFLHYSSLSSPKMRPLDETETTVVFEKLFKFVGNNLKKIVENPSDEGPESTPGSYCFRLQKNRVYYVSEALVKRATNISGKT

SEQ ID NO: 71882 - protein, 75 aa, Arabidopsis thaliana
  peptide (1)..(75): Ceres Seq. ID no. 4901037
  misc_feature (1)..(70): Pfam Name: Uncharacterised protein family (UPF0113) Pfam Description: Uncharacterised protein family (UPF0113)
  misc_feature (1)..(75): Homolog of NCBI NO: 22831121 NR Description: putative 60S ribosome subunit biogenesis protein
  misc_feature (1)..(75): Homolog of NCBI NO: 20301988 NR Description: Saccharomyces cerevisiae Nip7p homolog [Rattus
  misc_feature (1)..(75): Homolog of NCBI NO: 7705437 NR Description: hypothetical protein HSPC031 [Homo sapiens]
  misc_feature (1)..(75): Homolog of NCBI NO: 12852038 NR Description: unnamed protein product [Mus musculus]
  misc_feature (1)..(75): Homolog of NCBI NO: 13928674 NR Description: RIKEN cDNA 1110017C15 [Mus musculus]
  misc_feature (1)..(75): Homolog of NCBI NO: 34876605 NR Description: similar to Saccharomyces cerevisiae Nip7p homolog
  misc_feature (1)..(75): Homolog of NCBI NO: 30683394 NR Description: expressed protein [Arabidopsis thaliana]
  misc_feature (1)..(75): Homolog of NCBI NO: 6325045 NR Description: Nip7p is required for 60S ribosome subunit Nip7p [Saccharomyces cerevisiae]
  misc_feature (1)..(75): Homolog of NCBI NO: 17506003 NR Description: 60S ribosome biogenesis (20.1 kD) [Caenorhabditis
  misc_feature (1)..(75): Homolog of NCBI NO: 39589582 NR Description: Hypothetical protein CBG12182 [Caenorhabditis
MSFLYGNHVLKGGLGRITDSIVPGDGVVVFSMSDVPLGFGIAAKSTQDCRKLDPNGIVVLHQADIGEYLRGEDDL

SEQ ID NO: 71883 - DNA, 2085 bp, Arabidopsis thaliana
  misc_feature (1)..(2085): Ceres Seq. ID no. 4902421
  misc_feature: MA Experiment ID: 20000306 Result: Up-regulated in Transcription
  misc_feature: MA Experiment 20000306 PARAMETER Experiment Name: At_Germinating_Seeds_Sub_P Parameter: Age (hr) Value: 6 vs. 0
  misc_feature: MA Experiment 20000306 PARAMETER Experiment Name: At_Germinating_Seeds_Sub_P Parameter: Organism Value: A. thaliana
  misc_feature: MA Experiment 20000306 PARAMETER Experiment Name: At_Germinating_Seeds_Sub_P Parameter: Plant Line Value: WS
  misc_feature: MA Experiment 20000306 PARAMETER Experiment Name: At_Germinating_Seeds_Sub_P Parameter: Tissue Value: Germinating Seeds
  misc_feature: MA Experiment ID: 20000307 Result: Up-regulated in Transcription
  misc_feature: MA Experiment 20000307 PARAMETER Experiment Name: At_Germinating_Seeds_Sub_P Parameter: Age (hr) Value: 24 vs. 0
  misc_feature: MA Experiment 20000307 PARAMETER Experiment Name: At_Germinating_Seeds_Sub_P Parameter: Organism Value: A. thaliana
  misc_feature: MA Experiment 20000307 PARAMETER Experiment Name: At_Germinating_Seeds_Sub_P Parameter: Plant Line Value: WS
  misc_feature: MA Experiment 20000307 PARAMETER Experiment Name: At_Germinating_Seeds_Sub_P Parameter: Tissue Value: Germinating Seeds
  misc_feature: MA Experiment ID: 20000315 Result: Down-regulated in Transcription
  misc_feature: MA Experiment 20000315 PARAMETER Experiment Name: At_14day_Shoots-Roots_Sub_P Parameter: Age (day) Value: 14
  misc_feature: MA Experiment 20000315 PARAMETER Experiment Name: At_14day_Shoots-Roots_Sub_P Parameter: Organism Value: A. thaliana
  misc_feature: MA Experiment 20000315 PARAMETER Experiment Name: At_14day_Shoots-Roots_Sub_P Parameter: Plant Line Value: WS
  misc_feature: MA Experiment 20000315 PARAMETER Experiment Name: At_14day_Shoots-Roots_Sub_P Parameter: Tissue Value: Shoots vs. Whole Plant
  misc_feature: MA Experiment ID: 20000327 Result: Down-regulated in Transcription
  misc_feature: MA Experiment 20000327 PARAMETER Experiment Name: At_42deg_Heat_Sub_P Parameter: Age (day) Value: 14
  misc_feature: MA Experiment 20000327 PARAMETER Experiment Name: At_42deg_Heat_Sub_P Parameter: Organism Value: A. thaliana
  misc_feature: MA Experiment 20000327 PARAMETER Experiment Name: At_42deg_Heat_Sub_P Parameter: Plant Line Value: WS
  misc_feature: MA Experiment 20000327 PARAMETER Experiment Name: At_42deg_Heat_Sub_P Parameter: Temperature (deg C) Value: 42 vs. 22
  misc_feature: MA Experiment 20000327 PARAMETER Experiment Name: At_42deg_Heat_Sub_P Parameter: Timepoint (hr) Value: 1
  misc_feature: MA Experiment 20000327 PARAMETER Experiment Name: At_42deg_Heat_Sub_P Parameter: Tissue Value: Aerial
  misc_feature: MA Experiment ID: 20000328 Result: Down-regulated in Transcription
  misc_feature: MA Experiment 20000328 PARAMETER Experiment Name: At_42deg_Heat_Sub_P Parameter: Age (day) Value: 14
  misc_feature: MA Experiment 20000328 PARAMETER Experiment Name: At_42deg_Heat_Sub_P Parameter: Organism Value: A. thaliana
  misc_feature: MA Experiment 20000328 PARAMETER Experiment Name: At_42deg_Heat_Sub_P Parameter: Plant Line Value: WS
  misc_feature: MA Experiment 20000328 PARAMETER Experiment Name: At_42deg_Heat_Sub_P Parameter: Temperature (deg C) Value: 42 vs. 22
  misc_feature: MA Experiment 20000328 PARAMETER Experiment Name: At_42deg_Heat_Sub_P Parameter: Timepoint (hr) Value: 6
  misc_feature: MA Experiment 20000328 PARAMETER Experiment Name: At_42deg_Heat_Sub_P Parameter: Tissue Value: Aerial
atgcctttaacgagatcaaagagtcttccggcgacggagaacggtggatccgatcgggagacactccaatcaggaagatcagtggctgggattctctataaatggactaattacggaaaaggatggagatctagatggttcctcctccgcgacggaatcttatcgtattccaagatccgaagaccggagaatgtcaatctcttatctccttccgatgatctgaggttaatcggagatatttccaccgatcgtctcttgagaatgaagagttgtagtggccgtagtcgtcggaaacatcacaaaaacattggcattgttcatctcaagcaggtttcatcttaccgagaaagcaagtctgatcatagaaagttttatatctttactgcaaccaagactctgcatctgaggactgattctagaagtgatagagcagcatggttacaagctttagcatctaccaggggcatagttcctctccagtcaattaatggggatttctccttcgtatcaccaaaggatttatccatatctaccgagagactaaagaaacggttgtttgaagagggaatgaacgagagtcttgtaaaagagtgcgagcagatcgtggattcagagttctgtgaagttcaagaacagattaaacttcttcacgaagagcggaaaaagttgcttgatgctttgaggcagctagagatggccaaccttgaagctgaagcctcagggatccatgacgatgtctaccaattaagaaatcacaagtattccagcttaggacgtggaaaatatagtgaatgcagtacaagtgcttcatctgatgataagcaagagtttgaggatatctctgaggaagacgaggcttccttccatgacacaaaggagtcatttggtgaacctgatgttggttctgtgctcacgcattttaagagacgaacaaagcttcctgatccagcagagaaagagagaggtgtcagtctctggtctatgatcaaagacaatgttggaaaggatctcacacgagtttgtcttcctgtttatttcaatgaaccaatatcttccctccaaaagtgttttgaagacttggagtactcttatctcttggaccaagcatatgaatacggaaaatccgggaagagtctccttagagccctcaatgtcgctgcttttgcagtctctggttatgcttccaccgaaggacgacactgtaaacctttcaaccctttgctcggagaaacatatgaagctgactttcctgaaaagggaattcgtttcttctctgagaaggttagccaccatccaacagttatcgcctgccattgcgaaggtaaagggtggaagttctggggcgacacaaacctccggtcgaagttttgggggagatcgatccaacttgaacccgttggaatcttgactctcgagtttgatgatggagaaattttccagtggagcaaagtaacaacaactatatacaatatcctacttggtaaactgtactgcgatcaccatgggataatgaaaatccgtggaaatcgccaatattcttgtatgttaaagttcaaggagcaatcgattcttgatagaaatccccaccaggttaatggttttgtagaagatgtaactggaaaaaaggctgcgacggtatttggtaaatggaatgatagcctttattatgttgctggtgatggaatcaacaaggcaagcgcctcattactgtggaaagcgacaaaggcaccacctaatgtcaccagatacaactttacatcattcgcgatgacgctaaatgaattgatacctggtttggaggaaaagctgcctccaacagattctaggctccgaccagatcaacgacacttggagaacggtgaatatgagaaggcaaatgaagagaaacaaagattagagagaagacaaagaatgtcacggcaaattcaggaaagtgggtggagaccgagatggttcgagcctcaaggagagagtgaaagctataagtatacgggcggttattgggaagcacgagatgttaaaagttgggatgattgccctaacatatttggagagttcaccgaagaggttgcagattgtgcttaa

SEQ ID NO: 71884 - protein, 694 aa, Arabidopsis thaliana
  peptide (1)..(694): Ceres Seq. ID no. 4902422
  misc_feature (286)..(673): Pfam Name: Oxysterol-binding protein Pfam Description: Oxysterol-binding protein
  misc_feature (3)..(694): Homolog of NCBI NO: 18415950 NR Description: putative protein; protein id: At4g22540.1, by cDNA: gi_15450518 [Arabidopsis thaliana] AT4g22540/F7K2_120 [Arabidopsis thaliana]
  misc_feature (3)..(638): Homolog of NCBI NO: 7486604 NR Description: hypothetical protein F7K2.120 - Arabidopsis >gi|3892709|emb|CAA22159.1| putative protein [Arabidopsis >gi|7269100|emb|CAB79209.1| putative protein [Arabidopsis
  misc_feature (236)..(689): Homolog of NCBI NO: 30680662 NR Description: expressed protein [Arabidopsis thaliana]
  misc_feature (25)..(293): Homolog of NCBI NO: 30680662 NR Description: expressed protein [Arabidopsis thaliana]
  misc_feature (238)..(690): Homolog of NCBI NO: 15224597 NR Description: putative oxysterol-binding protein; protein id:
  misc_feature (24)..(303): Homolog of NCBI NO: 15224597 NR Description: putative oxysterol-binding protein; protein id:
  misc_feature (236)..(689): Homolog of NCBI NO: 30680665 NR Description: expressed protein [Arabidopsis thaliana]
  misc_feature (25)..(293): Homolog of NCBI NO: 30680665 NR Description: expressed protein [Arabidopsis thaliana]
  misc_feature (328)..(694): Homolog of NCBI NO: 22655148 NR Description: unknown protein [Arabidopsis thaliana]
  misc_feature (306)..(683): Homolog of NCBI NO: 15222204 NR Description: putative oxysterol-binding protein; protein id: [Arabidopsis thaliana] >gi|25295691|pir||A86266 hypothetical
MPLTRSKSLPATENGGSDRETLQSGRSVAGILYKWTNYGKGWRSRWFLLRDGILSYSKIRRPENVNLLSPSDDLRLIGDISTDRLLRMKSCSGRSRRKHHKNIGIVHLKQVSSYRESKSDHRKFYIFTATKTLHLRTDSRSDRAAWLQALASTRGIVPLQSINGDFSFVSPKDLSISTERLKKRLFEEGMNESLVKECEQIVDSEFCEVQEQIKLLHEERKKLLDALRQLEMANLEAEASGIHDDVYQLRNHKYSSLGRGKYSECSTSASSDDKQEFEDISEEDEASFHDTKESFGEPDVGSVLTHFKRRTKLPDPAEKERGVSLWSMIKDNVGKDLTRVCLPVYFNEPISSLQKCFEDLEYSYLLDQAYEYGKSGKSLLRALNVAAFAVSGYASTEGRHCKPFNPLLGETYEADFPEKGIRFFSEKVSHHPTVIACHCEGKGWKFWGDTNLRSKFWGRSIQLEPVGILTLEFDDGEIFQWSKVTTTIYNILLGKLYCDHHGIMKIRGNRQYSCMLKFKEQSILDRNPHQVNGFVEDVTGKKAATVFGKWNDSLYYVAGDGINKASASLLWKATKAPPNVTRYNFTSFAMTLNELIPGLEEKLPPTDSRLRPDQRHLENGEYEKANEEKQRLERRQRMSRQIQESGWRPRWFEPQGESESYKYTGGYWEARDVKSWDDCPNIFGEFTEEVADCA

SEQ ID NO: 71885 - protein, 607 aa, Arabidopsis thaliana
  peptide (1)..(607): Ceres Seq. ID no. 4902423
  misc_feature (199)..(586): Pfam Name: Oxysterol-binding protein Pfam Description: Oxysterol-binding protein
  misc_feature (1)..(607): Homolog of NCBI NO: 18415950 NR Description: putative protein; protein id: At4g22540.1, by cDNA: gi_15450518 [Arabidopsis thaliana] AT4g22540/F7K2_120 [Arabidopsis thaliana]
  misc_feature (1)..(551): Homolog of NCBI NO: 7486604 NR Description: hypothetical protein F7K2.120 - Arabidopsis >gi|3892709|emb|CAA22159.1| putative protein [Arabidopsis >gi|7269100|emb|CAB79209.1| putative protein [Arabidopsis
  misc_feature (149)..(602): Homolog of NCBI NO: 30680662 NR Description: expressed protein [Arabidopsis thaliana]
  misc_feature (1)..(206): Homolog of NCBI NO: 30680662 NR Description: expressed protein [Arabidopsis thaliana]
  misc_feature (151)..(603): Homolog of NCBI NO: 15224597 NR Description: putative oxysterol-binding protein; protein id:
  misc_feature (1)..(216): Homolog of NCBI NO: 15224597 NR Description: putative oxysterol-binding protein; protein id:
  misc_feature (149)..(602): Homolog of NCBI NO: 30680665 NR Description: expressed protein [Arabidopsis thaliana]
  misc_feature (1)..(206): Homolog of NCBI NO: 30680665 NR Description: expressed protein [Arabidopsis thaliana]
  misc_feature (241)..(607): Homolog of NCBI NO: 22655148 NR Description: unknown protein [Arabidopsis thaliana]
  misc_feature (219)..(596): Homolog of NCBI NO: 15222204 NR Description: putative oxysterol-binding protein; protein id: [Arabidopsis thaliana] >gi|25295691|pir||A86266 hypothetical
MKSCSGRSRRKHHKNIGIVHLKQVSSYRESKSDHRKFYIFTATKTLHLRTDSRSDRAAWLQALASTRGIVPLQSINGDFSFVSPKDLSISTERLKKRLFEEGMNESLVKECEQIVDSEFCEVQEQIKLLHEERKKLLDALRQLEMANLEAEASGIHDDVYQLRNHKYSSLGRGKYSECSTSASSDDKQEFEDISEEDEASFHDTKESFGEPDVGSVLTHFKRRTKLPDPAEKERGVSLWSMIKDNVGKDLTRVCLPVYFNEPISSLQKCFEDLEYSYLLDQAYEYGKSGKSLLRALNVAAFAVSGYASTEGRHCKPFNPLLGETYEADFPEKGIRFFSEKVSHHPTVIACHCEGKGWKFWGDTNLRSKFWGRSIQLEPVGILTLEFDDGEIFQWSKVTTTIYNILLGKLYCDHHGIMKIRGNRQYSCMLKFKEQSILDRNPHQVNGFVEDVTGKKAATVFGKWNDSLYYVAGDGINKASASLLWKATKAPPNVTRYNFTSFAMTLNELIPGLEEKLPPTDSRLRPDQRHLENGEYEKANEEKQRLERRQRMSRQIQESGWRPRWFEPQGESESYKYTGGYWEARDVKSWDDCPNIFGEFTEEVADCA

SEQ ID NO: 71886 - protein, 505 aa, Arabidopsis thaliana
  peptide (1)..(505): Ceres Seq. ID no. 4902424
  misc_feature (97)..(484): Pfam Name: Oxysterol-binding protein Pfam Description: Oxysterol-binding protein
  misc_feature (1)..(505): Homolog of NCBI NO: 18415950 NR Description: putative protein; protein id: At4g22540.1, by cDNA: gi_15450518 [Arabidopsis thaliana] AT4g22540/F7K2_120 [Arabidopsis thaliana]
  misc_feature (1)..(449): Homolog of NCBI NO: 7486604 NR Description: hypothetical protein F7K2.120 - Arabidopsis >gi|3892709|emb|CAA22159.1| putative protein [Arabidopsis >gi|7269100|emb|CAB79209.1| putative protein [Arabidopsis
  misc_feature (47)..(500): Homolog of NCBI NO: 30680662 NR Description: expressed protein [Arabidopsis thaliana]
  misc_feature (1)..(104): Homolog of NCBI NO: 30680662 NR Description: expressed protein [Arabidopsis thaliana]
  misc_feature (49)..(501): Homolog of NCBI NO: 15224597 NR Description: putative oxysterol-binding protein; protein id:
  misc_feature (1)..(114): Homolog of NCBI NO: 15224597 NR Description: putative oxysterol-binding protein; protein id:
  misc_feature (47)..(500): Homolog of NCBI NO: 30680665 NR Description: expressed protein [Arabidopsis thaliana]
  misc_feature (1)..(104): Homolog of NCBI NO: 30680665 NR Description: expressed protein [Arabidopsis thaliana]
  misc_feature (139)..(505): Homolog of NCBI NO: 22655148 NR Description: unknown protein [Arabidopsis thaliana]
  misc_feature (117)..(494): Homolog of NCBI NO: 15222204 NR Description: putative oxysterol-binding protein; protein id: [Arabidopsis thaliana] >gi|25295691|pir||A86266 hypothetical
MNESLVKECEQIVDSEFCEVQEQIKLLHEERKKLLDALRQLEMANLEAEASGIHDDVYQLRNHKYSSLGRGKYSECSTSASSDDKQEFEDISEEDEASFHDTKESFGEPDVGSVLTHFKRRTKLPDPAEKERGVSLWSMIKDNVGKDLTRVCLPVYFNEPISSLQKCFEDLEYSYLLDQAYEYGKSGKSLLRALNVAAFAVSGYASTEGRHCKPFNPLLGETYEADFPEKGIRFFSEKVSHHPTVIACHCEGKGWKFWGDTNLRSKFWGRSIQLEPVGILTLEFDDGEIFQWSKVTTTIYNILLGKLYCDHHGIMKIRGNRQYSCMLKFKEQSILDRNPHQVNGFVEDVTGKKAATVFGKWNDSLYYVAGDGINKASASLLWKATKAPPNVTRYNFTSFAMTLNELIPGLEEKLPPTDSRLRPDQRHLENGEYEKANEEKQRLERRQRMSRQIQESGWRPRWFEPQGESESYKYTGGYWEARDVKSWDDCPNIFGEFTEEVADCA

SEQ ID NO: 71887 - DNA, 1312 bp, Arabidopsis thaliana
  misc_feature (1)..(1312): Ceres Seq. ID no. 4902436
  misc_feature: MA Experiment ID: 108434 Result: Up-regulated in Transcription
  misc_feature: MA Experiment 108434 PARAMETER Experiment Name: At_Root_Tips_cDNA_P Parameter: Tissue Value: Root Tips
  misc_feature: MA Experiment ID: 108462 Result: Down-regulated in Transcription
  misc_feature: MA Experiment 108462 PARAMETER Experiment Name: At_Germinating_Seeds_cDNA_P Parameter: Age (day) Value: 2 vs. 0
  misc_feature: MA Experiment 108462 PARAMETER Experiment Name: At_Germinating_Seeds_cDNA_P Parameter: Tissue Value: Germinating Seeds
  misc_feature: MA Experiment ID: 108463 Result: Down-regulated in Transcription
  misc_feature: MA Experiment 108463 PARAMETER Experiment Name: At_Germinating_Seeds_cDNA_P Parameter: Age (day) Value: 3 vs. 0
  misc_feature: MA Experiment 108463 PARAMETER Experiment Name: At_Germinating_Seeds_cDNA_P Parameter: Tissue Value: Germinating Seeds
  misc_feature: MA Experiment ID: 108595 Result: Down-regulated in Transcription
  misc_feature: MA Experiment 108595 PARAMETER Experiment Name: At_Ler-pi_Ovule_cDNA_P Parameter: Plant Line Value: null
  misc_feature: MA Experiment ID: 20000224 Result: Down-regulated in Transcription
  misc_feature: MA Experiment ID: 20001911 Result: Down-regulated in Transcription
  misc_feature: MA Experiment 20001911 PARAMETER Experiment Name: At_Drought_Reproduction_P Parameter: Age (day) Value: 40
  misc_feature: MA Experiment 20001911 PARAMETER Experiment Name: At_Drought_Reproduction_P Parameter: Organism Value: A. thaliana
  misc_feature: MA Experiment 20001911 PARAMETER Experiment Name: At_Drought_Reproduction_P Parameter: Plant Line Value: WS
  misc_feature: MA Experiment 20001911 PARAMETER Experiment Name: At_Drought_Reproduction_P Parameter: Timepoint (day) Value: 10
  misc_feature: MA Experiment 20001911 PARAMETER Experiment Name: At_Drought_Reproduction_P Parameter: Tissue Value: Flowers
  misc_feature: MA Experiment 20001911 PARAMETER Experiment Name: At_Drought_Reproduction_P Parameter: Treatment Value: Drought vs. No Drought
ctctccctctttcccccttacgtaaccctaagcggacggagcaatgctctgctagatctatctttctttcaattcttcaccagagatcgtcgagactcaccattgaaatcgaagaaacagcaccaatttccacttcaccaccgaaagagagagacagagaggataataaaaggccgccatggatttagatcaatggatttccaaggttaaagacggccaacatctctctgaggacgagcttcaacttctctgcgaatacgtgaaagaaattcttattgaggaatcaaatgtacaacctgtcaacagtcctgtcaccgtctgtggtgatatccatggccagtttcatgatcttatgaaacttttccagaccggaggtcatgttcccgagaccaattacatatttatgggggatttcgttgatagaggttacaacagtcttgaagttttcaccattcttttgcttcttaaagcaagacatccagccaatatcactcttttgcgtggaaatcatgaaagtagacagctaactcaggtgtatggtttctatgacgaatgccaaaggaagtatggtaatgctaatgcttggagatattgcacggatgtttttgactatcttacactttcagctattatagatggcactgttctatgtgttcatggtggcctttcacctgatgtacggacaattgaccagataagattgattgagcggaattgcgaaataccgcatgaaggacccttctgtgatcttatgtggagtgatcctgaagatattgaaacatgggctgtcagtccacgtggagctggttggcttttcgggtccagggttaccactgagtttaaccatattaacaatcttgatctagtatgtcgcgctcaccagcttgtacaagaaggtctcaagtacatgttccaagataaaggtcttgtaactgtgtggtctgcgcctaattactgctaccgttgtgggaatgtggcttctatattgagtttcaatgacaacatggaaagggaagtgaagttcttcacggagacagaagagaacaatcaaatgagagggccaaggacaggtgttccttatttcctgtgattcatgatgatgatcctacatcattattagtctcgtattgctcttatcaagttagccattatcatgattgccattggcttatgttctttcaaggtatatcttctgatgttgtttacacttccattgttttttttttcctttttccattttggaaacattttcttgtgaaagtgaatgtcactttggtaattttagtggttttgatgcactttaacctgaacc

SEQ ID NO: 71888 - protein, 303 aa, Arabidopsis thaliana
  peptide (1)..(303): Ceres Seq. ID no. 4902437
  misc_feature (43)..(238): Pfam Name: Calcineurin-like phosphoesterase Pfam Description: Calcineurin-like phosphoesterase
  misc_feature (1)..(303): Homolog of NCBI NO: 15222945 NR Description: serine/threonine protein phosphatase; protein id: supported by cDNA: 35230., supported by cDNA: gi_16226939 thaliana] >gi|25752349|pir||H96539 phosphoprotein phosphatase
  misc_feature (1)..(303): Homolog of NCBI NO: 15231006 NR Description: protein phosphatase; protein id: At3g19980.1, by cDNA: gi_14582205, supported by cDNA: gi_17381248, supported cDNA: gi_20453382 [Arabidopsis thaliana]
  misc_feature (1)..(303): Homolog of NCBI NO: 7488629 NR Description: phosphoprotein phosphatase (EC 3.1.3.16) - apple >gi|1143511|emb|CAA87385.1| Ser/Thr protein phosphatase to PPX [Malus x domestica] >gi|1586034|prf||2202340A Ser/Thr
  misc_feature (1)..(303): Homolog of NCBI NO: 20385063 NR Description: serine/threonine protein phosphatase 2A [Pisum
  misc_feature (1)..(303): Homolog of NCBI NO: 34911376 NR Description: putative Ser/Thr protein phosphatase [Oryza
  misc_feature (1)..(302): Homolog of NCBI NO: 5759301 NR Description: protein phosphatase 6 catalytic subunit
  misc_feature (1)..(302): Homolog of NCBI NO: 28829192 NR Description: similar to Dictyostelium discoideum (Slime mold). phosphatase 6 catalytic subunit (EC 3.1.3.16) (Serine/threonine
  misc_feature (1)..(303): Homolog of NCBI NO: 21312758 NR Description: RIKEN cDNA 2310003C10 [Mus musculus] Similar to protein phosphatase 6, catalytic subunit [Mus >gi|12832985|dbj|BAB22339.1| unnamed protein product [Mus
  misc_feature (1)..(303): Homolog of NCBI NO: 4506029 NR Description: protein phosphatase 6, catalytic subunit; protein phosphatase catalytic subunit [Homo sapiens] Serine/threonine protein phosphatase 6 (PP6)
  misc_feature (1)..(303): Homolog of NCBI NO: 1071868 NR Description: phosphoprotein phosphatase (EC 3.1.3.16) PPV - rat
MDLDQWISKVKDGQHLSEDELQLLCEYVKEILIEESNVQPVNSPVTVCGDIHGQFHDLMKLFQTGGHVPETNYIFMGDFVDRGYNSLEVFTILLLLKARHPANITLLRGNHESRQLTQVYGFYDECQRKYGNANAWRYCTDVFDYLTLSAIIDGTVLCVHGGLSPDVRTIDQIRLIERNCEIPHEGPFCDLMWSDPEDIETWAVSPRGAGWLFGSRVTTEFNHINNLDLVCRAHQLVQEGLKYMFQDKGLVTVWSAPNYCYRCGNVASILSFNDNMEREVKFFTETEENNQMRGPRTGVPYFL

SEQ ID NO: 71889 - protein, 245 aa, Arabidopsis thaliana
  peptide (1)..(245): Ceres Seq. ID no. 4902438
  misc_feature (1)..(180): Pfam Name: Calcineurin-like phosphoesterase Pfam Description: Calcineurin-like phosphoesterase
  misc_feature (1)..(245): Homolog of NCBI NO: 15222945 NR Description: serine/threonine protein phosphatase; protein id: supported by cDNA: 35230., supported by cDNA: gi_16226939 thaliana] >gi|25752349|pir||H96539 phosphoprotein phosphatase
  misc_feature (1)..(245): Homolog of NCBI NO: 15231006 NR Description: protein phosphatase; protein id: At3g19980.1, by cDNA: gi_14582205, supported by cDNA: gi_17381248, supported cDNA: gi_20453382 [Arabidopsis thaliana]
  misc_feature (1)..(245): Homolog of NCBI NO: 7488629 NR Description: phosphoprotein phosphatase (EC 3.1.3.16) - apple >gi|1143511|emb|CAA87385.1| Ser/Thr protein phosphatase to PPX [Malus x domestica] >gi|1586034|prf||2202340A Ser/Thr
  misc_feature (1)..(245): Homolog of NCBI NO: 20385063 NR Description: serine/threonine protein phosphatase 2A [Pisum
  misc_feature (1)..(245): Homolog of NCBI NO: 34911376 NR Description: putative Ser/Thr protein phosphatase [Oryza
  misc_feature (1)..(244): Homolog of NCBI NO: 5759301 NR Description: protein phosphatase 6 catalytic subunit
  misc_feature (1)..(244): Homolog of NCBI NO: 28829192 NR Description: similar to Dictyostelium discoideum (Slime mold). phosphatase 6 catalytic subunit (EC 3.1.3.16) (Serine/threonine
  misc_feature (1)..(245): Homolog of NCBI NO: 21312758 NR Description: RIKEN cDNA 2310003C10 [Mus musculus] Similar to protein phosphatase 6, catalytic subunit [Mus >gi|12832985|dbj|BAB22339.1| unnamed protein product [Mus
  misc_feature (1)..(245): Homolog of NCBI NO: 4506029 NR Description: protein phosphatase 6, catalytic subunit; protein phosphatase catalytic subunit [Homo sapiens] Serine/threonine protein phosphatase 6 (PP6)
  misc_feature (1)..(245): Homolog of NCBI NO: 1071868 NR Description: phosphoprotein phosphatase (EC 3.1.3.16) PPV - rat
MKLFQTGGHVPETNYIFMGDFVDRGYNSLEVFTILLLLKARHPANITLLRGNHESRQLTQVYGFYDECQRKYGNANAWRYCTDVFDYLTLSAIIDGTVLCVHGGLSPDVRTIDQIRLIERNCEIPHEGPFCDLMWSDPEDIETWAVSPRGAGWLFGSRVTTEFNHINNLDLVCRAHQLVQEGLKYMFQDKGLVTVWSAPNYCYRCGNVASILSFNDNMEREVKFFTETEENNQMRGPRTGVPYFL

SEQ ID NO: 71890 - protein, 228 aa, Arabidopsis thaliana; identical to SEQ ID NO: 23042
  peptide (1)..(228): Ceres Seq. ID no. 4902439
  misc_feature (1)..(163): Pfam Name: Calcineurin-like phosphoesterase Pfam Description: Calcineurin-like phosphoesterase
  misc_feature (1)..(228): Homolog of NCBI NO: 15222945 NR Description: serine/threonine protein phosphatase; protein id: supported by cDNA: 35230., supported by cDNA: gi_16226939 thaliana] >gi|25752349|pir||H96539 phosphoprotein phosphatase
  misc_feature (1)..(228): Homolog of NCBI NO: 15231006 NR Description: protein phosphatase; protein id: At3g19980.1, by cDNA: gi_14582205, supported by cDNA: gi_17381248, supported cDNA: gi_20453382 [Arabidopsis thaliana]
  misc_feature (1)..(228): Homolog of NCBI NO: 7488629 NR Description: phosphoprotein phosphatase (EC 3.1.3.16) - apple >gi|1143511|emb|CAA87385.1| Ser/Thr protein phosphatase to PPX [Malus x domestica] >gi|1586034|prf||2202340A Ser/Thr
  misc_feature (1)..(228): Homolog of NCBI NO: 20385063 NR Description: serine/threonine protein phosphatase 2A [Pisum
  misc_feature (1)..(228): Homolog of NCBI NO: 34911376 NR Description: putative Ser/Thr protein phosphatase [Oryza
  misc_feature (1)..(227): Homolog of NCBI NO: 5759301 NR Description: protein phosphatase 6 catalytic subunit
  misc_feature (1)..(227): Homolog of NCBI NO: 28829192 NR Description: similar to Dictyostelium discoideum (Slime mold). phosphatase 6 catalytic subunit (EC 3.1.3.16) (Serine/threonine
  misc_feature (1)..(228): Homolog of NCBI NO: 21312758 NR Description: RIKEN cDNA 2310003C10 [Mus musculus] Similar to protein phosphatase 6, catalytic subunit [Mus >gi|12832985|dbj|BAB22339.1| unnamed protein product [Mus
  misc_feature (1)..(228): Homolog of NCBI NO: 4506029 NR Description: protein phosphatase 6, catalytic subunit; protein phosphatase catalytic subunit [Homo sapiens] Serine/threonine protein phosphatase 6 (PP6)
  misc_feature (1)..(228): Homolog of NCBI NO: 1071868 NR Description: phosphoprotein phosphatase (EC 3.1.3.16) PPV - rat

SEQ ID NO: 71891 - DNA, 970 bp, Arabidopsis thaliana
  misc_feature (1)..(970): Ceres Seq. ID no. 4902493
  misc_feature: MA Experiment ID: 108433 Result: Up-regulated in Transcription
  misc_feature: MA Experiment 108433 PARAMETER Experiment Name: At_rhl_Mutant2_cDNA_P Parameter: Age (day) Value: 7
  misc_feature: MA Experiment 108433 PARAMETER Experiment Name: At_rhl_Mutant2_cDNA_P Parameter: Organism Value: A. thaliana
  misc_feature: MA Experiment 108433 PARAMETER Experiment Name: At_rhl_Mutant2_cDNA_P Parameter: Plant Line Value: rhl Mutant vs. wt landsburg
  misc_feature: MA Experiment 108433 PARAMETER Experiment Name: At_rhl_Mutant2_cDNA_P Parameter: Tissue Value: Roots
  misc_feature: MA Experiment ID: 108434 Result: Up-regulated in Transcription
  misc_feature: MA Experiment 108434 PARAMETER Experiment Name: At_Root_Tips_cDNA_P Parameter: Tissue Value: Root Tips
  misc_feature: MA Experiment ID: 108462 Result: Down-regulated in Transcription
  misc_feature: MA Experiment 108462 PARAMETER Experiment Name: At_Germinating_Seeds_cDNA_P Parameter: Age (day) Value: 2 vs. 0
  misc_feature: MA Experiment 108462 PARAMETER Experiment Name: At_Germinating_Seeds_cDNA_P Parameter: Tissue Value: Germinating Seeds
  misc_feature: MA Experiment ID: 108463 Result: Down-regulated in Transcription
  misc_feature: MA Experiment 108463 PARAMETER Experiment Name: At_Germinating_Seeds_cDNA_P Parameter: Age (day) Value: 3 vs. 0
  misc_feature: MA Experiment 108463 PARAMETER Experiment Name: At_Germinating_Seeds_cDNA_P Parameter: Tissue Value: Germinating Seeds
  misc_feature: MA Experiment ID: 108464 Result: Down-regulated in Transcription
  misc_feature: MA Experiment 108464 PARAMETER Experiment Name: At_Germinating_Seeds_cDNA_P Parameter: Age (day) Value: 4 vs. 0
  misc_feature: MA Experiment 108464 PARAMETER Experiment Name: At_Germinating_Seeds_cDNA_P Parameter: Tissue Value: Germinating Seeds
  misc_feature: MA Experiment ID: 108561 Result: Down-regulated in Transcription
  misc_feature: MA Experiment 108561 PARAMETER Experiment Name: At_100uM_ABA_cDNA_P Parameter: Timepoint (hr) Value: 6
  misc_feature: MA Experiment 108561 PARAMETER Experiment Name: At_100uM_ABA_cDNA_P Parameter: Tissue Value: Aerial
  misc_feature: MA Experiment 108561 PARAMETER Experiment Name: At_100uM_ABA_cDNA_P Parameter: Treatment Value: 100uM ABA vs. No Treatment
  misc_feature: MA Experiment ID: 108573 Result: Down-regulated in Transcription
  misc_feature: MA Experiment 108573 PARAMETER Experiment Name: At_Drought_cDNA_P Parameter: Timepoint (hr) Value: 6
  misc_feature: MA Experiment 108573 PARAMETER Experiment Name: At_Drought_cDNA_P Parameter: Tissue Value: Aerial
  misc_feature: MA Experiment 108573 PARAMETER Experiment Name: At_Drought_cDNA_P Parameter: Treatment Value: Drought vs. No Drought
  misc_feature: MA Experiment ID: 108585 Result: Down-regulated in Transcription
  misc_feature: MA Experiment 108585 PARAMETER Experiment Name: At_5mM_NaNP_cDNA_P Parameter: Timepoint (hr) Value: 6
  misc_feature: MA Experiment 108585 PARAMETER Experiment Name: At_5mM_NaNP_cDNA_P Parameter: Tissue Value: Aerial
  misc_feature: MA Experiment 108585 PARAMETER Experiment Name: At_5mM_NaNP_cDNA_P Parameter: Treatment Value: null
  misc_feature: MA Experiment ID: 20000169 Result: Down-regulated in Transcription
  misc_feature: MA Experiment 20000169 PARAMETER Experiment Name: At_100uM_ABA_P Parameter: Age (day) Value: 14
  misc_feature: MA Experiment 20000169 PARAMETER Experiment Name: At_100uM_ABA_P Parameter: Organism Value: A. thaliana
  misc_feature: MA Experiment 20000169 PARAMETER Experiment Name: At_100uM_ABA_P Parameter: Plant Line Value: WS
  misc_feature: MA Experiment 20000169 PARAMETER Experiment Name: At_100uM_ABA_P Parameter: Timepoint (hr) Value: 6
  misc_feature: MA Experiment 20000169 PARAMETER Experiment Name: At_100uM_ABA_P Parameter: Tissue Value: Aerial
  misc_feature: MA Experiment 20000169 PARAMETER Experiment Name: At_100uM_ABA_P Parameter: Treatment Value: 100uM ABA vs. No Treatment
  misc_feature: MA Experiment ID: 20000182 Result: Down-regulated in Transcription
  misc_feature: MA Experiment 20000182 PARAMETER Experiment Name: At_2mM_SA_P Parameter: Age (day) Value: 14
  misc_feature: MA Experiment 20000182 PARAMETER Experiment Name: At_2mM_SA_P Parameter: Organism Value: A. thaliana
  misc_feature: MA Experiment 20000182 PARAMETER Experiment Name: At_2mM_SA_P Parameter: Plant Line Value: WS
  misc_feature: MA Experiment 20000182 PARAMETER Experiment Name: At_2mM_SA_P Parameter: Timepoint (hr) Value: 6
  misc_feature: MA Experiment 20000182 PARAMETER Experiment Name: At_2mM_SA_P Parameter: Tissue Value: Aerial
  misc_feature: MA Experiment 20000182 PARAMETER Experiment Name: At_2mM_SA_P Parameter: Treatment Value: 2mM SA vs. No Treatment
  misc_feature: MA Experiment ID: 20000185 Result: Down-regulated in Transcription
  misc_feature: MA Experiment 20000185 PARAMETER Experiment Name: At_Roots__P Parameter: Age (day) Value: 7 vs. 21
  misc_feature: MA Experiment 20000185 PARAMETER Experiment Name: At_Roots__P Parameter: Organism Value: A. thaliana
  misc_feature: MA Experiment 20000185 PARAMETER Experiment Name: At_Roots__P Parameter: Tissue Value: Roots vs. Whole Plant
  misc_feature: MA Experiment ID: 20000227 Result: Up-regulated in Transcription
  misc_feature: MA Experiment 20000227 PARAMETER Experiment Name: At_Root-Tips-vs-Tops_P Parameter: Tissue Value: Root Tips vs. Root Tops
  misc_feature: MA Experiment ID: 20000234 Result: Up-regulated in Transcription
  misc_feature: MA Experiment 20000234 PARAMETER Experiment Name: At_Siliques_P Parameter: Age (day) Value: 21
  misc_feature: MA Experiment 20000234 PARAMETER Experiment Name: At_Siliques_P Parameter: Organism Value: A. thaliana
  misc_feature: MA Experiment 20000234 PARAMETER Experiment Name: At_Siliques_P Parameter: Plant Line Value: WS
  misc_feature: MA Experiment 20000234 PARAMETER Experiment Name: At_Siliques_P Parameter: Tissue Value: Less Than 5mm Siliques vs. Whole Plant
  misc_feature: MA Experiment ID: 20000437 Result: Down-regulated in Transcription
  misc_feature: MA Experiment 20000437 PARAMETER Experiment Name: At_Drought_P Parameter: Age (day) Value: 8
  misc_feature: MA Experiment 20000437 PARAMETER Experiment Name: At_Drought_P Parameter: Organism Value: A. thaliana
  misc_feature: MA Experiment 20000437 PARAMETER Experiment Name: At_Drought_P Parameter: Plant Line Value: WS
  misc_feature: MA Experiment 20000437 PARAMETER Experiment Name: At_Drought_P Parameter: Timepoint (hr) Value: 24
  misc_feature: MA Experiment 20000437 PARAMETER Experiment Name: At_Drought_P Parameter: Tissue Value: Whole Plant
  misc_feature: MA Experiment 20000437 PARAMETER Experiment Name: At_Drought_P Parameter: Treatment Value: Drought vs. No Drought
  misc_feature: MA Experiment ID: 20000439 Result: Down-regulated in Transcription
  misc_feature: MA Experiment 20000439 PARAMETER Experiment Name: At_Roots__P Parameter: Age (day) Value: 14 vs. 21
  misc_feature: MA Experiment 20000439 PARAMETER Experiment Name: At_Roots__P Parameter: Organism Value: A. thaliana
  misc_feature: MA Experiment 20000439 PARAMETER Experiment Name: At_Roots__P Parameter: Tissue Value: Roots vs. Whole Plant
  misc_feature: MA Experiment ID: 20000527 Result: Up-regulated in Transcription
  misc_feature: MA Experiment 20000527 PARAMETER Experiment Name: At_10percent_PEG_P Parameter: Age (day) Value: 20
  misc_feature: MA Experiment 20000527 PARAMETER Experiment Name: At_10percent_PEG_P Parameter: Organism Value: A. thaliana
  misc_feature: MA Experiment 20000527 PARAMETER Experiment Name: At_10percent_PEG_P Parameter: Plant Line Value: WS
  misc_feature: MA Experiment 20000527 PARAMETER Experiment Name: At_10percent_PEG_P Parameter: Timepoint (day) Value: 20
  misc_feature: MA Experiment 20000527 PARAMETER Experiment Name: At_10percent_PEG_P Parameter: Tissue Value: Whole Plant
  misc_feature: MA Experiment 20000527 PARAMETER Experiment Name: At_10percent_PEG_P Parameter: Treatment Value: 10percent PEG vs. No Treatment
  misc_feature: MA Experiment ID: 20001450 Result: Down-regulated in Transcription
  misc_feature: MA Experiment 20001450 PARAMETER Experiment Name: At_Far-red-induction_P Parameter: Age (day) Value: 7
  misc_feature: MA Experiment 20001450 PARAMETER Experiment Name: At_Far-red-induction_P Parameter: Light Value: Far-red vs. White
  misc_feature: MA Experiment 20001450 PARAMETER Experiment Name: At_Far-red-induction_P Parameter: Organism Value: A. thaliana
  misc_feature: MA Experiment 20001450 PARAMETER Experiment Name: At_Far-red-induction_P Parameter: Plant Line Value: Columbia
  misc_feature: MA Experiment 20001450 PARAMETER Experiment Name: At_Far-red-induction_P Parameter: Timepoint (hr) Value: 8
  misc_feature: MA Experiment 20001450 PARAMETER Experiment Name: At_Far-red-induction_P Parameter: Tissue Value: Whole Plant
  misc_feature: MA Experiment ID: 20001556 Result: Up-regulated in Transcription
  misc_feature: MA Experiment 20001556 PARAMETER Experiment Name: At_Drought_Soil_Dry_P Parameter: Age (day) Value: 26
  misc_feature: MA Experiment 20001556 PARAMETER Experiment Name: At_Drought_Soil_Dry_P Parameter: Organism Value: A. thaliana
  misc_feature: MA Experiment 20001556 PARAMETER Experiment Name: At_Drought_Soil_Dry_P Parameter: Plant Line Value: WS
  misc_feature: MA Experiment 20001556 PARAMETER Experiment Name: At_Drought_Soil_Dry_P Parameter: Post Timepoint (hr) Value: None
  misc_feature: MA Experiment 20001556 PARAMETER Experiment Name: At_Drought_Soil_Dry_P Parameter: Post-Treatment Value: None
  misc_feature: MA Experiment 20001556 PARAMETER Experiment Name: At_Drought_Soil_Dry_P Parameter: Timepoint (day) Value: 12
  misc_feature: MA Experiment 20001556 PARAMETER Experiment Name: At_Drought_Soil_Dry_P Parameter: Treatment Value: Drought vs. No Drought
  misc_feature: MA Experiment ID: 20001557 Result: Up-regulated in Transcription
  misc_feature: MA Experiment 20001557 PARAMETER Experiment Name: At_Drought_Soil_Dry_P Parameter: Age (day) Value: 27
  misc_feature: MA Experiment 20001557 PARAMETER Experiment Name: At_Drought_Soil_Dry_P Parameter: Organism Value: A. thaliana
  misc_feature: MA Experiment 20001557 PARAMETER Experiment Name: At_Drought_Soil_Dry_P Parameter: Plant Line Value: WS
  misc_feature: MA Experiment 20001557 PARAMETER Experiment Name: At_Drought_Soil_Dry_P Parameter: Post Timepoint (hr) Value: 3
  misc_feature: MA Experiment 20001557 PARAMETER Experiment Name: At_Drought_Soil_Dry_P Parameter: Post-Treatment Value: Re-Water vs. No Drought
  misc_feature: MA Experiment 20001557 PARAMETER Experiment Name: At_Drought_Soil_Dry_P Parameter: Timepoint (day) Value: 13
  misc_feature: MA Experiment 20001557 PARAMETER Experiment Name: At_Drought_Soil_Dry_P Parameter: Treatment Value: Drought vs. No Drought
  misc_feature: MA Experiment ID: 20001558 Result: Up-regulated in Transcription
  misc_feature: MA Experiment 20001558 PARAMETER Experiment Name: At_Drought_Soil_Dry_P Parameter: Age (day) Value: 27
  misc_feature: MA Experiment 20001558 PARAMETER Experiment Name: At_Drought_Soil_Dry_P Parameter: Organism Value: A. thaliana
  misc_feature: MA Experiment 20001558 PARAMETER Experiment Name: At_Drought_Soil_Dry_P Parameter: Plant Line Value: WS
  misc_feature: MA Experiment 20001558 PARAMETER Experiment Name: At_Drought_Soil_Dry_P Parameter: Post Timepoint (hr) Value: 6
  misc_feature: MA Experiment 20001558 PARAMETER Experiment Name: At_Drought_Soil_Dry_P Parameter: Post-Treatment Value: Re-Water vs. No Drought
  misc_feature: MA Experiment 20001558 PARAMETER Experiment Name: At_Drought_Soil_Dry_P Parameter: Timepoint (day) Value: 13
  misc_feature: MA Experiment 20001558 PARAMETER Experiment Name: At_Drought_Soil_Dry_P Parameter: Treatment Value: Drought vs. No Drought
  misc_feature: MA Experiment ID: 20001560 Result: Up-regulated in Transcription
  misc_feature: MA Experiment 20001560 PARAMETER Experiment Name: At_Drought_Soil_Dry_P Parameter: Age (day) Value: 28
  misc_feature: MA Experiment 20001560 PARAMETER Experiment Name: At_Drought_Soil_Dry_P Parameter: Organism Value: A. thaliana
  misc_feature: MA Experiment 20001560 PARAMETER Experiment Name: At_Drought_Soil_Dry_P Parameter: Plant Line Value: WS
  misc_feature: MA Experiment 20001560 PARAMETER Experiment Name: At_Drought_Soil_Dry_P Parameter: Post Timepoint (hr) Value: None
  misc_feature: MA Experiment 20001560 PARAMETER Experiment Name: At_Drought_Soil_Dry_P Parameter: Post-Treatment Value: None
  misc_feature: MA Experiment 20001560 PARAMETER Experiment Name: At_Drought_Soil_Dry_P Parameter: Timepoint (day) Value: 14
  misc_feature: MA Experiment 20001560 PARAMETER Experiment Name: At_Drought_Soil_Dry_P Parameter: Treatment Value: Drought vs. No Drought
  misc_feature: MA Experiment ID: 20001757 Result: Up-regulated in Transcription
  misc_feature: MA Experiment 20001757 PARAMETER Experiment Name: At_50mM_NH4NO3_L-to-H_P Parameter: Timepoint (hr) Value: 6
  misc_feature: MA Experiment 20001757 PARAMETER Experiment Name: At_50mM_NH4NO3_L-to-H_P Parameter: Tissue Value: Leaf
  misc_feature: MA Experiment 20001757 PARAMETER Experiment Name: At_50mM_NH4NO3_L-to-H_P Parameter: Treatment Value: 50mM NH4NO3 vs 100mM Mannitol
gaacaggatctgttctataggctcgtacctctgtttccttgatttctaaggagacaggccctaaaccctggttgatgaaccatgaccgtgcggtcagagcgtgattgatggctacgatcgtcttcggacgcatccggtgctgtagaggatcgttactcggcttggtcttccttgccggggtggtcgcacggcggtctgacagaaaacaagagataaggttgaagagtgaagcaaagcttagtaatggcttcaatgcacgaagctctgttctcttctcggcttcttcaagtcaattcttctttttccttccgttgcgctcttccaattatctcttcaccagctgcagtatcttgcgcaatcaaatcgacccagttttttaaacagcgttgtagaaccaaagtgagggacttttctctatcttcactgtcccggagagggttcgtttgcagagctgctgagtacaagtttccggatcccatacctgaattcgccgaagctgagactgagaaatttagggaccatatgttaaacaaactatcaaaaagagatctttttgaagactctgttgatgaaattgttggagtctgcactgagatcttcgagacgttcttgcgcagtgagtatggaggacctggtacactcttggtgatacctttcattgacatggcagatactctcaacgaaagggaattgcctggaggtccacaagccgcccgagcagctattaaatgggctcaggatcatgtagacaaggactggaaggaatggaccggcactgattagtcccctgggagcattaagtataatccgtgagttatttagtttagtagtggggtagcagatgtgtcattgtaaaactctgattactatgtcgtgaagcacttaatctttgatcaaaaactgtttggtgtaaacttgtccaaacgactggaaacaagaaaaagaaaagatggcaaaagctttttattgt

SEQ ID NO: 71892 - protein, 179 aa, Arabidopsis thaliana
  peptide (1)..(179): Ceres Seq. ID no. 4902494
  misc_feature (1)..(179): Homolog of NCBI NO: 18391169 NR Description: Expressed protein; protein id: At1g10522.1, by cDNA: 264189. [Arabidopsis thaliana] T10O24.14 [Arabidopsis thaliana] >gi|21554792|gb|AAM63692.1|
MASMHEALFSSRLLQVNSSFSFRCALPIISSPAAVSCAIKSTQFFKQRCRTKVRDFSLSSLSRRGFVCRAAEYKFPDPIPEFAEAETEKFRDHMLNKLSKRDLFEDSVDEIVGVCTEIFETFLRSEYGGPGTLLVIPFIDMADTLNERELPGGPQAARAAIKWAQDHVDKDWKEWTGTD

SEQ ID NO: 71893 - protein, 176 aa, Arabidopsis thaliana
  peptide (1)..(176): Ceres Seq. ID no. 4902495
  misc_feature (1)..(176): Homolog of NCBI NO: 18391169 NR Description: Expressed protein; protein id: At1g10522.1, by cDNA: 264189. [Arabidopsis thaliana] T10O24.14 [Arabidopsis thaliana] >gi|21554792|gb|AAM63692.1|
MHEALFSSRLLQVNSSFSFRCALPIISSPAAVSCAIKSTQFFKQRCRTKVRDFSLSSLSRRGFVCRAAEYKFPDPIPEFAEAETEKFRDHMLNKLSKRDLFEDSVDEIVGVCTEIFETFLRSEYGGPGTLLVIPFIDMADTLNERELPGGPQAARAAIKWAQDHVDKDWKEWTGTD

SEQ ID NO: 71894 - protein, 90 aa, Arabidopsis thaliana; identical to SEQ ID NO: 37069
  peptide (1)..(90): Ceres Seq. ID no. 4902496

SEQ ID NO: 71895 - DNA, 1068 bp, Arabidopsis thaliana
  misc_feature (1)..(1068): Ceres Seq. ID no. 4903808
  misc_feature: MA Experiment ID: 108434 Result: Down-regulated in Transcription
  misc_feature: MA Experiment 108434 PARAMETER Experiment Name: At_Root_Tips_cDNA_P Parameter: Tissue Value: Root Tips
  misc_feature: MA Experiment ID: 108461 Result: Up-regulated in Transcription
  misc_feature: MA Experiment 108461 PARAMETER Experiment Name: At_Germinating_Seeds_cDNA_P Parameter: Age (day) Value: 1 vs. 0
  misc_feature: MA Experiment 108461 PARAMETER Experiment Name: At_Germinating_Seeds_cDNA_P Parameter: Tissue Value: Germinating Seeds
  misc_feature: MA Experiment ID: 108462 Result: Up-regulated in Transcription
  misc_feature: MA Experiment 108462 PARAMETER Experiment Name: At_Germinating_Seeds_cDNA_P Parameter: Age (day) Value: 2 vs. 0
  misc_feature: MA Experiment 108462 PARAMETER Experiment Name: At_Germinating_Seeds_cDNA_P Parameter: Tissue Value: Germinating Seeds
  misc_feature: MA Experiment ID: 108463 Result: Up-regulated in Transcription
  misc_feature: MA Experiment 108463 PARAMETER Experiment Name: At_Germinating_Seeds_cDNA_P Parameter: Age (day) Value: 3 vs. 0
  misc_feature: MA Experiment 108463 PARAMETER Experiment Name: At_Germinating_Seeds_cDNA_P Parameter: Tissue Value: Germinating Seeds
  misc_feature: MA Experiment ID: 108464 Result: Up-regulated in Transcription
  misc_feature: MA Experiment 108464 PARAMETER Experiment Name: At_Germinating_Seeds_cDNA_P Parameter: Age (day) Value: 4 vs. 0
  misc_feature: MA Experiment 108464 PARAMETER Experiment Name: At_Germinating_Seeds_cDNA_P Parameter: Tissue Value: Germinating Seeds
  misc_feature: MA Experiment ID: 108561 Result: Up-regulated in Transcription
  misc_feature: MA Experiment 108561 PARAMETER Experiment Name: At_100uM_ABA_cDNA_P Parameter: Timepoint (hr) Value: 6
  misc_feature: MA Experiment 108561 PARAMETER Experiment Name: At_100uM_ABA_cDNA_P Parameter: Tissue Value: Aerial
  misc_feature: MA Experiment 108561 PARAMETER Experiment Name: At_100uM_ABA_cDNA_P Parameter: Treatment Value: 100uM ABA vs. No Treatment
  misc_feature: MA Experiment ID: 108576 Result: Down-regulated in Transcription
  misc_feature: MA Experiment 108576 PARAMETER Experiment Name: At_42deg_Heat_cDNA_P Parameter: Temperature (deg C) Value: 42 vs. 22
  misc_feature: MA Experiment 108576 PARAMETER Experiment Name: At_42deg_Heat_cDNA_P Parameter: Timepoint (hr) Value: 1
  misc_feature: MA Experiment 108576 PARAMETER Experiment Name: At_42deg_Heat_cDNA_P Parameter: Tissue Value: Aerial
  misc_feature: MA Experiment ID: 108594 Result: Up-regulated in Transcription
  misc_feature: MA Experiment 108594 PARAMETER Experiment Name: At_Ler-rhl_Root_cDNA_P Parameter: Plant Line Value: null
  misc_feature: MA Experiment ID: 108595 Result: Up-regulated in Transcription
  misc_feature: MA Experiment 108595 PARAMETER Experiment Name: At_Ler-pi_Ovule_cDNA_P Parameter: Plant Line Value: null
  misc_feature: MA Experiment ID: 108605 Result: Up-regulated in Transcription
  misc_feature: MA Experiment 108605 PARAMETER Experiment Name: At_100uM_ABA_cDNA_P Parameter: Timepoint (hr) Value: 6
  misc_feature: MA Experiment 108605 PARAMETER Experiment Name: At_100uM_ABA_cDNA_P Parameter: Tissue Value: Aerial
  misc_feature: MA Experiment 108605 PARAMETER Experiment Name: At_100uM_ABA_cDNA_P Parameter: Treatment Value: 100uM ABA vs. No Treatment
  misc_feature: MA Experiment ID: 108607 Result: Up-regulated in Transcription
  misc_feature: MA Experiment 108607 PARAMETER Experiment Name: At_100uM_ABA_cDNA_P Parameter: Timepoint (hr) Value: 4
  misc_feature: MA Experiment 108607 PARAMETER Experiment Name: At_100uM_ABA_cDNA_P Parameter: Tissue Value: Aerial
  misc_feature: MA Experiment 108607 PARAMETER Experiment Name: At_100uM_ABA_cDNA_P Parameter: Treatment Value: 100uM ABA vs. No Treatment
  misc_feature: MA Experiment ID: 108608 Result: Up-regulated in Transcription
  misc_feature: MA Experiment 108608 PARAMETER Experiment Name: At_100uM_ABA_cDNA_P Parameter: Timepoint (hr) Value: 1
  misc_feature: MA Experiment 108608 PARAMETER Experiment Name: At_100uM_ABA_cDNA_P Parameter: Tissue Value: Aerial
  misc_feature: MA Experiment 108608 PARAMETER Experiment Name: At_100uM_ABA_cDNA_P Parameter: Treatment Value: 100uM ABA vs. No Treatment
  misc_feature: MA Experiment ID: 108609 Result: Up-regulated in Transcription
  misc_feature: MA Experiment 108609 PARAMETER Experiment Name: At_100uM_ABA_cDNA_P Parameter: Timepoint (hr) Value: 24
  misc_feature: MA Experiment 108609 PARAMETER Experiment Name: At_100uM_ABA_cDNA_P Parameter: Tissue Value: Aerial
  misc_feature: MA Experiment 108609 PARAMETER Experiment Name: At_100uM_ABA_cDNA_P Parameter: Treatment Value: 100uM ABA vs. No Treatment
  misc_feature: MA Experiment ID: 108668 Result: Down-regulated in Transcription
  misc_feature: MA Experiment 108668 PARAMETER Experiment Name: At_2mM_SA_cDNA_P Parameter: Plant Line Value: WS
  misc_feature: MA Experiment 108668 PARAMETER Experiment Name: At_2mM_SA_cDNA_P Parameter: Timepoint (hr) Value: 6
  misc_feature: MA Experiment 108668 PARAMETER Experiment Name: At_2mM_SA_cDNA_P Parameter: Treatment Value: 2mM SA vs. No Treatment
  misc_feature: MA Experiment ID: 20000089 Result: Down-regulated in Transcription
  misc_feature: MA Experiment ID: 20000090 Result: Down-regulated in Transcription
  misc_feature: MA Experiment ID: 20000166 Result: Up-regulated in Transcription
  misc_feature: MA Experiment 20000166 PARAMETER Experiment Name: At_100uM_ABA_P Parameter: Age (day) Value: 14
  misc_feature: MA Experiment 20000166 PARAMETER Experiment Name: At_100uM_ABA_P Parameter: Organism Value: A. thaliana
  misc_feature: MA Experiment 20000166 PARAMETER Experiment Name: At_100uM_ABA_P Parameter: Plant Line Value: WS
  misc_feature: MA Experiment 20000166 PARAMETER Experiment Name: At_100uM_ABA_P Parameter: Timepoint (hr) Value: 1
  misc_feature: MA Experiment 20000166 PARAMETER Experiment Name: At_100uM_ABA_P Parameter: Tissue Value: Aerial
  misc_feature: MA Experiment 20000166 PARAMETER Experiment Name: At_100uM_ABA_P Parameter: Treatment Value: 100uM ABA vs. No Treatment
  misc_feature: MA Experiment ID: 20000169 Result: Up-regulated in Transcription
  misc_feature: MA Experiment 20000169 PARAMETER Experiment Name: At_100uM_ABA_P Parameter: Age (day) Value: 14
  misc_feature: MA Experiment 20000169 PARAMETER Experiment Name: At_100uM_ABA_P Parameter: Organism Value: A. thaliana
  misc_feature: MA Experiment 20000169 PARAMETER Experiment Name: At_100uM_ABA_P Parameter: Plant Line Value: WS
  misc_feature: MA Experiment 20000169 PARAMETER Experiment Name: At_100uM_ABA_P Parameter: Timepoint (hr) Value: 6
  misc_feature: MA Experiment 20000169 PARAMETER Experiment Name: At_100uM_ABA_P Parameter: Tissue Value: Aerial
  misc_feature: MA Experiment 20000169 PARAMETER Experiment Name: At_100uM_ABA_P Parameter: Treatment Value: 100uM ABA vs. No Treatment
  misc_feature: MA Experiment ID: 20000180 Result: Up-regulated in Transcription
  misc_feature: MA Experiment 20000180 PARAMETER Experiment Name: At_Germinating_Seeds_P Parameter: Age (hr) Value: 24 vs. 0
  misc_feature: MA Experiment 20000180 PARAMETER Experiment Name: At_Germinating_Seeds_P Parameter: Tissue Value: Germinating Seeds
  misc_feature: MA Experiment ID: 20000182 Result: Down-regulated in Transcription
  misc_feature: MA Experiment 20000182 PARAMETER Experiment Name: At_2mM_SA_P Parameter: Age (day) Value: 14
  misc_feature: MA Experiment 20000182 PARAMETER Experiment Name: At_2mM_SA_P Parameter: Organism Value: A. thaliana
  misc_feature: MA Experiment 20000182 PARAMETER Experiment Name: At_2mM_SA_P Parameter: Plant Line Value: WS
  misc_feature: MA Experiment 20000182 PARAMETER Experiment Name: At_2mM_SA_P Parameter: Timepoint (hr) Value: 6
  misc_feature: MA Experiment 20000182 PARAMETER Experiment Name: At_2mM_SA_P Parameter: Tissue Value: Aerial
  misc_feature: MA Experiment 20000182 PARAMETER Experiment Name: At_2mM_SA_P Parameter: Treatment Value: 2mM SA vs. No Treatment
  misc_feature: MA Experiment ID: 20000213 Result: Up-regulated in Transcription
  misc_feature: MA Experiment 20000213 PARAMETER Experiment Name: At_4deg_Cold_P Parameter: Timepoint (hr) Value: 2
  misc_feature: MA Experiment ID: 20000224 Result: Up-regulated in Transcription
  misc_feature: MA Experiment ID: 20000227 Result: Down-regulated in Transcription
  misc_feature: MA Experiment 20000227 PARAMETER Experiment Name: At_Root-Tips-vs-Tops_P Parameter: Tissue Value: Root Tips vs. Root Tops
  misc_feature: MA Experiment ID: 20000573 Result: Down-regulated in Transcription
  misc_feature: MA Experiment 20000573 PARAMETER Experiment Name: At_100uM_ABA_Mutants__P Parameter: Organism Value: A. thaliana
  misc_feature: MA Experiment 20000573 PARAMETER Experiment Name: At_100uM_ABA_Mutants__P Parameter: Plant Line Value: CS22 vs. Ler wt
  misc_feature: MA Experiment 20000573 PARAMETER Experiment Name: At_100uM_ABA_Mutants__P Parameter: Timepoint (hr) Value: N/A
  misc_feature: MA Experiment 20000573 PARAMETER Experiment Name: At_100uM_ABA_Mutants__P Parameter: Tissue Value: Whole Plant
  misc_feature: MA Experiment 20000573 PARAMETER Experiment Name: At_100uM_ABA_Mutants__P Parameter: Treatment Value: None
  misc_feature: MA Experiment ID: 20000794 Result: Up-regulated in Transcription
  misc_feature: MA Experiment 20000794 PARAMETER Experiment Name: At_Petals_P Parameter: Age (day) Value: 23-25 days
  misc_feature: MA Experiment 20000794 PARAMETER Experiment Name: At_Petals_P Parameter: Plant Line Value: WS
  misc_feature: MA Experiment 20000794 PARAMETER Experiment Name: At_Petals_P Parameter: Tissue Value: Petals vs. Whole plant
  misc_feature: MA Experiment ID: 20001248 Result: Down-regulated in Transcription
  misc_feature: MA Experiment 20001248 PARAMETER Experiment Name: At_Far-red-induction_P Parameter: Age (day) Value: 7
  misc_feature: MA Experiment 20001248 PARAMETER Experiment Name: At_Far-red-induction_P Parameter: Light Value: Far-red vs. White
  misc_feature: MA Experiment 20001248 PARAMETER Experiment Name: At_Far-red-induction_P Parameter: Organism Value: A. thaliana
  misc_feature: MA Experiment 20001248 PARAMETER Experiment Name: At_Far-red-induction_P Parameter: Plant Line Value: Columbia
  misc_feature: MA Experiment 20001248 PARAMETER Experiment Name: At_Far-red-induction_P Parameter: Timepoint (hr) Value: 4
  misc_feature: MA Experiment 20001248 PARAMETER Experiment Name: At_Far-red-induction_P Parameter: Tissue Value: Whole Plant
  misc_feature: MA Experiment ID: 20001450 Result: Down-regulated in Transcription
  misc_feature: MA Experiment 20001450 PARAMETER Experiment Name: At_Far-red-induction_P Parameter: Age (day) Value: 7
  misc_feature: MA Experiment 20001450 PARAMETER Experiment Name: At_Far-red-induction_P Parameter: Light Value: Far-red vs. White
  misc_feature: MA Experiment 20001450 PARAMETER Experiment Name: At_Far-red-induction_P Parameter: Organism Value: A. thaliana
  misc_feature: MA Experiment 20001450 PARAMETER Experiment Name: At_Far-red-induction_P Parameter: Plant Line Value: Columbia
  misc_feature: MA Experiment 20001450 PARAMETER Experiment Name: At_Far-red-induction_P Parameter: Timepoint (hr) Value: 8
  misc_feature: MA Experiment 20001450 PARAMETER Experiment Name: At_Far-red-induction_P Parameter: Tissue Value: Whole Plant
  misc_feature: MA Experiment ID: 20001451 Result: Up-regulated in Transcription
  misc_feature: MA Experiment 20001451 PARAMETER Experiment Name: At_Far-red-induction_P Parameter: Age (day) Value: 7
  misc_feature: MA Experiment 20001451 PARAMETER Experiment Name: At_Far-red-induction_P Parameter: Light Value: Far-red vs. White
  misc_feature: MA Experiment 20001451 PARAMETER Experiment Name: At_Far-red-induction_P Parameter: Organism Value: A. thaliana
  misc_feature: MA Experiment 20001451 PARAMETER Experiment Name: At_Far-red-induction_P Parameter: Plant Line Value: Columbia
  misc_feature: MA Experiment 20001451 PARAMETER Experiment Name: At_Far-red-induction_P Parameter: Timepoint (hr) Value: 24
  misc_feature: MA Experiment 20001451 PARAMETER Experiment Name: At_Far-red-induction_P Parameter: Tissue Value: Whole Plant
  misc_feature: MA Experiment ID: 20001554 Result: Up-regulated in Transcription
  misc_feature: MA Experiment 20001554 PARAMETER Experiment Name: At_Drought_Soil_Dry_P Parameter: Age (day) Value: 21
  misc_feature: MA Experiment 20001554 PARAMETER Experiment Name: At_Drought_Soil_Dry_P Parameter: Organism Value: A. thaliana
  misc_feature: MA Experiment 20001554 PARAMETER Experiment Name: At_Drought_Soil_Dry_P Parameter: Plant Line Value: WS
  misc_feature: MA Experiment 20001554 PARAMETER Experiment Name: At_Drought_Soil_Dry_P Parameter: Post Timepoint (hr) Value: None
  misc_feature: MA Experiment 20001554 PARAMETER Experiment Name: At_Drought_Soil_Dry_P Parameter: Post-Treatment Value: None
  misc_feature: MA Experiment 20001554 PARAMETER Experiment Name: At_Drought_Soil_Dry_P Parameter: Timepoint (day) Value: 7
  misc_feature: MA Experiment 20001554 PARAMETER Experiment Name: At_Drought_Soil_Dry_P Parameter: Treatment Value: Drought vs. No Drought
  misc_feature: MA Experiment ID: 20001557 Result: Down-regulated in Transcription
  misc_feature: MA Experiment 20001557 PARAMETER Experiment Name: At_Drought_Soil_Dry_P Parameter: Age (day) Value: 27
  misc_feature: MA Experiment 20001557 PARAMETER Experiment Name: At_Drought_Soil_Dry_P Parameter: Organism Value: A. thaliana
  misc_feature: MA Experiment 20001557 PARAMETER Experiment Name: At_Drought_Soil_Dry_P Parameter: Plant Line Value: WS
  misc_feature: MA Experiment 20001557 PARAMETER Experiment Name: At_Drought_Soil_Dry_P Parameter: Post Timepoint (hr) Value: 3
  misc_feature: MA Experiment 20001557 PARAMETER Experiment Name: At_Drought_Soil_Dry_P Parameter: Post-Treatment Value: Re-Water vs. No Drought
  misc_feature: MA Experiment 20001557 PARAMETER Experiment Name: At_Drought_Soil_Dry_P Parameter: Timepoint (day) Value: 13
  misc_feature: MA Experiment 20001557 PARAMETER Experiment Name: At_Drought_Soil_Dry_P Parameter: Treatment Value: Drought vs. No Drought
  misc_feature: MA Experiment ID: 20001560 Result: Down-regulated in Transcription
  misc_feature: MA Experiment 20001560 PARAMETER Experiment Name: At_Drought_Soil_Dry_P Parameter: Age (day) Value: 28
  misc_feature: MA Experiment 20001560 PARAMETER Experiment Name: At_Drought_Soil_Dry_P Parameter: Organism Value: A. thaliana
  misc_feature: MA Experiment 20001560 PARAMETER Experiment Name: At_Drought_Soil_Dry_P Parameter: Plant Line Value: WS
  misc_feature: MA Experiment 20001560 PARAMETER Experiment Name: At_Drought_Soil_Dry_P Parameter: Post Timepoint (hr) Value: None
  misc_feature: MA Experiment 20001560 PARAMETER Experiment Name: At_Drought_Soil_Dry_P Parameter: Post-Treatment Value: None
  misc_feature: MA Experiment 20001560 PARAMETER Experiment Name: At_Drought_Soil_Dry_P Parameter: Timepoint (day) Value: 14
  misc_feature: MA Experiment 20001560 PARAMETER Experiment Name: At_Drought_Soil_Dry_P Parameter: Treatment Value: Drought vs. No Drought
  misc_feature: MA Experiment ID: 20001911 Result: Up-regulated in Transcription
  misc_feature: MA Experiment 20001911 PARAMETER Experiment Name: At_Drought_Reproduction_P Parameter: Age (day) Value: 40
  misc_feature: MA Experiment 20001911 PARAMETER Experiment Name: At_Drought_Reproduction_P Parameter: Organism Value: A. thaliana
  misc_feature: MA Experiment 20001911 PARAMETER Experiment Name: At_Drought_Reproduction_P Parameter: Plant Line Value: WS
  misc_feature: MA Experiment 20001911 PARAMETER Experiment Name: At_Drought_Reproduction_P Parameter: Timepoint (day) Value: 10
  misc_feature: MA Experiment 20001911 PARAMETER Experiment Name: At_Drought_Reproduction_P Parameter: Tissue Value: Flowers
  misc_feature: MA Experiment 20001911 PARAMETER Experiment Name: At_Drought_Reproduction_P Parameter: Treatment Value: Drought vs. No Drought
cccccacaccttctctttctcttagcatactctgctcttcctctctctgttgttctctgttccaaaggctttgagaaaaaatggagttcgagaaccggtacggacttgcaacgtcgcagaagtacgactgtctcttgttcgatttggacgatactctttatcctcttagctccggaatcgcaagagaatgtgggaacaacatcaaagattacatgaccgagaaactcggtatacctaaggacaaaatcgtcgaattgtctgatcttctatacaagaactatggaacaacaatggctggtcttagggcgatcggatatgaatttgactacgatgagtaccacagcttcgtccacggtcgtttaccctatgacaacataaaacccgaccttgttcttcgcagcctcttgcttagcctccctctccgcaaagtcatctttaccaacgcggacagagttcacgcggccaaggcgttgaagaagttgggattagaggattgtttcgaaggaatcatatgtttcgaaacgctaaacctcatgcacacaaacgctgcgtctaacaattccgagatttttgatatcgttggacattttaaccggtctgaaccggtcggttcacttcccaaaacgcctgttgtgtgtaaaccatctgaatctgctatcgagaaagctcttgaaatcgccaatattgatcctaaccgaacgctgttctttgaggacagtgtccgaaacgtacaagctggaaaacgcgttggtctttacacggttctggttggtaaatcgaccaaagtcaaaggagcggattacgcgttggaaaacattcacaacatgaaagaggcgataccggagttatgggaatccgacaggaaatcgtcggatgttggatattccggcaaggtcgccgttgagacttctgttagagcttaggaggagtactgtttcgccgttgtacctaattttccaccactgtcattttcattttcttttttcaaatgacgtaatgtcatttttgttttttttttcgacttgtgtttataaaagattaataaaaaatgagaaaataatttccatc

SEQ ID NO: 71896 - protein, 280 aa, Arabidopsis thaliana; identical to SEQ ID NO: 29464
  peptide (1)..(280): Ceres Seq. ID no. 4903809
  misc_feature (15)..(233): Pfam Name: haloacid dehalogenase-like hydrolase Pfam Description: haloacid dehalogenase-like hydrolase
  misc_feature (1)..(280): Homolog of NCBI NO: 15241720 NR Description: putative protein; protein id: At5g02230.1, by cDNA: 36724. [Arabidopsis thaliana] >gi|11358409|pir||T48244
  misc_feature (1)..(280): Homolog of NCBI NO: 21593165 NR Description: unknown [Arabidopsis thaliana]
  misc_feature (1)..(162): Homolog of NCBI NO: 7406669 NR Description: putative ripening-related protein [Vitis vinifera]
  misc_feature (148)..(280): Homolog of NCBI NO: 7406669 NR Description: putative ripening-related protein [Vitis vinifera]
  misc_feature (1)..(280): Homolog of NCBI NO: 8885554 NR Description: ripening-related protein-like; hydrolase-like
  misc_feature (1)..(280): Homolog of NCBI NO: 15238429 NR Description: putative ripening-related protein - like; protein
  misc_feature (1)..(276): Homolog of NCBI NO: 30697234 NR Description: haloacid dehalogenase-like hydrolase family
  misc_feature (1)..(276): Homolog of NCBI NO: 30697236 NR Description: haloacid dehalogenase-like hydrolase family
  misc_feature (1)..(276): Homolog of NCBI NO: 21618155 NR Description: putative ripening-related protein-like
  misc_feature (9)..(280): Homolog of NCBI NO: 40714684 NR Description: expressed protein [Oryza sativa (japonica

SEQ ID NO: 71897 - protein, 236 aa, Arabidopsis thaliana; identical to SEQ ID NO: 23607
  peptide (1)..(236): Ceres Seq. ID no. 4903810
  misc_feature (1)..(189): Pfam Name: haloacid dehalogenase-like hydrolase Pfam Description: haloacid dehalogenase-like hydrolase
  misc_feature (1)..(236): Homolog of NCBI NO: 15241720 NR Description: putative protein; protein id: At5g02230.1, by cDNA: 36724. [Arabidopsis thaliana] >gi|11358409|pir||T48244
  misc_feature (1)..(236): Homolog of NCBI NO: 21593165 NR Description: unknown [Arabidopsis thaliana]
  misc_feature (1)..(118): Homolog of NCBI NO: 7406669 NR Description: putative ripening-related protein [Vitis vinifera]
  misc_feature (104)..(236): Homolog of NCBI NO: 7406669 NR Description: putative ripening-related protein [Vitis vinifera]
  misc_feature (1)..(236): Homolog of NCBI NO: 8885554 NR Description: ripening-related protein-like; hydrolase-like
  misc_feature (1)..(236): Homolog of NCBI NO: 15238429 NR Description: putative ripening-related protein - like; protein
  misc_feature (1)..(232): Homolog of NCBI NO: 30697234 NR Description: haloacid dehalogenase-like hydrolase family
  misc_feature (1)..(232): Homolog of NCBI NO: 30697236 NR Description: haloacid dehalogenase-like hydrolase family
  misc_feature (1)..(232): Homolog of NCBI NO: 21618155 NR Description: putative ripening-related protein-like
  misc_feature (1)..(236): Homolog of NCBI NO: 40714684 NR Description: expressed protein [Oryza sativa (japonica

SEQ ID NO: 71898 - protein, 210 aa, Arabidopsis thaliana; identical to SEQ ID NO: 23608
  peptide (1)..(210): Ceres Seq. ID no. 4903811
  misc_feature (1)..(163): Pfam Name: haloacid dehalogenase-like hydrolase Pfam Description: haloacid dehalogenase-like hydrolase
  misc_feature (1)..(210): Homolog of NCBI NO: 15241720 NR Description: putative protein; protein id: At5g02230.1, by cDNA: 36724. [Arabidopsis thaliana] >gi|11358409|pir||T48244
  misc_feature (1)..(210): Homolog of NCBI NO: 21593165 NR Description: unknown [Arabidopsis thaliana]
  misc_feature (1)..(92): Homolog of NCBI NO: 7406669 NR Description: putative ripening-related protein [Vitis vinifera]
  misc_feature (78)..(210): Homolog of NCBI NO: 7406669 NR Description: putative ripening-related protein [Vitis vinifera]
  misc_feature (1)..(210): Homolog of NCBI NO: 8885554 NR Description: ripening-related protein-like; hydrolase-like
  misc_feature (1)..(210): Homolog of NCBI NO: 15238429 NR Description: putative ripening-related protein - like; protein
  misc_feature (1)..(206): Homolog of NCBI NO: 30697234 NR Description: haloacid dehalogenase-like hydrolase family
  misc_feature (1)..(206): Homolog of NCBI NO: 30697236 NR Description: haloacid dehalogenase-like hydrolase family
  misc_feature (1)..(206): Homolog of NCBI NO: 21618155 NR Description: putative ripening-related protein-like
  misc_feature (1)..(210): Homolog of NCBI NO: 40714684 NR Description: expressed protein [Oryza sativa (japonica

SEQ ID NO: 71899 - DNA, 1248 bp, Arabidopsis thaliana
  misc_feature (1)..(1248): Ceres Seq. ID no. 4903820
  misc_feature: MA Experiment ID: 20000224 Result: Down-regulated in Transcription
attctaaagatttttctctccggagacgttaagagaagaaacagccaacggattagggatcttaccgttctgcgattcgccgagtttgaagctttttttagagacttcaatggtgagccaaggaatggtatctcttacaaagtctctatgcactatgactccaagagtccgtctcaagaatccgaatatgttgcagaaactaaagactggatcttgtaatttccgtttcagaaatctccgtgtcttatgcacaccaaagctgtctcagtgggaaccgtcacctttcattcatgcttctgcagaagaagctgctgatatagtattggacaaaaccgcgaatgtgttcgaatctattgtctccgagagtgcagaggaagagaaagtagatatgtcagcgcaacaacgaactaattctcaagttcaggtacttaaatggccaatatggcttttgggtccatctgttctcctcacaagcggtatggcgcctactttatggcttccgttgtcatcggtttttctcggttccaacgtggttagtctactttctttgatcggtctagattgcattttcaatcttggagcaacccttttcctcttaatggctgattcttgcgcacgtcctaaagacccatcacagtcctgcaacagcaaaccaccatttagctataagttctggaacatgttttcactcataatcgggtttctagtcccaatgttacttctcttcggatcccaatctggccttctcgcttctctccagccccagattcctttcctctcgtccgctgttatcctcttcccgtacttcattctccttgctgttcagacattaacagagatcctcacatggcactggcaatcaccggtctggctagtcacaccagttgtctacgaggcttaccgaatcttgcaactgatgagagggttgacacttagtgcagaggtcaacgcaccggtttgggtggttcatatgcttcgtgggcttgtctcttggtgggtattgatcttgggaatgcaactcatgagagttgcttggtttgctggttttgcatctagaacaacaacaggtcagcaaccacaatctgttgcttctaagtaaagacagataaatgtttcttcgtttagtttttaaagtcatgtcaaagatttgtaactctttcttcactgtatagcttttattattcgtgggttggtgataaggattaaaaaaaaacacatattctttatgatcatattcgctcttttagt

SEQ ID NO: 71900 - protein, 329 aa, Arabidopsis thaliana
  peptide (1)..(329): Ceres Seq. ID no. 4903821
  misc_feature (1)..(329): Homolog of NCBI NO: 11281196 NR Description: hypothetical protein T8B10.250 - Arabidopsis >gi|7288007|emb|CAB81845.1| putative protein [Arabidopsis
  misc_feature (94)..(329): Homolog of NCBI NO: 30695235 NR Description: expressed protein [Arabidopsis thaliana]
  misc_feature (164)..(329): Homolog of NCBI NO: 30695238 NR Description: expressed protein [Arabidopsis thaliana] putative protein [Arabidopsis thaliana]
  misc_feature (40)..(319): Homolog of NCBI NO: 38605903 NR Description: OSJNBb0020O11.15 [Oryza sativa (japonica
  misc_feature (111)..(275): Homolog of NCBI NO: 34910348 NR Description: P0684B02.8 [Oryza sativa (japonica
  misc_feature (43)..(274): Homolog of NCBI NO: 15221197 NR Description: unknown protein; protein id: At1g48460.1
  misc_feature (142)..(297): Homolog of NCBI NO: 23127993 NR Description: hypothetical protein [Nostoc punctiforme]
MVSQGMVSLTKSLCTMTPRVRLKNPNMLQKLKTGSCNFRFRNLRVLCTPKLSQWEPSPFIHASAEEAADIVLDKTANVFESIVSESAEEEKVDMSAQQRTNSQVQVLKWPIWLLGPSVLLTSGMAPTLWLPLSSVFLGSNVVSLLSLIGLDCIFNLGATLFLLMADSCARPKDPSQSCNSKPPFSYKFWNMFSLIIGFLVPMLLLFGSQSGLLASLQPQIPFLSSAVILFPYFILLAVQTLTEILTWHWQSPVWLVTPVVYEAYRILQLMRGLTLSAEVNAPVWVVHMLRGLVSWWVLILGMQLMRVAWFAGFASRTTTGQQPQSVASK

SEQ ID NO: 71901 - protein, 324 aa, Arabidopsis thaliana
  peptide (1)..(324): Ceres Seq. ID no. 4903822
  misc_feature (1)..(324): Homolog of NCBI NO: 11281196 NR Description: hypothetical protein T8B10.250 - Arabidopsis >gi|7288007|emb|CAB81845.1| putative protein [Arabidopsis
  misc_feature (89)..(324): Homolog of NCBI NO: 30695235 NR Description: expressed protein [Arabidopsis thaliana]
  misc_feature (159)..(324): Homolog of NCBI NO: 30695238 NR Description: expressed protein [Arabidopsis thaliana] putative protein [Arabidopsis thaliana]
  misc_feature (35)..(314): Homolog of NCBI NO: 38605903 NR Description: OSJNBb0020O11.15 [Oryza sativa (japonica
  misc_feature (106)..(270): Homolog of NCBI NO: 34910348 NR Description: P0684B02.8 [Oryza sativa (japonica
  misc_feature (38)..(269): Homolog of NCBI NO: 15221197 NR Description: unknown protein; protein id: At1g48460.1
  misc_feature (137)..(292): Homolog of NCBI NO: 23127993 NR Description: hypothetical protein [Nostoc punctiforme]
MVSLTKSLCTMTPRVRLKNPNMLQKLKTGSCNFRFRNLRVLCTPKLSQWEPSPFIHASAEEAADIVLDKTANVFESIVSESAEEEKVDMSAQQRTNSQVQVLKWPIWLLGPSVLLTSGMAPTLWLPLSSVFLGSNVVSLLSLIGLDCIFNLGATLFLLMADSCARPKDPSQSCNSKPPFSYKFWNMFSLIIGFLVPMLLLFGSQSGLLASLQPQIPFLSSAVILFPYFILLAVQTLTEILTWHWQSPVWLVTPVVYEAYRILQLMRGLTLSAEVNAPVWVVHMLRGLVSWWVLILGMQLMRVAWFAGFASRTTTGQQPQSVASK

SEQ ID NO: 71902 - protein, 314 aa, Arabidopsis thaliana
  peptide (1)..(314): Ceres Seq. ID no. 4903823
  misc_feature (1)..(314): Homolog of NCBI NO: 11281196 NR Description: hypothetical protein T8B10.250 - Arabidopsis >gi|7288007|emb|CAB81845.1| putative protein [Arabidopsis
  misc_feature (79)..(314): Homolog of NCBI NO: 30695235 NR Description: expressed protein [Arabidopsis thaliana]
  misc_feature (149)..(314): Homolog of NCBI NO: 30695238 NR Description: expressed protein [Arabidopsis thaliana] putative protein [Arabidopsis thaliana]
  misc_feature (25)..(304): Homolog of NCBI NO: 38605903 NR Description: OSJNBb0020O11.15 [Oryza sativa (japonica
  misc_feature (96)..(260): Homolog of NCBI NO: 34910348 NR Description: P0684B02.8 [Oryza sativa (japonica
  misc_feature (28)..(259): Homolog of NCBI NO: 15221197 NR Description: unknown protein; protein id: At1g48460.1
  misc_feature (127)..(282): Homolog of NCBI NO: 23127993 NR Description: hypothetical protein [Nostoc punctiforme]
MTPRVRLKNPNMLQKLKTGSCNFRFRNLRVLCTPKLSQWEPSPFIHASAEEAADIVLDKTANVFESIVSESAEEEKVDMSAQQRTNSQVQVLKWPIWLLGPSVLLTSGMAPTLWLPLSSVFLGSNVVSLLSLIGLDCIFNLGATLFLLMADSCARPKDPSQSCNSKPPFSYKFWNMFSLIIGFLVPMLLLFGSQSGLLASLQPQIPFLSSAVILFPYFILLAVQTLTEILTWHWQSPVWLVTPVVYEAYRILQLMRGLTLSAEVNAPVWVVHMLRGLVSWWVLILGMQLMRVAWFAGFASRTTTGQQPQSVASK

SEQ ID NO: 71903 - DNA, 1151 bp, Arabidopsis thaliana
  misc_feature (1)..(1151): Ceres Seq. ID no. 4903859
  misc_feature: MA Experiment ID: 108573 Result: Up-regulated in Transcription
  misc_feature: MA Experiment 108573 PARAMETER Experiment Name: At_Drought_cDNA_P Parameter: Timepoint (hr) Value: 6
  misc_feature: MA Experiment 108573 PARAMETER Experiment Name: At_Drought_cDNA_P Parameter: Tissue Value: Aerial
  misc_feature: MA Experiment 108573 PARAMETER Experiment Name: At_Drought_cDNA_P Parameter: Treatment Value: Drought vs. No Drought
  misc_feature: MA Experiment ID: 108579 Result: Down-regulated in Transcription
  misc_feature: MA Experiment 108579 PARAMETER Experiment Name: At_4deg_Cold_cDNA_P Parameter: Temperature (deg C) Value: 4 vs. 22
  misc_feature: MA Experiment 108579 PARAMETER Experiment Name: At_4deg_Cold_cDNA_P Parameter: Timepoint (hr) Value: 6
  misc_feature: MA Experiment 108579 PARAMETER Experiment Name: At_4deg_Cold_cDNA_P Parameter: Tissue Value: Aerial
  misc_feature: MA Experiment ID: 108595 Result: Down-regulated in Transcription
  misc_feature: MA Experiment 108595 PARAMETER Experiment Name: At_Ler-pi_Ovule_cDNA_P Parameter: Plant Line Value: null
  misc_feature: MA Experiment ID: 20000113 Result: Up-regulated in Transcription
  misc_feature: MA Experiment 20000113 PARAMETER Experiment Name: At_42deg_Heat_cDNA_P Parameter: Temperature (deg C) Value: 42 vs. 22
  misc_feature: MA Experiment 20000113 PARAMETER Experiment Name: At_42deg_Heat_cDNA_P Parameter: Timepoint (hr) Value: 8
  misc_feature: MA Experiment 20000113 PARAMETER Experiment Name: At_42deg_Heat_cDNA_P Parameter: Tissue Value: Aerial
  misc_feature: MA Experiment ID: 20001450 Result: Up-regulated in Transcription
  misc_feature: MA Experiment 20001450 PARAMETER Experiment Name: At_Far-red-induction_P Parameter: Age (day) Value: 7
  misc_feature: MA Experiment 20001450 PARAMETER Experiment Name: At_Far-red-induction_P Parameter: Light Value: Far-red vs. White
  misc_feature: MA Experiment 20001450 PARAMETER Experiment Name: At_Far-red-induction_P Parameter: Organism Value: A. thaliana
  misc_feature: MA Experiment 20001450 PARAMETER Experiment Name: At_Far-red-induction_P Parameter: Plant Line Value: Columbia
  misc_feature: MA Experiment 20001450 PARAMETER Experiment Name: At_Far-red-induction_P Parameter: Timepoint (hr) Value: 8
  misc_feature: MA Experiment 20001450 PARAMETER Experiment Name: At_Far-red-induction_P Parameter: Tissue Value: Whole Plant
tcgccgcaaaatttgttctccggaagagaatggattttcttaaggcaacgattatagttgccctaatttgcaatttcgcctcactggcgtcttctgttcctttcatagttctgcatggaattggggataaatgcagtaatgcaggagtgacacaattcacagagcttttaagcgattggtctggttctcaaggatattgcttggagattgggaatggctcatgggactcatggactatgcctctccttgatcagacatcagttgtttgtgagaaggtgaaaagtatgccagagcttagtgacggttacagcattgtggggctttctcagggtaacatgattggtcgagctctcattgagttttgcgatggagcaccacctgttaagagttttgtttcggtagcgggtcctcatgctggcactgcatcgattccgttctgtggtgctacctggatttgcatcatgttggacagtatgatcaaagcagagatctatagcgactatatgcaggaacatttggctcctagcggttttctcaaaatcccaactgacatagcgggttacatggaaggctgtaggtttctcccaaagctaaacaacgaacttccagtcaaaaactcgacttataaggagaggttctcgagtttggagaatcttgtgcttattatgtttgagcatgacacaatattgatacctaaagaaacctcatggtttggatattatcctgatgggtctttcaagaccattcttccgccgcaagagaccaagctatatactgaagactggattggtttgagaaccttagatgaagctggaaaagtgaagttcgttaacgtctctggaaatcatcttcagatatctcatacagacatgaagaagcatatagtgccatacctctgtgataaatcatcgtcgtcatcatccacaacaatggcagtttccggatcatcttcctcacaccagtggcttccaagtgtagggaacattattatggatcttattggtccagaagtggatcagcttcagcttgtgctacgtcatgtgtaaatctgatgtcctgtgttgttgtttgttctcttactaaacacgatcgtctcgtgatatgtttgtaacttgaagataaaacaagaaaactgttccaaaatccctctc

SEQ ID NO: 71904 - protein, 347 aa, Arabidopsis thaliana
  peptide (1)..(347): Ceres Seq. ID no. 4903860
  misc_feature (29)..(299): Pfam Name: Palmitoyl protein thioesterase Pfam Description: Palmitoyl protein thioesterase
  misc_feature (10)..(347): Homolog of NCBI NO: 15232301 NR Description: palmitoyl-protein thioesterase precursor - like; id: At3g60340.1, supported by cDNA: 38539., supported by cDNA:
  misc_feature (10)..(347): Homolog of NCBI NO: 14334718 NR Description: putative palmitoyl-protein thioesterase precursor
  misc_feature (10)..(347): Homolog of NCBI NO: 21593393 NR Description: palmitoyl-protein thioesterase precursor-like
  misc_feature (28)..(280): Homolog of NCBI NO: 37536884 NR Description: putative palmitoyl-protein thioesterase [Oryza
  misc_feature (17)..(307): Homolog of NCBI NO: 15238063 NR Description: palmitoyl-protein thioesterase precursor-like;
  misc_feature (17)..(307): Homolog of NCBI NO: 28393539 NR Description: putative palmitoyl-protein thioesterase precursor
  misc_feature (9)..(298): Homolog of NCBI NO: 15236079 NR Description: putative protein; protein id: At4g17483.1 thaliana] >gi|22136628|gb|AAM91633.1| unknown protein
  misc_feature (12)..(306): Homolog of NCBI NO: 15236078 NR Description: putative protein; protein id: At4g17480.1, by cDNA: 253398. [Arabidopsis thaliana] unknown protein [Arabidopsis thaliana]
  misc_feature (12)..(306): Homolog of NCBI NO: 21554369 NR Description: palmitoyl-protein thioesterase precursor-like
  misc_feature (12)..(306): Homolog of NCBI NO: 15236077 NR Description: putative protein; protein id: At4g17470.1
AAKFVLRKRMDFLKATIIVALICNFASLASSVPFIVLHGIGDKCSNAGVTQFTELLSDWSGSQGYCLEIGNGSWDSWTMPLLDQTSVVCEKVKSMPELSDGYSIVGLSQGNMIGRALIEFCDGAPPVKSFVSVAGPHAGTASIPFCGATWICIMLDSMIKAEIYSDYMQEHLAPSGFLKIPTDIAGYMEGCRFLPKLNNELPVKNSTYKERFSSLENLVLIMFEHDTILIPKETSWFGYYPDGSFKTILPPQETKLYTEDWIGLRTLDEAGKVKFVNVSGNHLQISHTDMKKHIVPYLCDKSSSSSSTTMAVSGSSSSHQWLPSVGNIIMDLIGPEVDQLQLVLRHV

SEQ ID NO: 71905 - protein, 338 aa, Arabidopsis thaliana; identical to SEQ ID NO: 41246
  peptide (1)..(338): Ceres Seq. ID no. 4903861
  misc_feature (20)..(290): Pfam Name: Palmitoyl protein thioesterase Pfam Description: Palmitoyl protein thioesterase
  misc_feature (1)..(338): Homolog of NCBI NO: 15232301 NR Description: palmitoyl-protein thioesterase precursor - like; id: At3g60340.1, supported by cDNA: 38539., supported by cDNA:
  misc_feature (1)..(338): Homolog of NCBI NO: 14334718 NR Description: putative palmitoyl-protein thioesterase precursor
  misc_feature (1)..(338): Homolog of NCBI NO: 21593393 NR Description: palmitoyl-protein thioesterase precursor-like
  misc_feature (19)..(271): Homolog of NCBI NO: 37536884 NR Description: putative palmitoyl-protein thioesterase [Oryza
  misc_feature (8)..(298): Homolog of NCBI NO: 15238063 NR Description: palmitoyl-protein thioesterase precursor-like;
  misc_feature (8)..(298): Homolog of NCBI NO: 28393539 NR Description: putative palmitoyl-protein thioesterase precursor
  misc_feature (1)..(289): Homolog of NCBI NO: 15236079 NR Description: putative protein; protein id: At4g17483.1 thaliana] >gi|22136628|gb|AAM91633.1| unknown protein
  misc_feature (3)..(297): Homolog of NCBI NO: 15236078 NR Description: putative protein; protein id: At4g17480.1, by cDNA: 253398. [Arabidopsis thaliana] unknown protein [Arabidopsis thaliana]
  misc_feature (3)..(297): Homolog of NCBI NO: 21554369 NR Description: palmitoyl-protein thioesterase precursor-like
  misc_feature (3)..(297): Homolog of NCBI NO: 15236077 NR Description: putative protein; protein id: At4g17470.1

SEQ ID NO: 71906 - protein, 269 aa, Arabidopsis thaliana; identical to SEQ ID NO: 41247
  peptide (1)..(269): Ceres Seq. ID no. 4903862
  misc_feature (1)..(221): Pfam Name: Palmitoyl protein thioesterase Pfam Description: Palmitoyl protein thioesterase
  misc_feature (1)..(269): Homolog of NCBI NO: 15232301 NR Description: palmitoyl-protein thioesterase precursor - like; id: At3g60340.1, supported by cDNA: 38539., supported by cDNA:
  misc_feature (1)..(269): Homolog of NCBI NO: 14334718 NR Description: putative palmitoyl-protein thioesterase precursor
  misc_feature (1)..(269): Homolog of NCBI NO: 21593393 NR Description: palmitoyl-protein thioesterase precursor-like
  misc_feature (1)..(202): Homolog of NCBI NO: 37536884 NR Description: putative palmitoyl-protein thioesterase [Oryza
  misc_feature (1)..(229): Homolog of NCBI NO: 15238063 NR Description: palmitoyl-protein thioesterase precursor-like;
  misc_feature (1)..(229): Homolog of NCBI NO: 28393539 NR Description: putative palmitoyl-protein thioesterase precursor
  misc_feature (1)..(220): Homolog of NCBI NO: 15236079 NR Description: putative protein; protein id: At4g17483.1 thaliana] >gi|22136628|gb|AAM91633.1| unknown protein
  misc_feature (1)..(228): Homolog of NCBI NO: 15236078 NR Description: putative protein; protein id: At4g17480.1, by cDNA: 253398. [Arabidopsis thaliana] unknown protein [Arabidopsis thaliana]
  misc_feature (1)..(228): Homolog of NCBI NO: 21554369 NR Description: palmitoyl-protein thioesterase precursor-like
  misc_feature (1)..(228): Homolog of NCBI NO: 15236077 NR Description: putative protein; protein id: At4g17470.1

SEQ ID NO: 71907 - DNA, 1344 bp, Arabidopsis thaliana
  misc_feature (1)..(1344): Ceres Seq. ID no. 4904003
  misc_feature: MA Experiment ID: 108595 Result: Down-regulated in Transcription
  misc_feature: MA Experiment 108595 PARAMETER Experiment Name: At_Ler-pi_Ovule_cDNA_P Parameter: Plant Line Value: null
aaaatccagctgataaataaataatttttctcttgtcgtcatattaaaaaaaagaaagattatctgtatttcaagtttcatgagcgtttgccaccacaacattgtcttttcggggttttagtcatacttaatggcttccaattcggagaaaaatcctcttctttcagatgagaaacccaaatcgacggaggagaataagagttctaagccggaatcagcttctgggagttcaacttcatcagctatgcctggcttgaatttcaatgcttttgatttctctaatatggctagtattctcaacgatcctagcatcagagaaatggctgagcaaatagctaaagatcctgcgtttaaccaattggctgagcagcttcagagatctattcctaacgctggccaggaaggtggtttccctaactttgatcctcaacagtatgtcaatacaatgcaacaggttatgcataaccctgagtttaagacaatggccgagaaacttggtaccgccttagttcaggatccacaaatgtctccttttttggatgctttctcgaatcctgaaacagcagaacactttactgagcgtatggcgcggatgaaagaagatccagagttgaaacctatactagatgagattgatgctggtggtccttctgccatgatgaagtactggaatgatccagaagtgctgaaaaagctgggtgaagcaatgggtatgcctgttgctggcttaccagaccagactgtttcagctgaacctgaggtagcagaagaaggtgaagaagaagagtctattgttcaccaaactgccagtcttggtgatgttgagggtttgaaagctgccttggcatctggtggtaacaaagatgaagaagattctgaaggaaggacagcattgcattttgcttgtggatacggcgagttgaaatgtgctcaagttcttatcgatgctggagcaagtgttaatgcggttgacaaaaacaagaacacacctctgcattatgctgctggttacgggaggaaagagtgtgtaagccttctcctggagaatggtgctgcagtcactctgcaaaacctagacgagaagacgccaattgatgtagcgaagctcaacagccagctggaggtggtgaagctgcttgagaaggatgctttcctttgagctctgctggttaaaggaaagctctaagctcatattgtctttgaggcatttgtcttgtgtgtgtcctgaaccagtttcacaggctttttgtgtacactttttattagttcctctcttcttctaaatttgtctcttatgttgttttaaaagtcaataaagaaagaaatagcaatcaatgatttaat

SEQ ID NO: 71908 - protein, 342 aa, Arabidopsis thaliana
  peptide (1)..(342): Ceres Seq. ID no. 4904004
  misc_feature (250)..(282): Pfam Name: Ankyrin repeat Pfam Description: Ankyrin repeat
  misc_feature (1)..(342): Homolog of NCBI NO: 15237008 NR Description: ankyrin repeat-containing protein 2; protein id: supported by cDNA: 34698., supported by cDNA: gi_14423489, by cDNA: gi_20148296, supported by cDNA: gi_3478699, supported by
  misc_feature (1)..(342): Homolog of NCBI NO: 3478700 NR Description: AFT protein [Arabidopsis thaliana]
  misc_feature (1)..(342): Homolog of NCBI NO: 4205079 NR Description: ankyrin repeat-containing protein 2 [Arabidopsis
  misc_feature (39)..(342): Homolog of NCBI NO: 30690372 NR Description: ankyrin repeat-containing protein 2 [Arabidopsis
  misc_feature (1)..(342): Homolog of NCBI NO: 15227825 NR Description: putative glucanase; protein id: At2g17390.1
  misc_feature (2)..(342): Homolog of NCBI NO: 13310811 NR Description: ankyrin-repeat protein HBP1 [Nicotiana tabacum]
  misc_feature (13)..(342): Homolog of NCBI NO: 29826242 NR Description: TGB12K interacting protein 2 [Nicotiana tabacum]
  misc_feature (13)..(342): Homolog of NCBI NO: 29826244 NR Description: TGB12K interacting protein 3 [Nicotiana tabacum]
  misc_feature (2)..(342): Homolog of NCBI NO: 24637568 NR Description: ankyrin domain protein [Nicotiana tabacum]
  misc_feature (1)..(342): Homolog of NCBI NO: 27573339 NR Description: unknown protein [Oryza sativa (japonica
MASNSEKNPLLSDEKPKSTEENKSSKPESASGSSTSSAMPGLNFNAFDFSNMASILNDPSIREMAEQIAKDPAFNQLAEQLQRSIPNAGQEGGFPNFDPQQYVNTMQQVMHNPEFKTMAEKLGTALVQDPQMSPFLDAFSNPETAEHFTERMARMKEDPELKPILDEIDAGGPSAMMKYWNDPEVLKKLGEAMGMPVAGLPDQTVSAEPEVAEEGEEEESIVHQTASLGDVEGLKAALASGGNKDEEDSEGRTALHFACGYGELKCAQVLIDAGASVNAVDKNKNTPLHYAAGYGRKECVSLLLENGAAVTLQNLDEKTPIDVAKLNSQLEVVKLLEKDAFL

SEQ ID NO: 71909 - protein, 304 aa, Arabidopsis thaliana
  peptide (1)..(304): Ceres Seq. ID no. 4904005
  misc_feature (212)..(244): Pfam Name: Ankyrin repeat Pfam Description: Ankyrin repeat
  misc_feature (1)..(304): Homolog of NCBI NO: 15237008 NR Description: ankyrin repeat-containing protein 2; protein id: supported by cDNA: 34698., supported by cDNA: gi_14423489, by cDNA: gi_20148296, supported by cDNA: gi_3478699, supported by
  misc_feature (1)..(304): Homolog of NCBI NO: 3478700 NR Description: AFT protein [Arabidopsis thaliana]
  misc_feature (1)..(304): Homolog of NCBI NO: 4205079 NR Description: ankyrin repeat-containing protein 2 [Arabidopsis
  misc_feature (1)..(304): Homolog of NCBI NO: 30690372 NR Description: ankyrin repeat-containing protein 2 [Arabidopsis
  misc_feature (1)..(304): Homolog of NCBI NO: 15227825 NR Description: putative glucanase; protein id: At2g17390.1
  misc_feature (1)..(304): Homolog of NCBI NO: 13310811 NR Description: ankyrin-repeat protein HBP1 [Nicotiana tabacum]
  misc_feature (1)..(304): Homolog of NCBI NO: 29826242 NR Description: TGB12K interacting protein 2 [Nicotiana tabacum]
  misc_feature (1)..(304): Homolog of NCBI NO: 29826244 NR Description: TGB12K interacting protein 3 [Nicotiana tabacum]
  misc_feature (1)..(304): Homolog of NCBI NO: 24637568 NR Description: ankyrin domain protein [Nicotiana tabacum]
  misc_feature (1)..(304): Homolog of NCBI NO: 27573339 NR Description: unknown protein [Oryza sativa (japonica
MPGLNFNAFDFSNMASILNDPSIREMAEQIAKDPAFNQLAEQLQRSIPNAGQEGGFPNFDPQQYVNTMQQVMHNPEFKTMAEKLGTALVQDPQMSPFLDAFSNPETAEHFTERMARMKEDPELKPILDEIDAGGPSAMMKYWNDPEVLKKLGEAMGMPVAGLPDQTVSAEPEVAEEGEEEESIVHQTASLGDVEGLKAALASGGNKDEEDSEGRTALHFACGYGELKCAQVLIDAGASVNAVDKNKNTPLHYAAGYGRKECVSLLLENGAAVTLQNLDEKTPIDVAKLNSQLEVVKLLEKDAFL

SEQ ID NO: 71910 - protein, 291 aa, Arabidopsis thaliana
  peptide (1)..(291): Ceres Seq. ID no. 4904006
  misc_feature (199)..(231): Pfam Name: Ankyrin repeat Pfam Description: Ankyrin repeat
  misc_feature (1)..(291): Homolog of NCBI NO: 15237008 NR Description: ankyrin repeat-containing protein 2; protein id: supported by cDNA: 34698., supported by cDNA: gi_14423489, by cDNA: gi_20148296, supported by cDNA: gi_3478699, supported by
  misc_feature (1)..(291): Homolog of NCBI NO: 3478700 NR Description: AFT protein [Arabidopsis thaliana]
  misc_feature (1)..(291): Homolog of NCBI NO: 4205079 NR Description: ankyrin repeat-containing protein 2 [Arabidopsis
  misc_feature (1)..(291): Homolog of NCBI NO: 30690372 NR Description: ankyrin repeat-containing protein 2 [Arabidopsis
  misc_feature (1)..(291): Homolog of NCBI NO: 15227825 NR Description: putative glucanase; protein id: At2g17390.1
  misc_feature (1)..(291): Homolog of NCBI NO: 13310811 NR Description: ankyrin-repeat protein HBP1 [Nicotiana tabacum]
  misc_feature (1)..(291): Homolog of NCBI NO: 29826242 NR Description: TGB12K interacting protein 2 [Nicotiana tabacum]
  misc_feature (1)..(291): Homolog of NCBI NO: 29826244 NR Description: TGB12K interacting protein 3 [Nicotiana tabacum]
  misc_feature (1)..(291): Homolog of NCBI NO: 24637568 NR Description: ankyrin domain protein [Nicotiana tabacum]
  misc_feature (1)..(291): Homolog of NCBI NO: 27573339 NR Description: unknown protein [Oryza sativa (japonica
MASILNDPSIREMAEQIAKDPAFNQLAEQLQRSIPNAGQEGGFPNFDPQQYVNTMQQVMHNPEFKTMAEKLGTALVQDPQMSPFLDAFSNPETAEHFTERMARMKEDPELKPILDEIDAGGPSAMMKYWNDPEVLKKLGEAMGMPVAGLPDQTVSAEPEVAEEGEEEESIVHQTASLGDVEGLKAALASGGNKDEEDSEGRTALHFACGYGELKCAQVLIDAGASVNAVDKNKNTPLHYAAGYGRKECVSLLLENGAAVTLQNLDEKTPIDVAKLNSQLEVVKLLEKDAFL

SEQ ID NO: 71911 - DNA, 1506 bp, Arabidopsis thaliana
  misc_feature (1)..(1506): Ceres Seq. ID no. 4904634
  misc_feature: MA Experiment ID: 108434 Result: Down-regulated in Transcription
  misc_feature: MA Experiment 108434 PARAMETER Experiment Name: At_Root_Tips_cDNA_P Parameter: Tissue Value: Root Tips
  misc_feature: MA Experiment ID: 108461 Result: Up-regulated in Transcription
  misc_feature: MA Experiment 108461 PARAMETER Experiment Name: At_Germinating_Seeds_cDNA_P Parameter: Age (day) Value: 1 vs. 0
  misc_feature: MA Experiment 108461 PARAMETER Experiment Name: At_Germinating_Seeds_cDNA_P Parameter: Tissue Value: Germinating Seeds
  misc_feature: MA Experiment ID: 108569 Result: Up-regulated in Transcription
  misc_feature: MA Experiment 108569 PARAMETER Experiment Name: At_0.001%_MeJA__cDNA_P Parameter: Timepoint (hr) Value: 6
  misc_feature: MA Experiment 108569 PARAMETER Experiment Name: At_0.001%_MeJA__cDNA_P Parameter: Tissue Value: Aerial
  misc_feature: MA Experiment 108569 PARAMETER Experiment Name: At_0.001%_MeJA__cDNA_P Parameter: Treatment Value: 0.001% MeJA vs. No Treatment
  misc_feature: MA Experiment ID: 108574 Result: Up-regulated in Transcription
  misc_feature: MA Experiment 108574 PARAMETER Experiment Name: At_Wounding__cDNA_P Parameter: Timepoint (hr) Value: 1
  misc_feature: MA Experiment 108574 PARAMETER Experiment Name: At_Wounding__cDNA_P Parameter: Tissue Value: Aerial
  misc_feature: MA Experiment 108574 PARAMETER Experiment Name: At_Wounding__cDNA_P Parameter: Treatment Value: Wounding vs. No Wounding
  misc_feature: MA Experiment ID: 108595 Result: Up-regulated in Transcription
  misc_feature: MA Experiment 108595 PARAMETER Experiment Name: At_Ler-pi_Ovule_cDNA_P Parameter: Plant Line Value: null
  misc_feature: MA Experiment ID: 108667 Result: Up-regulated in Transcription
  misc_feature: MA Experiment 108667 PARAMETER Experiment Name: At_2mM_SA_cDNA_P Parameter: Plant Line Value: WS
  misc_feature: MA Experiment 108667 PARAMETER Experiment Name: At_2mM_SA_cDNA_P Parameter: Timepoint (hr) Value: 1
  misc_feature: MA Experiment 108667 PARAMETER Experiment Name: At_2mM_SA_cDNA_P Parameter: Treatment Value: 2mM SA vs. No Treatment
  misc_feature: MA Experiment ID: 108668 Result: Up-regulated in Transcription
  misc_feature: MA Experiment 108668 PARAMETER Experiment Name: At_2mM_SA_cDNA_P Parameter: Plant Line Value: WS
  misc_feature: MA Experiment 108668 PARAMETER Experiment Name: At_2mM_SA_cDNA_P Parameter: Timepoint (hr) Value: 6
  misc_feature: MA Experiment 108668 PARAMETER Experiment Name: At_2mM_SA_cDNA_P Parameter: Treatment Value: 2mM SA vs. No Treatment
  misc_feature: MA Experiment ID: 20000071 Result: Up-regulated in Transcription
  misc_feature: MA Experiment 20000071 PARAMETER Experiment Name: At_100uM_ABA_Mutants_cDNA_P Parameter: Plant Line Value: CS8104
  misc_feature: MA Experiment 20000071 PARAMETER Experiment Name: At_100uM_ABA_Mutants_cDNA_P Parameter: Timepoint (hr) Value: 6
  misc_feature: MA Experiment 20000071 PARAMETER Experiment Name: At_100uM_ABA_Mutants_cDNA_P Parameter: Tissue Value: Aerial
  misc_feature: MA Experiment 20000071 PARAMETER Experiment Name: At_100uM_ABA_Mutants_cDNA_P Parameter: Treatment Value: 100uM ABA vs. No Treatment
  misc_feature: MA Experiment ID: 20000072 Result: Up-regulated in Transcription
  misc_feature: MA Experiment 20000072 PARAMETER Experiment Name: At_100uM_ABA_Mutants_cDNA_P Parameter: Plant Line Value: CS8105
  misc_feature: MA Experiment 20000072 PARAMETER Experiment Name: At_100uM_ABA_Mutants_cDNA_P Parameter: Timepoint (hr) Value: 6
  misc_feature: MA Experiment 20000072 PARAMETER Experiment Name: At_100uM_ABA_Mutants_cDNA_P Parameter: Tissue Value: Aerial
  misc_feature: MA Experiment 20000072 PARAMETER Experiment Name: At_100uM_ABA_Mutants_cDNA_P Parameter: Treatment Value: 100uM ABA vs. No Treatment
  misc_feature: MA Experiment ID: 20000088 Result: Up-regulated in Transcription
  misc_feature: MA Experiment 20000088 PARAMETER Experiment Name: At_100uM_ABA_Mutants_cDNA_P Parameter: Plant Line Value: Landsberg
  misc_feature: MA Experiment 20000088 PARAMETER Experiment Name: At_100uM_ABA_Mutants_cDNA_P Parameter: Timepoint (hr) Value: 6
  misc_feature: MA Experiment 20000088 PARAMETER Experiment Name: At_100uM_ABA_Mutants_cDNA_P Parameter: Tissue Value: Aerial
  misc_feature: MA Experiment 20000088 PARAMETER Experiment Name: At_100uM_ABA_Mutants_cDNA_P Parameter: Treatment Value: 100uM ABA vs. No Treatment
  misc_feature: MA Experiment ID: 20000112 Result: Down-regulated in Transcription
  misc_feature: MA Experiment 20000112 PARAMETER Experiment Name: At_42deg_Heat_cDNA_P Parameter: Temperature (deg C) Value: 42 vs. 22
  misc_feature: MA Experiment 20000112 PARAMETER Experiment Name: At_42deg_Heat_cDNA_P Parameter: Timepoint (hr) Value: 2
  misc_feature: MA Experiment 20000112 PARAMETER Experiment Name: At_42deg_Heat_cDNA_P Parameter: Tissue Value: Aerial
  misc_feature: MA Experiment ID: 20000117 Result: Up-regulated in Transcription
  misc_feature: MA Experiment 20000117 PARAMETER Experiment Name: At_100uM_ABA_Mutants_cDNA_P Parameter: Plant Line Value: Columbia
  misc_feature: MA Experiment 20000117 PARAMETER Experiment Name: At_100uM_ABA_Mutants_cDNA_P Parameter: Timepoint (hr) Value: 6
  misc_feature: MA Experiment 20000117 PARAMETER Experiment Name: At_100uM_ABA_Mutants_cDNA_P Parameter: Tissue Value: Aerial
  misc_feature: MA Experiment 20000117 PARAMETER Experiment Name: At_100uM_ABA_Mutants_cDNA_P Parameter: Treatment Value: 100uM ABA vs. No Treatment
  misc_feature: MA Experiment ID: 20000171 Result: Down-regulated in Transcription
  misc_feature: MA Experiment 20000171 PARAMETER Experiment Name: At_42deg_Heat_P Parameter: Age (day) Value: 14
  misc_feature: MA Experiment 20000171 PARAMETER Experiment Name: At_42deg_Heat_P Parameter: Organism Value: A. thaliana
  misc_feature: MA Experiment 20000171 PARAMETER Experiment Name: At_42deg_Heat_P Parameter: Plant Line Value: WS
  misc_feature: MA Experiment 20000171 PARAMETER Experiment Name: At_42deg_Heat_P Parameter: Temperature (deg C) Value: 42 vs. 22
  misc_feature: MA Experiment 20000171 PARAMETER Experiment Name: At_42deg_Heat_P Parameter: Timepoint (hr) Value: 1
  misc_feature: MA Experiment 20000171 PARAMETER Experiment Name: At_42deg_Heat_P Parameter: Tissue Value: Aerial
  misc_feature: MA Experiment ID: 20000173 Result: Down-regulated in Transcription
  misc_feature: MA Experiment 20000173 PARAMETER Experiment Name: At_42deg_Heat_P Parameter: Age (day) Value: 14
  misc_feature: MA Experiment 20000173 PARAMETER Experiment Name: At_42deg_Heat_P Parameter: Organism Value: A. thaliana
  misc_feature: MA Experiment 20000173 PARAMETER Experiment Name: At_42deg_Heat_P Parameter: Plant Line Value: WS
  misc_feature: MA Experiment 20000173 PARAMETER Experiment Name: At_42deg_Heat_P Parameter: Temperature (deg C) Value: 42 vs. 22
  misc_feature: MA Experiment 20000173 PARAMETER Experiment Name: At_42deg_Heat_P Parameter: Timepoint (hr) Value: 6
  misc_feature: MA Experiment 20000173 PARAMETER Experiment Name: At_42deg_Heat_P Parameter: Tissue Value: Aerial
  misc_feature: MA Experiment ID: 20000182 Result: Up-regulated in Transcription
  misc_feature: MA Experiment 20000182 PARAMETER Experiment Name: At_2mM_SA_P Parameter: Age (day) Value: 14
  misc_feature: MA Experiment 20000182 PARAMETER Experiment Name: At_2mM_SA_P Parameter: Organism Value: A. thaliana
  misc_feature: MA Experiment 20000182 PARAMETER Experiment Name: At_2mM_SA_P Parameter: Plant Line Value: WS
  misc_feature: MA Experiment 20000182 PARAMETER Experiment Name: At_2mM_SA_P Parameter: Timepoint (hr) Value: 6
  misc_feature: MA Experiment 20000182 PARAMETER Experiment Name: At_2mM_SA_P Parameter: Tissue Value: Aerial
  misc_feature: MA Experiment 20000182 PARAMETER Experiment Name: At_2mM_SA_P Parameter: Treatment Value: 2mM SA vs. No Treatment
  misc_feature: MA Experiment ID: 20000184 Result: Down-regulated in Transcription
  misc_feature: MA Experiment 20000184 PARAMETER Experiment Name: At_Shoots__P Parameter: Age (day) Value: 7
  misc_feature: MA Experiment 20000184 PARAMETER Experiment Name: At_Shoots__P Parameter: Tissue Value: Shoots vs. Whole Plant
  misc_feature: MA Experiment ID: 20000185 Result: Down-regulated in Transcription
  misc_feature: MA Experiment 20000185 PARAMETER Experiment Name: At_Roots__P Parameter: Age (day) Value: 7 vs. 21
  misc_feature: MA Experiment 20000185 PARAMETER Experiment Name: At_Roots__P Parameter: Organism Value: A. thaliana
  misc_feature: MA Experiment 20000185 PARAMETER Experiment Name: At_Roots__P Parameter: Tissue Value: Roots vs. Whole Plant
  misc_feature: MA Experiment ID: 20000234 Result: Down-regulated in Transcription
  misc_feature: MA Experiment 20000234 PARAMETER Experiment Name: At_Siliques_P Parameter: Age (day) Value: 21
  misc_feature: MA Experiment 20000234 PARAMETER Experiment Name: At_Siliques_P Parameter: Organism Value: A. thaliana
  misc_feature: MA Experiment 20000234 PARAMETER Experiment Name: At_Siliques_P Parameter: Plant Line Value: WS
  misc_feature: MA Experiment 20000234 PARAMETER Experiment Name: At_Siliques_P Parameter: Tissue Value: Less Than 5mm Siliques vs. Whole Plant
  misc_feature: MA Experiment ID: 20000235 Result: Down-regulated in Transcription
  misc_feature: MA Experiment 20000235 PARAMETER Experiment Name: At_Siliques_P Parameter: Age (day) Value: 21
  misc_feature: MA Experiment 20000235 PARAMETER Experiment Name: At_Siliques_P Parameter: Organism Value: A. thaliana
  misc_feature: MA Experiment 20000235 PARAMETER Experiment Name: At_Siliques_P Parameter: Plant Line Value: WS
  misc_feature: MA Experiment 20000235 PARAMETER Experiment Name: At_Siliques_P Parameter: Tissue Value: 5-10mm Siliques vs. Whole Plant
  misc_feature: MA Experiment ID: 20000264 Result: Down-regulated in Transcription
  misc_feature: MA Experiment 20000264 PARAMETER Experiment Name: At_Open_Flower_P Parameter: Age (day) Value: 21
  misc_feature: MA Experiment 20000264 PARAMETER Experiment Name: At_Open_Flower_P Parameter: Plant Line Value: WS
  misc_feature: MA Experiment 20000264 PARAMETER Experiment Name: At_Open_Flower_P Parameter: Tissue Value: Open Flower vs. Whole Plant
  misc_feature: MA Experiment ID: 20000438 Result: Down-regulated in Transcription
  misc_feature: MA Experiment 20000438 PARAMETER Experiment Name: At_Shoots__P Parameter: Age (day) Value: 14
  misc_feature: MA Experiment 20000438 PARAMETER Experiment Name: At_Shoots__P Parameter: Tissue Value: Shoots vs. Whole Plant
  misc_feature: MA Experiment ID: 20000439 Result: Down-regulated in Transcription
  misc_feature: MA Experiment 20000439 PARAMETER Experiment Name: At_Roots__P Parameter: Age (day) Value: 14 vs. 21
  misc_feature: MA Experiment 20000439 PARAMETER Experiment Name: At_Roots__P Parameter: Organism Value: A. thaliana
  misc_feature: MA Experiment 20000439 PARAMETER Experiment Name: At_Roots__P Parameter: Tissue Value: Roots vs. Whole Plant
  misc_feature: MA Experiment ID: 20000527 Result: Down-regulated in Transcription
  misc_feature: MA Experiment 20000527 PARAMETER Experiment Name: At_10percent_PEG_P Parameter: Age (day) Value: 20
  misc_feature: MA Experiment 20000527 PARAMETER Experiment Name: At_10percent_PEG_P Parameter: Organism Value: A. thaliana
  misc_feature: MA Experiment 20000527 PARAMETER Experiment Name: At_10percent_PEG_P Parameter: Plant Line Value: WS
  misc_feature: MA Experiment 20000527 PARAMETER Experiment Name: At_10percent_PEG_P Parameter: Timepoint (day) Value: 20
  misc_feature: MA Experiment 20000527 PARAMETER Experiment Name: At_10percent_PEG_P Parameter: Tissue Value: Whole Plant
  misc_feature: MA Experiment 20000527 PARAMETER Experiment Name: At_10percent_PEG_P Parameter: Treatment Value: 10percent PEG vs. No Treatment
  misc_feature: MA Experiment ID: 20000573 Result: Up-regulated in Transcription
  misc_feature: MA Experiment 20000573 PARAMETER Experiment Name: At_100uM_ABA_Mutants__P Parameter: Organism Value: A. thaliana
  misc_feature: MA Experiment 20000573 PARAMETER Experiment Name: At_100uM_ABA_Mutants__P Parameter: Plant Line Value: CS22 vs. Ler wt
  misc_feature: MA Experiment 20000573 PARAMETER Experiment Name: At_100uM_ABA_Mutants__P Parameter: Timepoint (hr) Value: N/A
  misc_feature: MA Experiment 20000573 PARAMETER Experiment Name: At_100uM_ABA_Mutants__P Parameter: Tissue Value: Whole Plant
  misc_feature: MA Experiment 20000573 PARAMETER Experiment Name: At_100uM_ABA_Mutants__P Parameter: Treatment Value: None
  misc_feature: MA Experiment ID: 20000574 Result: Up-regulated in Transcription
  misc_feature: MA Experiment 20000574 PARAMETER Experiment Name: At_100uM_ABA_Mutants__P Parameter: Organism Value: A. thaliana
  misc_feature: MA Experiment 20000574 PARAMETER Experiment Name: At_100uM_ABA_Mutants__P Parameter: Plant Line Value: CS23 vs. Ler wt
  misc_feature: MA Experiment 20000574 PARAMETER Experiment Name: At_100uM_ABA_Mutants__P Parameter: Timepoint (hr) Value: N/A
  misc_feature: MA Experiment 20000574 PARAMETER Experiment Name: At_100uM_ABA_Mutants__P Parameter: Tissue Value: Whole Plant
  misc_feature: MA Experiment 20000574 PARAMETER Experiment Name: At_100uM_ABA_Mutants__P Parameter: Treatment Value: None
  misc_feature: MA Experiment ID: 20000709 Result: Up-regulated in Transcription
  misc_feature: MA Experiment 20000709 PARAMETER Experiment Name: At_15mM_NH4NO3_L-to-H_P Parameter: Age (hr) Value: 14
  misc_feature: MA Experiment 20000709 PARAMETER Experiment Name: At_15mM_NH4NO3_L-to-H_P Parameter: Organism Value: A. thaliana
  misc_feature: MA Experiment 20000709 PARAMETER Experiment Name: At_15mM_NH4NO3_L-to-H_P Parameter: Plant Line Value: WS
  misc_feature: MA Experiment 20000709 PARAMETER Experiment Name: At_15mM_NH4NO3_L-to-H_P Parameter: Timepoint (hr) Value: 4
  misc_feature: MA Experiment 20000709 PARAMETER Experiment Name: At_15mM_NH4NO3_L-to-H_P Parameter: Tissue Value: Aerial
  misc_feature: MA Experiment 20000709 PARAMETER Experiment Name: At_15mM_NH4NO3_L-to-H_P Parameter: Treatment Value: 15mM NH4NO3 vs. 30mM Mannitol
  misc_feature: MA Experiment ID: 20000794 Result: Down-regulated in Transcription
  misc_feature: MA Experiment 20000794 PARAMETER Experiment Name: At_Petals_P Parameter: Age (day) Value: 23-25 days
  misc_feature: MA Experiment 20000794 PARAMETER Experiment Name: At_Petals_P Parameter: Plant Line Value: WS
  misc_feature: MA Experiment 20000794 PARAMETER Experiment Name: At_Petals_P Parameter: Tissue Value: Petals vs. Whole plant
  misc_feature: MA Experiment ID: 20001248 Result: Down-regulated in Transcription
  misc_feature: MA Experiment 20001248 PARAMETER Experiment Name: At_Far-red-induction_P Parameter: Age (day) Value: 7
  misc_feature: MA Experiment 20001248 PARAMETER Experiment Name: At_Far-red-induction_P Parameter: Light Value: Far-red vs. White
  misc_feature: MA Experiment 20001248 PARAMETER Experiment Name: At_Far-red-induction_P Parameter: Organism Value: A. thaliana
  misc_feature: MA Experiment 20001248 PARAMETER Experiment Name: At_Far-red-induction_P Parameter: Plant Line Value: Columbia
  misc_feature: MA Experiment 20001248 PARAMETER Experiment Name: At_Far-red-induction_P Parameter: Timepoint (hr) Value: 4
  misc_feature: MA Experiment 20001248 PARAMETER Experiment Name: At_Far-red-induction_P Parameter: Tissue Value: Whole Plant
  misc_feature: MA Experiment ID: 20001450 Result: Down-regulated in Transcription
  misc_feature: MA Experiment 20001450 PARAMETER Experiment Name: At_Far-red-induction_P Parameter: Age (day) Value: 7
  misc_feature: MA Experiment 20001450 PARAMETER Experiment Name: At_Far-red-induction_P Parameter: Light Value: Far-red vs. White
  misc_feature: MA Experiment 20001450 PARAMETER Experiment Name: At_Far-red-induction_P Parameter: Organism Value: A. thaliana
  misc_feature: MA Experiment 20001450 PARAMETER Experiment Name: At_Far-red-induction_P Parameter: Plant Line Value: Columbia
  misc_feature: MA Experiment 20001450 PARAMETER Experiment Name: At_Far-red-induction_P Parameter: Timepoint (hr) Value: 8
  misc_feature: MA Experiment 20001450 PARAMETER Experiment Name: At_Far-red-induction_P Parameter: Tissue Value: Whole Plant
  misc_feature: MA Experiment ID: 20001451 Result: Down-regulated in Transcription
  misc_feature: MA Experiment 20001451 PARAMETER Experiment Name: At_Far-red-induction_P Parameter: Age (day) Value: 7
  misc_feature: MA Experiment 20001451 PARAMETER Experiment Name: At_Far-red-induction_P Parameter: Light Value: Far-red vs. White
  misc_feature: MA Experiment 20001451 PARAMETER Experiment Name: At_Far-red-induction_P Parameter: Organism Value: A. thaliana
  misc_feature: MA Experiment 20001451 PARAMETER Experiment Name: At_Far-red-induction_P Parameter: Plant Line Value: Columbia
  misc_feature: MA Experiment 20001451 PARAMETER Experiment Name: At_Far-red-induction_P Parameter: Timepoint (hr) Value: 24
  misc_feature: MA Experiment 20001451 PARAMETER Experiment Name: At_Far-red-induction_P Parameter: Tissue Value: Whole Plant
  misc_feature: MA Experiment ID: 20001558 Result: Down-regulated in Transcription
  misc_feature: MA Experiment 20001558 PARAMETER Experiment Name: At_Drought_Soil_Dry_P Parameter: Age (day) Value: 27
  misc_feature: MA Experiment 20001558 PARAMETER Experiment Name: At_Drought_Soil_Dry_P Parameter: Organism Value: A. thaliana
  misc_feature: MA Experiment 20001558 PARAMETER Experiment Name: At_Drought_Soil_Dry_P Parameter: Plant Line Value: WS
  misc_feature: MA Experiment 20001558 PARAMETER Experiment Name: At_Drought_Soil_Dry_P Parameter: Post Timepoint (hr) Value: 6
  misc_feature: MA Experiment 20001558 PARAMETER Experiment Name: At_Drought_Soil_Dry_P Parameter: Post-Treatment Value: Re-Water vs. No Drought
  misc_feature: MA Experiment 20001558 PARAMETER Experiment Name: At_Drought_Soil_Dry_P Parameter: Timepoint (day) Value: 13
  misc_feature: MA Experiment 20001558 PARAMETER Experiment Name: At_Drought_Soil_Dry_P Parameter: Treatment Value: Drought vs. No Drought
  misc_feature: MA Experiment ID: 20001904 Result: Down-regulated in Transcription
  misc_feature: MA Experiment 20001904 PARAMETER Experiment Name: At_Drought_Reproduction_P Parameter: Age (day) Value: 37
  misc_feature: MA Experiment 20001904 PARAMETER Experiment Name: At_Drought_Reproduction_P Parameter: Organism Value: A. thaliana
  misc_feature: MA Experiment 20001904 PARAMETER Experiment Name: At_Drought_Reproduction_P Parameter: Plant Line Value: WS
  misc_feature: MA Experiment 20001904 PARAMETER Experiment Name: At_Drought_Reproduction_P Parameter: Timepoint (day) Value: 7
  misc_feature: MA Experiment 20001904 PARAMETER Experiment Name: At_Drought_Reproduction_P Parameter: Tissue Value: Rosettes
  misc_feature: MA Experiment 20001904 PARAMETER Experiment Name: At_Drought_Reproduction_P Parameter: Treatment Value: Drought vs. No Drought
  misc_feature: MA Experiment ID: 20001905 Result: Down-regulated in Transcription
  misc_feature: MA Experiment 20001905 PARAMETER Experiment Name: At_Drought_Reproduction_P Parameter: Age (day) Value: 40
  misc_feature: MA Experiment 20001905 PARAMETER Experiment Name: At_Drought_Reproduction_P Parameter: Organism Value: A. thaliana
  misc_feature: MA Experiment 20001905 PARAMETER Experiment Name: At_Drought_Reproduction_P Parameter: Plant Line Value: WS
  misc_feature: MA Experiment 20001905 PARAMETER Experiment Name: At_Drought_Reproduction_P Parameter: Timepoint (day) Value: 10
  misc_feature: MA Experiment 20001905 PARAMETER Experiment Name: At_Drought_Reproduction_P Parameter: Tissue Value: Rosettes
  misc_feature: MA Experiment 20001905 PARAMETER Experiment Name: At_Drought_Reproduction_P Parameter: Treatment Value: Drought vs. No Drought
aaatttgctccaatgcctgtacttttctcctctcgttctctcatactctccattattgtccccttacttatatctatcgctctctacaaactcgacacattcgaccccgctattgttccttccgatgcattcacatcctctgctacttcactcccgccgcttataaacgacgaatttctcaccggagctgagtttatcggtgtcggtcttctcaatatacccgaagatatcgcctaccataaggaatctaatctcatctacactggttgtgttgatggatgggtgaaacgagtcaaggtcgccgactcggttaatgactcagtcgttgaggattgggtcaatactggtggtagaccgctcggaatcgcgttcggaatccacggcgaagtcattgtcgcagacgtacacaaggttggggttttgaaatcgaattttgaaaaatcacaatcttaggtttgactttgttgttatgtatagggactgttgaatataagcggtgacggaaagaagacggaattgttgacggacgaagcggacggtgtgaagtttaagctgacggatgcagttaccgttgcagataacggcgttttgtatttcacagatgcttcttacaagtacactctcaatcaattgagtttagacatgttagaagggaaaccttttggacgactcttgagctttgatcccaccacacgtgttacaaaagtacttctcaaagacctctacttcgctaatggcatcaccatctctcctgatcaaactcatctcatcttctgtgaaactccaatgtatgtgcattggatcagttaaattttttataaatttccgactcagtttgatttggcaataagttaatttatctatatctgttatatactactttaggaaaaggtgcagcaagtattacatcagtgaggagcgtgtggaggtattcactcaaagcttaccaggttatccagataacattcgttacgatggagatggacattactggattgcattgccttcggtaacgttacaaattgaatttcttttcttttctttgaggtcatgttattaactcattacatgctaataaaggatcatctttgtgttgtggttgtgcaaacagggagtcacgacattgtggaatatctcgttgaaataccctttcttgaggaaactcacagcaatggtggctaagtacggcgtggatcttatgtttatggagaatgcaggcgttttacaggtggatttggatggaaatcccatcgcgtactaccatgatccaaaactctctcacatagccacatgtgacaagattgggaaatatctctattgtggaagtctctcgcaatcacatatcctccgacttgatctcctgaaatatcctgcacagaacaagaaactttgaaatattatgttttcacaaataaggaaagtttccattttaggaaggagcattcactgtcacaaaaaatgtaaactcatttcctgagaatgaatgatgattgtatctcttttttt

SEQ ID NO: 71912 - protein, 150 aa, Arabidopsis thaliana
  peptide (1)..(150): Ceres Seq. ID no. 4904635
  misc_feature (12)..(141): Pfam Name: Strictosidine synthase Pfam Description: Strictosidine synthase
  misc_feature (5)..(141): Homolog of NCBI NO: 18409339 NR Description: strictosidine synthase-related; protein id: supported by cDNA: 34197., supported by cDNA: gi_13122281,
  misc_feature (5)..(141): Homolog of NCBI NO: 15230488 NR Description: strictosidine synthase-related; protein id: supported by cDNA: gi_13430723 [Arabidopsis thaliana]
  misc_feature (5)..(141): Homolog of NCBI NO: 11358518 NR Description: mucin-like protein - Arabidopsis thaliana
  misc_feature (5)..(141): Homolog of NCBI NO: 15230477 NR Description: strictosidine synthase-related; protein id:
  misc_feature (5)..(150): Homolog of NCBI NO: 15230490 NR Description: strictosidine synthase-related; protein id: supported by cDNA: 38956., supported by cDNA: gi_18700142
  misc_feature (10)..(148): Homolog of NCBI NO: 37536558 NR Description: mucin-like protein [Oryza sativa (japonica
  misc_feature (18)..(142): Homolog of NCBI NO: 15596490 NR Description: hypothetical protein [Pseudomonas aeruginosa PA01]
  misc_feature (14)..(142): Homolog of NCBI NO: 23237921 NR Description: contains ESTs
  misc_feature (74)..(150): Homolog of NCBI NO: 34395247 NR Description: putative strictosidine synthase [Oryza sativa
  misc_feature (74)..(150): Homolog of NCBI NO: 34393255 NR Description: putative male fertility protein [Oryza sativa
KFAPMPVLFSSRSLILSIIVPLLISIALYKLDTFDPAIVPSDAFTSSATSLPPLINDEFLTGAEFIGVGLLNIPEDIAYHKESNLIYTGCVDGWVKRVKVADSVNDSVVEDWVNTGGRPLGIAFGIHGEVIVADVHKVGVLKSNFEKSQS

SEQ ID NO: 71913 - protein, 146 aa, Arabidopsis thaliana
  peptide (1)..(146): Ceres Seq. ID no. 4904636
  misc_feature (8)..(137): Pfam Name: Strictosidine synthase Pfam Description: Strictosidine synthase
  misc_feature (1)..(137): Homolog of NCBI NO: 18409339 NR Description: strictosidine synthase-related; protein id: supported by cDNA: 34197., supported by cDNA: gi_13122281,
  misc_feature (1)..(137): Homolog of NCBI NO: 15230488 NR Description: strictosidine synthase-related; protein id: supported by cDNA: gi_13430723 [Arabidopsis thaliana]
  misc_feature (1)..(137): Homolog of NCBI NO: 11358518 NR Description: mucin-like protein - Arabidopsis thaliana
  misc_feature (1)..(137): Homolog of NCBI NO: 15230477 NR Description: strictosidine synthase-related; protein id:
  misc_feature (1)..(146): Homolog of NCBI NO: 15230490 NR Description: strictosidine synthase-related; protein id: supported by cDNA: 38956., supported by cDNA: gi_18700142
  misc_feature (6)..(144): Homolog of NCBI NO: 37536558 NR Description: mucin-like protein [Oryza sativa (japonica
  misc_feature (14)..(138): Homolog of NCBI NO: 15596490 NR Description: hypothetical protein [Pseudomonas aeruginosa PA01]
  misc_feature (10)..(138): Homolog of NCBI NO: 23237921 NR Description: contains ESTs
  misc_feature (70)..(146): Homolog of NCBI NO: 34395247 NR Description: putative strictosidine synthase [Oryza sativa
  misc_feature (70)..(146): Homolog of NCBI NO: 34393255 NR Description: putative male fertility protein [Oryza sativa
MPVLFSSRSLILSIIVPLLISIALYKLDTFDPAIVPSDAFTSSATSLPPLINDEFLTGAEFIGVGLLNIPEDIAYHKESNLIYTGCVDGWVKRVKVADSVNDSVVEDWVNTGGRPLGIAFGIHGEVIVADVHKVGVLKSNFEKSQS

SEQ ID NO: 71914 - DNA, 842 bp, Arabidopsis thaliana
  misc_feature (1)..(842): Ceres Seq. ID no. 4905347
  misc_feature: MA Experiment ID: 20000180 Result: Up-regulated in Transcription
  misc_feature: MA Experiment 20000180 PARAMETER Experiment Name: At_Germinating_Seeds_P Parameter: Age (hr) Value: 24 vs. 0
  misc_feature: MA Experiment 20000180 PARAMETER Experiment Name: At_Germinating_Seeds_P Parameter: Tissue Value: Germinating Seeds
  misc_feature: MA Experiment ID: 20000184 Result: Down-regulated in Transcription
  misc_feature: MA Experiment 20000184 PARAMETER Experiment Name: At_Shoots__P Parameter: Age (day) Value: 7
  misc_feature: MA Experiment 20000184 PARAMETER Experiment Name: At_Shoots__P Parameter: Tissue Value: Shoots vs. Whole Plant
ctacgattagtttaatctctcagtccaccggagagtgtaaaaacagcgagaaaatcgacgtcgttcgatcgccgactgcgagcgaagaagaagatggctgaagaagaggttgactacgtattcaaggttgttttgaacggagattcagcggttgggaagtcacagctacgagctcggttcacaagagacgaattcagtatggattccaaagccacaattcggtgtcgatttcaatactcgaacgctcgttattgacgataagaacatcaaagctcagatctgggacatcgcaggccagaaacgacacagagctattacataagcctactacaaaggtgctgttggtgcaatgttagtttacgatatgacaatacgtgaaagctttgagcacattcctcagtggttggaagaactacgagtgcacgcggataagaacattgtcatcatcttgattggtaacaagacggatttagagaaccagagatcggttcctgtggaagatgccaaggaatttgcagagaaggaagggctttttttccttgagacttcagcactaaactccacaaatgtcgagaactctttcaacactctcttgactgagatcttcaacaaggtgaacaagaagaatctcgctaagaccaccgtgtcttgcagctcacaagtcagtcttctaagaccaccgtgtgttgcagctcaataagtcagtcttctcgatttggtccattacagtttagaataaaataaaccatttcatatacttcaaaaatattgttttgatttggtttttagatagtgagttttgtgtagtgtacgttgatttttagaacaaaatctttcatttt

SEQ ID NO: 71915 - protein, 116 aa, Arabidopsis thaliana; identical to SEQ ID NO: 29880
  peptide (1)..(116): Ceres Seq. ID no. 4905348
  misc_feature (1)..(87): Pfam Name: Ras family Pfam Description: Ras family
  misc_feature (1)..(116): Homolog of NCBI NO: 15227197 NR Description: GTP-binding protein, putative; protein id:
  misc_feature (1)..(95): Homolog of NCBI NO: 1184985 NR Description: ATGB3 [Arabidopsis thaliana]
  misc_feature (1)..(95): Homolog of NCBI NO: 15236099 NR Description: GTP-binding protein, putative; protein id: supported by cDNA: 8545., supported by cDNA: gi_1184984,
  misc_feature (1)..(95): Homolog of NCBI NO: 21617896 NR Description: GTP-binding protein GB3 [Arabidopsis thaliana]
  misc_feature (1)..(95): Homolog of NCBI NO: 7438430 NR Description: GTP-binding protein - garden pea
  misc_feature (1)..(95): Homolog of NCBI NO: 15238392 NR Description: GTP-binding protein, putative; protein id: supported by cDNA: 30437., supported by cDNA: gi_15028288,

SEQ ID NO: 71916 - protein, 111 aa, Arabidopsis thaliana; identical to SEQ ID NO: 29881
  peptide (1)..(111): Ceres Seq. ID no. 4905349
  misc_feature (1)..(82): Pfam Name: Ras family Pfam Description: Ras family
  misc_feature (1)..(111): Homolog of NCBI NO: 15227197 NR Description: GTP-binding protein, putative; protein id:
  misc_feature (1)..(90): Homolog of NCBI NO: 1184985 NR Description: ATGB3 [Arabidopsis thaliana]
  misc_feature (1)..(90): Homolog of NCBI NO: 21617896 NR Description: GTP-binding protein GB3 [Arabidopsis thaliana]
  misc_feature (1)..(90): Homolog of NCBI NO: 15236099 NR Description: GTP-binding protein, putative; protein id: supported by cDNA: 8545., supported by cDNA: gi_1184984,
  misc_feature (1)..(90): Homolog of NCBI NO: 7438430 NR Description: GTP-binding protein - garden pea
  misc_feature (1)..(90): Homolog of NCBI NO: 15238392 NR Description: GTP-binding protein, putative; protein id: supported by cDNA: 30437., supported by cDNA: gi_15028288,

SEQ ID NO: 71917 - DNA, 971 bp, Arabidopsis thaliana
  misc_feature (1)..(971): Ceres Seq. ID no. 4905361
  misc_feature: MA Experiment ID: 108434 Result: Down-regulated in Transcription
  misc_feature: MA Experiment 108434 PARAMETER Experiment Name: At_Root_Tips_cDNA_P Parameter: Tissue Value: Root Tips
  misc_feature: MA Experiment ID: 108461 Result: Down-regulated in Transcription
  misc_feature: MA Experiment 108461 PARAMETER Experiment Name: At_Germinating_Seeds_cDNA_P Parameter: Age (day) Value: 1 vs. 0
  misc_feature: MA Experiment 108461 PARAMETER Experiment Name: At_Germinating_Seeds_cDNA_P Parameter: Tissue Value: Germinating Seeds
  misc_feature: MA Experiment ID: 108462 Result: Down-regulated in Transcription
  misc_feature: MA Experiment 108462 PARAMETER Experiment Name: At_Germinating_Seeds_cDNA_P Parameter: Age (day) Value: 2 vs. 0
  misc_feature: MA Experiment 108462 PARAMETER Experiment Name: At_Germinating_Seeds_cDNA_P Parameter: Tissue Value: Germinating Seeds
  misc_feature: MA Experiment ID: 108573 Result: Up-regulated in Transcription
  misc_feature: MA Experiment 108573 PARAMETER Experiment Name: At_Drought_cDNA_P Parameter: Timepoint (hr) Value: 6
  misc_feature: MA Experiment 108573 PARAMETER Experiment Name: At_Drought_cDNA_P Parameter: Tissue Value: Aerial
  misc_feature: MA Experiment 108573 PARAMETER Experiment Name: At_Drought_cDNA_P Parameter: Treatment Value: Drought vs. No Drought
  misc_feature: MA Experiment ID: 20000111 Result: Down-regulated in Transcription
  misc_feature: MA Experiment 20000111 PARAMETER Experiment Name: At_42deg_Heat_cDNA_P Parameter: Temperature (deg C) Value: 42 vs. 22
  misc_feature: MA Experiment 20000111 PARAMETER Experiment Name: At_42deg_Heat_cDNA_P Parameter: Timepoint (hr) Value: 6
  misc_feature: MA Experiment 20000111 PARAMETER Experiment Name: At_42deg_Heat_cDNA_P Parameter: Tissue Value: Aerial
  misc_feature: MA Experiment ID: 20000112 Result: Down-regulated in Transcription
  misc_feature: MA Experiment 20000112 PARAMETER Experiment Name: At_42deg_Heat_cDNA_P Parameter: Temperature (deg C) Value: 42 vs. 22
  misc_feature: MA Experiment 20000112 PARAMETER Experiment Name: At_42deg_Heat_cDNA_P Parameter: Timepoint (hr) Value: 2
  misc_feature: MA Experiment 20000112 PARAMETER Experiment Name: At_42deg_Heat_cDNA_P Parameter: Tissue Value: Aerial
  misc_feature: MA Experiment ID: 20000113 Result: Down-regulated in Transcription
  misc_feature: MA Experiment 20000113 PARAMETER Experiment Name: At_42deg_Heat_cDNA_P Parameter: Temperature (deg C) Value: 42 vs. 22
  misc_feature: MA Experiment 20000113 PARAMETER Experiment Name: At_42deg_Heat_cDNA_P Parameter: Timepoint (hr) Value: 8
  misc_feature: MA Experiment 20000113 PARAMETER Experiment Name: At_42deg_Heat_cDNA_P Parameter: Tissue Value: Aerial
  misc_feature: MA Experiment ID: 20000171 Result: Down-regulated in Transcription
  misc_feature: MA Experiment 20000171 PARAMETER Experiment Name: At_42deg_Heat_P Parameter: Age (day) Value: 14
  misc_feature: MA Experiment 20000171 PARAMETER Experiment Name: At_42deg_Heat_P Parameter: Organism Value: A. thaliana
  misc_feature: MA Experiment 20000171 PARAMETER Experiment Name: At_42deg_Heat_P Parameter: Plant Line Value: WS
  misc_feature: MA Experiment 20000171 PARAMETER Experiment Name: At_42deg_Heat_P Parameter: Temperature (deg C) Value: 42 vs. 22
  misc_feature: MA Experiment 20000171 PARAMETER Experiment Name: At_42deg_Heat_P Parameter: Timepoint (hr) Value: 1
  misc_feature: MA Experiment 20000171 PARAMETER Experiment Name: At_42deg_Heat_P Parameter: Tissue Value: Aerial
  misc_feature: MA Experiment ID: 20000224 Result: Down-regulated in Transcription
  misc_feature: MA Experiment ID: 20000227 Result: Down-regulated in Transcription
  misc_feature: MA Experiment 20000227 PARAMETER Experiment Name: At_Root-Tips-vs-Tops_P Parameter: Tissue Value: Root Tips vs. Root Tops
  misc_feature: MA Experiment ID: 20000234 Result: Down-regulated in Transcription
  misc_feature: MA Experiment 20000234 PARAMETER Experiment Name: At_Siliques_P Parameter: Age (day) Value: 21
  misc_feature: MA Experiment 20000234 PARAMETER Experiment Name: At_Siliques_P Parameter: Organism Value: A. thaliana
  misc_feature: MA Experiment 20000234 PARAMETER Experiment Name: At_Siliques_P Parameter: Plant Line Value: WS
  misc_feature: MA Experiment 20000234 PARAMETER Experiment Name: At_Siliques_P Parameter: Tissue Value: Less Than 5mm Siliques vs. Whole Plant
  misc_feature: MA Experiment ID: 20000235 Result: Down-regulated in Transcription
  misc_feature: MA Experiment 20000235 PARAMETER Experiment Name: At_Siliques_P Parameter: Age (day) Value: 21
  misc_feature: MA Experiment 20000235 PARAMETER Experiment Name: At_Siliques_P Parameter: Organism Value: A. thaliana
  misc_feature: MA Experiment 20000235 PARAMETER Experiment Name: At_Siliques_P Parameter: Plant Line Value: WS
  misc_feature: MA Experiment 20000235 PARAMETER Experiment Name: At_Siliques_P Parameter: Tissue Value: 5-10mm Siliques vs. Whole Plant
  misc_feature: MA Experiment ID: 20000265 Result: Down-regulated in Transcription
  misc_feature: MA Experiment 20000265 PARAMETER Experiment Name: At_Open_Flower_P Parameter: Age (day) Value: 21
  misc_feature: MA Experiment 20000265 PARAMETER Experiment Name: At_Open_Flower_P Parameter: Plant Line Value: WS
  misc_feature: MA Experiment 20000265 PARAMETER Experiment Name: At_Open_Flower_P Parameter: Tissue Value: Closed Flower vs. Whole Plant
  misc_feature: MA Experiment ID: 20000438 Result: Down-regulated in Transcription
  misc_feature: MA Experiment 20000438 PARAMETER Experiment Name: At_Shoots__P Parameter: Age (day) Value: 14
  misc_feature: MA Experiment 20000438 PARAMETER Experiment Name: At_Shoots__P Parameter: Tissue Value: Shoots vs. Whole Plant
  misc_feature: MA Experiment ID: 20000455 Result: Down-regulated in Transcription
  misc_feature: MA Experiment 20000455 PARAMETER Experiment Name: At_100uM_ABA_P Parameter: Age (day) Value: 16
  misc_feature: MA Experiment 20000455 PARAMETER Experiment Name: At_100uM_ABA_P Parameter: Organism Value: A. thaliana
  misc_feature: MA Experiment 20000455 PARAMETER Experiment Name: At_100uM_ABA_P Parameter: Plant Line Value: WS
  misc_feature: MA Experiment 20000455 PARAMETER Experiment Name: At_100uM_ABA_P Parameter: Timepoint (hr) Value: 48
  misc_feature: MA Experiment 20000455 PARAMETER Experiment Name: At_100uM_ABA_P Parameter: Tissue Value: Aerial
  misc_feature: MA Experiment 20000455 PARAMETER Experiment Name: At_100uM_ABA_P Parameter: Treatment Value: 100uM ABA vs. No Treatment
  misc_feature: MA Experiment ID: 20001248 Result: Up-regulated in Transcription
  misc_feature: MA Experiment 20001248 PARAMETER Experiment Name: At_Far-red-induction_P Parameter: Age (day) Value: 7
  misc_feature: MA Experiment 20001248 PARAMETER Experiment Name: At_Far-red-induction_P Parameter: Light Value: Far-red vs. White
  misc_feature: MA Experiment 20001248 PARAMETER Experiment Name: At_Far-red-induction_P Parameter: Organism Value: A. thaliana
  misc_feature: MA Experiment 20001248 PARAMETER Experiment Name: At_Far-red-induction_P Parameter: Plant Line Value: Columbia
  misc_feature: MA Experiment 20001248 PARAMETER Experiment Name: At_Far-red-induction_P Parameter: Timepoint (hr) Value: 4
  misc_feature: MA Experiment 20001248 PARAMETER Experiment Name: At_Far-red-induction_P Parameter: Tissue Value: Whole Plant
  misc_feature: MA Experiment ID: 20001450 Result: Up-regulated in Transcription
  misc_feature: MA Experiment 20001450 PARAMETER Experiment Name: At_Far-red-induction_P Parameter: Age (day) Value: 7
  misc_feature: MA Experiment 20001450 PARAMETER Experiment Name: At_Far-red-induction_P Parameter: Light Value: Far-red vs. White
  misc_feature: MA Experiment 20001450 PARAMETER Experiment Name: At_Far-red-induction_P Parameter: Organism Value: A. thaliana
  misc_feature: MA Experiment 20001450 PARAMETER Experiment Name: At_Far-red-induction_P Parameter: Plant Line Value: Columbia
  misc_feature: MA Experiment 20001450 PARAMETER Experiment Name: At_Far-red-induction_P Parameter: Timepoint (hr) Value: 8
  misc_feature: MA Experiment 20001450 PARAMETER Experiment Name: At_Far-red-induction_P Parameter: Tissue Value: Whole Plant
  misc_feature: MA Experiment ID: 20001451 Result: Up-regulated in Transcription
  misc_feature: MA Experiment 20001451 PARAMETER Experiment Name: At_Far-red-induction_P Parameter: Age (day) Value: 7
  misc_feature: MA Experiment 20001451 PARAMETER Experiment Name: At_Far-red-induction_P Parameter: Light Value: Far-red vs. White
  misc_feature: MA Experiment 20001451 PARAMETER Experiment Name: At_Far-red-induction_P Parameter: Organism Value: A. thaliana
  misc_feature: MA Experiment 20001451 PARAMETER Experiment Name: At_Far-red-induction_P Parameter: Plant Line Value: Columbia
  misc_feature: MA Experiment 20001451 PARAMETER Experiment Name: At_Far-red-induction_P Parameter: Timepoint (hr) Value: 24
  misc_feature: MA Experiment 20001451 PARAMETER Experiment Name: At_Far-red-induction_P Parameter: Tissue Value: Whole Plant
  misc_feature: MA Experiment ID: 20001555 Result: Down-regulated in Transcription
  misc_feature: MA Experiment 20001555 PARAMETER Experiment Name: At_Drought_Soil_Dry_P Parameter: Age (day) Value: 24
  misc_feature: MA Experiment 20001555 PARAMETER Experiment Name: At_Drought_Soil_Dry_P Parameter: Organism Value: A. thaliana
  misc_feature: MA Experiment 20001555 PARAMETER Experiment Name: At_Drought_Soil_Dry_P Parameter: Plant Line Value: WS
  misc_feature: MA Experiment 20001555 PARAMETER Experiment Name: At_Drought_Soil_Dry_P Parameter: Post Timepoint (hr) Value: None
  misc_feature: MA Experiment 20001555 PARAMETER Experiment Name: At_Drought_Soil_Dry_P Parameter: Post-Treatment Value: None
  misc_feature: MA Experiment 20001555 PARAMETER Experiment Name: At_Drought_Soil_Dry_P Parameter: Timepoint (day) Value: 10
  misc_feature: MA Experiment 20001555 PARAMETER Experiment Name: At_Drought_Soil_Dry_P Parameter: Treatment Value: Drought vs. No Drought
  misc_feature: MA Experiment ID: 20001556 Result: Down-regulated in Transcription
  misc_feature: MA Experiment 20001556 PARAMETER Experiment Name: At_Drought_Soil_Dry_P Parameter: Age (day) Value: 26
  misc_feature: MA Experiment 20001556 PARAMETER Experiment Name: At_Drought_Soil_Dry_P Parameter: Organism Value: A. thaliana
  misc_feature: MA Experiment 20001556 PARAMETER Experiment Name: At_Drought_Soil_Dry_P Parameter: Plant Line Value: WS
  misc_feature: MA Experiment 20001556 PARAMETER Experiment Name: At_Drought_Soil_Dry_P Parameter: Post Timepoint (hr) Value: None
  misc_feature: MA Experiment 20001556 PARAMETER Experiment Name: At_Drought_Soil_Dry_P Parameter: Post-Treatment Value: None
  misc_feature: MA Experiment 20001556 PARAMETER Experiment Name: At_Drought_Soil_Dry_P Parameter: Timepoint (day) Value: 12
  misc_feature: MA Experiment 20001556 PARAMETER Experiment Name: At_Drought_Soil_Dry_P Parameter: Treatment Value: Drought vs. No Drought
  misc_feature: MA Experiment ID: 20001559 Result: Down-regulated in Transcription
  misc_feature: MA Experiment 20001559 PARAMETER Experiment Name: At_Drought_Soil_Dry_P Parameter: Age (day) Value: 28
  misc_feature: MA Experiment 20001559 PARAMETER Experiment Name: At_Drought_Soil_Dry_P Parameter: Organism Value: A. thaliana
  misc_feature: MA Experiment 20001559 PARAMETER Experiment Name: At_Drought_Soil_Dry_P Parameter: Plant Line Value: WS
  misc_feature: MA Experiment 20001559 PARAMETER Experiment Name: At_Drought_Soil_Dry_P Parameter: Post Timepoint (hr) Value: 29
  misc_feature: MA Experiment 20001559 PARAMETER Experiment Name: At_Drought_Soil_Dry_P Parameter: Post-Treatment Value: Re-Water vs. No Drought
  misc_feature: MA Experiment 20001559 PARAMETER Experiment Name: At_Drought_Soil_Dry_P Parameter: Timepoint (day) Value: 14
  misc_feature: MA Experiment 20001559 PARAMETER Experiment Name: At_Drought_Soil_Dry_P Parameter: Treatment Value: Drought vs. No Drought
aacacatctctctctctctctctctctttctctctttttatatttttgtgtcccaatctcttcttcatttctgtttggttgccgagaaaacgcaggaaacttttctgcaaaaaaactcggtgaccatattcaaaactttcccacgttaattctctcttctttgttttgtttcagattcattacttttctccaaaaaactttcttcaagatctgttcttttaaataattatggcggaagaacatcgatgcgagacgcctgaaggtcaccgtctctgcgttaacaactgcggtttcttcggaagctcagcgacaatgaatctatgttcaaactgttacggcgatctctgtctcaaacaacaacaacaagcttccatgaaatcaaccgtcgaatcatctctctctccggtgatcgcacctgttctcgaaaactacgcggcggagttagagatcccgacgacgaagaagacagaggagaaaaaaccgattcaaattccgacggagcaaccgtctccgccgcaacggccgaatcgatgcaccgtatgtaggaaacgggtcgggttaaccgggtttatgtgtcggtgtgggacgactttttgtgggagtcataggtatccggaggttcatggttgtacgtttgatttcaaatcggcgggacgtgaagagatcgcgaaagctaatccgttggttattgcggcgaagcttcagaaaatatgaatcggagccgttgaccgatttctatctttaccctgagaaaatttcgattgtctcggtggatctcagccgttcattatgttattgtattacggacacgtgtcgcaagattaaggttgagatggtttcgtaactttttaattattttctttgtttatttccgaagaaattaaagtttttatgattgtgtggcttttgcttgtaaaaaaaaaaagggtttctctttgggaaaaagaaaagaaaatatatgaaattgtgtc

SEQ ID NO: 71918 - protein, 161 aa, Arabidopsis thaliana; identical to SEQ ID NO: 35639
  peptide (1)..(161): Ceres Seq. ID no. 4905362
  misc_feature (102)..(142): Pfam Name: AN1-like Zinc finger Pfam Description: AN1-like Zinc finger
  misc_feature (1)..(161): Homolog of NCBI NO: 18404102 NR Description: expressed protein; protein id: At2g36320.1, by cDNA: 24255. [Arabidopsis thaliana] >gi|25408460|pir||C84779
  misc_feature (1)..(161): Homolog of NCBI NO: 15231686 NR Description: zinc finger - like protein; protein id: supported by cDNA: gi_14596166 [Arabidopsis thaliana]
  misc_feature (1)..(161): Homolog of NCBI NO: 14596167 NR Description: zinc finger-like protein [Arabidopsis thaliana]
  misc_feature (1)..(161): Homolog of NCBI NO: 15225894 NR Description: putative zinc finger protein; protein id: supported by cDNA: 14203., supported by cDNA: gi_18253038
  misc_feature (4)..(161): Homolog of NCBI NO: 35187687 NR Description: zinc-finger protein [Oryza sativa (indica
  misc_feature (7)..(161): Homolog of NCBI NO: 18403408 NR Description: expressed protein; protein id: At1g51200.1, by cDNA: gi_15912334 [Arabidopsis thaliana]
  misc_feature (7)..(161): Homolog of NCBI NO: 25082726 NR Description: expressed protein [Arabidopsis thaliana]
  misc_feature (10)..(161): Homolog of NCBI NO: 15234402 NR Description: putative protein; protein id: At4g12040.1, by cDNA: 45., supported by cDNA: gi_13605498 [Arabidopsis
  misc_feature (4)..(161): Homolog of NCBI NO: 30908921 NR Description: putative zinc finger transcription factor ZFP33
  misc_feature (14)..(160): Homolog of NCBI NO: 15235819 NR Description: similar to zinc finger - like protein; protein

SEQ ID NO: 71919 - protein, 133 aa, Arabidopsis thaliana; identical to SEQ ID NO: 35640
  peptide (1)..(133): Ceres Seq. ID no. 4905363
  misc_feature (74)..(114): Pfam Name: AN1-like Zinc finger Pfam Description: AN1-like Zinc finger
  misc_feature (1)..(133): Homolog of NCBI NO: 18404102 NR Description: expressed protein; protein id: At2g36320.1, by cDNA: 24255. [Arabidopsis thaliana] >gi|25408460|pir||C84779
  misc_feature (1)..(133): Homolog of NCBI NO: 15231686 NR Description: zinc finger - like protein; protein id: supported by cDNA: gi_14596166 [Arabidopsis thaliana]
  misc_feature (1)..(133): Homolog of NCBI NO: 14596167 NR Description: zinc finger-like protein [Arabidopsis thaliana]
  misc_feature (1)..(133): Homolog of NCBI NO: 15225894 NR Description: putative zinc finger protein; protein id: supported by cDNA: 14203., supported by cDNA: gi_18253038
  misc_feature (1)..(133): Homolog of NCBI NO: 35187687 NR Description: zinc-finger protein [Oryza sativa (indica
  misc_feature (1)..(133): Homolog of NCBI NO: 18403408 NR Description: expressed protein; protein id: At1g51200.1, by cDNA: gi_15912334 [Arabidopsis thaliana]
  misc_feature (1)..(133): Homolog of NCBI NO: 25082726 NR Description: expressed protein [Arabidopsis thaliana]
  misc_feature (1)..(133): Homolog of NCBI NO: 15234402 NR Description: putative protein; protein id: At4g12040.1, by cDNA: 45., supported by cDNA: gi_13605498 [Arabidopsis
  misc_feature (1)..(133): Homolog of NCBI NO: 30908921 NR Description: putative zinc finger transcription factor ZFP33
  misc_feature (1)..(132): Homolog of NCBI NO: 15235819 NR Description: similar to zinc finger - like protein; protein

SEQ ID NO: 71920 - protein, 113 aa, Arabidopsis thaliana; identical to SEQ ID NO: 35641
  peptide (1)..(113): Ceres Seq. ID no. 4905364
  misc_feature (54)..(94): Pfam Name: AN1-like Zinc finger Pfam Description: AN1-like Zinc finger
  misc_feature (1)..(113): Homolog of NCBI NO: 18404102 NR Description: expressed protein; protein id: At2g36320.1, by cDNA: 24255. [Arabidopsis thaliana] >gi|25408460|pir||C84779
  misc_feature (1)..(113): Homolog of NCBI NO: 15231686 NR Description: zinc finger - like protein; protein id: supported by cDNA: gi_14596166 [Arabidopsis thaliana]
  misc_feature (1)..(113): Homolog of NCBI NO: 14596167 NR Description: zinc finger-like protein [Arabidopsis thaliana]
  misc_feature (1)..(113): Homolog of NCBI NO: 15225894 NR Description: putative zinc finger protein; protein id: supported by cDNA: 14203., supported by cDNA: gi_18253038
  misc_feature (1)..(113): Homolog of NCBI NO: 35187687 NR Description: zinc-finger protein [Oryza sativa (indica
  misc_feature (1)..(113): Homolog of NCBI NO: 18403408 NR Description: expressed protein; protein id: At1g51200.1, by cDNA: gi_15912334 [Arabidopsis thaliana]
  misc_feature (1)..(113): Homolog of NCBI NO: 25082726 NR Description: expressed protein [Arabidopsis thaliana]
  misc_feature (1)..(113): Homolog of NCBI NO: 15234402 NR Description: putative protein; protein id: At4g12040.1, by cDNA: 45., supported by cDNA: gi_13605498 [Arabidopsis
  misc_feature (1)..(113): Homolog of NCBI NO: 30908921 NR Description: putative zinc finger transcription factor ZFP33
  misc_feature (1)..(112): Homolog of NCBI NO: 15235819 NR Description: similar to zinc finger - like protein; protein

SEQ ID NO: 71921 - DNA, 1035 bp, Arabidopsis thaliana
  misc_feature (1)..(1035): Ceres Seq. ID no. 4905610
  misc_feature: MA Experiment ID: 108461 Result: Down-regulated in Transcription
  misc_feature: MA Experiment 108461 PARAMETER Experiment Name: At_Germinating_Seeds_cDNA_P Parameter: Age (day) Value: 1 vs. 0
  misc_feature: MA Experiment 108461 PARAMETER Experiment Name: At_Germinating_Seeds_cDNA_P Parameter: Tissue Value: Germinating Seeds
  misc_feature: MA Experiment ID: 108462 Result: Down-regulated in Transcription
  misc_feature: MA Experiment 108462 PARAMETER Experiment Name: At_Germinating_Seeds_cDNA_P Parameter: Age (day) Value: 2 vs. 0
  misc_feature: MA Experiment 108462 PARAMETER Experiment Name: At_Germinating_Seeds_cDNA_P Parameter: Tissue Value: Germinating Seeds
  misc_feature: MA Experiment ID: 108463 Result: Down-regulated in Transcription
  misc_feature: MA Experiment 108463 PARAMETER Experiment Name: At_Germinating_Seeds_cDNA_P Parameter: Age (day) Value: 3 vs. 0
  misc_feature: MA Experiment 108463 PARAMETER Experiment Name: At_Germinating_Seeds_cDNA_P Parameter: Tissue Value: Germinating Seeds
  misc_feature: MA Experiment ID: 108488 Result: Down-regulated in Transcription
  misc_feature: MA Experiment ID: 108501 Result: Up-regulated in Transcription
  misc_feature: MA Experiment 108501 PARAMETER Experiment Name: At_ap2_floral_buds_cDNA_P Parameter: Plant Line Value: ap2 (Ler.)
  misc_feature: MA Experiment 108501 PARAMETER Experiment Name: At_ap2_floral_buds_cDNA_P Parameter: Tissue Value: Closed Flower
  misc_feature: MA Experiment ID: 108595 Result: Up-regulated in Transcription
  misc_feature: MA Experiment 108595 PARAMETER Experiment Name: At_Ler-pi_Ovule_cDNA_P Parameter: Plant Line Value: null
  misc_feature: MA Experiment ID: 20000070 Result: Up-regulated in Transcription
  misc_feature: MA Experiment 20000070 PARAMETER Experiment Name: At_100uM_ABA_Mutants_cDNA_P Parameter: Plant Line Value: CS24
  misc_feature: MA Experiment 20000070 PARAMETER Experiment Name: At_100uM_ABA_Mutants_cDNA_P Parameter: Timepoint (hr) Value: 6
  misc_feature: MA Experiment 20000070 PARAMETER Experiment Name: At_100uM_ABA_Mutants_cDNA_P Parameter: Tissue Value: Aerial
  misc_feature: MA Experiment 20000070 PARAMETER Experiment Name: At_100uM_ABA_Mutants_cDNA_P Parameter: Treatment Value: 100uM ABA vs. No Treatment
  misc_feature: MA Experiment ID: 20000071 Result: Up-regulated in Transcription
  misc_feature: MA Experiment 20000071 PARAMETER Experiment Name: At_100uM_ABA_Mutants_cDNA_P Parameter: Plant Line Value: CS8104
  misc_feature: MA Experiment 20000071 PARAMETER Experiment Name: At_100uM_ABA_Mutants_cDNA_P Parameter: Timepoint (hr) Value: 6
  misc_feature: MA Experiment 20000071 PARAMETER Experiment Name: At_100uM_ABA_Mutants_cDNA_P Parameter: Tissue Value: Aerial
  misc_feature: MA Experiment 20000071 PARAMETER Experiment Name: At_100uM_ABA_Mutants_cDNA_P Parameter: Treatment Value: 100uM ABA vs. No Treatment
  misc_feature: MA Experiment ID: 20000072 Result: Up-regulated in Transcription
  misc_feature: MA Experiment 20000072 PARAMETER Experiment Name: At_100uM_ABA_Mutants_cDNA_P Parameter: Plant Line Value: CS8105
  misc_feature: MA Experiment 20000072 PARAMETER Experiment Name: At_100uM_ABA_Mutants_cDNA_P Parameter: Timepoint (hr) Value: 6
  misc_feature: MA Experiment 20000072 PARAMETER Experiment Name: At_100uM_ABA_Mutants_cDNA_P Parameter: Tissue Value: Aerial
  misc_feature: MA Experiment 20000072 PARAMETER Experiment Name: At_100uM_ABA_Mutants_cDNA_P Parameter: Treatment Value: 100uM ABA vs. No Treatment
  misc_feature: MA Experiment ID: 20000086 Result: Up-regulated in Transcription
  misc_feature: MA Experiment 20000086 PARAMETER Experiment Name: At_100uM_ABA_Mutants_cDNA_P Parameter: Plant Line Value: CS22
  misc_feature: MA Experiment 20000086 PARAMETER Experiment Name: At_100uM_ABA_Mutants_cDNA_P Parameter: Timepoint (hr) Value: 6
  misc_feature: MA Experiment 20000086 PARAMETER Experiment Name: At_100uM_ABA_Mutants_cDNA_P Parameter: Tissue Value: Aerial
  misc_feature: MA Experiment 20000086 PARAMETER Experiment Name: At_100uM_ABA_Mutants_cDNA_P Parameter: Treatment Value: 100uM ABA vs. No Treatment
  misc_feature: MA Experiment ID: 20000087 Result: Up-regulated in Transcription
  misc_feature: MA Experiment 20000087 PARAMETER Experiment Name: At_100uM_ABA_Mutants_cDNA_P Parameter: Plant Line Value: WS
  misc_feature: MA Experiment 20000087 PARAMETER Experiment Name: At_100uM_ABA_Mutants_cDNA_P Parameter: Timepoint (hr) Value: 6
  misc_feature: MA Experiment 20000087 PARAMETER Experiment Name: At_100uM_ABA_Mutants_cDNA_P Parameter: Tissue Value: Aerial
  misc_feature: MA Experiment 20000087 PARAMETER Experiment Name: At_100uM_ABA_Mutants_cDNA_P Parameter: Treatment Value: 100uM ABA vs. No Treatment
  misc_feature: MA Experiment ID: 20000112 Result: Up-regulated in Transcription
  misc_feature: MA Experiment 20000112 PARAMETER Experiment Name: At_42deg_Heat_cDNA_P Parameter: Temperature (deg C) Value: 42 vs. 22
  misc_feature: MA Experiment 20000112 PARAMETER Experiment Name: At_42deg_Heat_cDNA_P Parameter: Timepoint (hr) Value: 2
  misc_feature: MA Experiment 20000112 PARAMETER Experiment Name: At_42deg_Heat_cDNA_P Parameter: Tissue Value: Aerial
  misc_feature: MA Experiment ID: 20000117 Result: Up-regulated in Transcription
  misc_feature: MA Experiment 20000117 PARAMETER Experiment Name: At_100uM_ABA_Mutants_cDNA_P Parameter: Plant Line Value: Columbia
  misc_feature: MA Experiment 20000117 PARAMETER Experiment Name: At_100uM_ABA_Mutants_cDNA_P Parameter: Timepoint (hr) Value: 6
  misc_feature: MA Experiment 20000117 PARAMETER Experiment Name: At_100uM_ABA_Mutants_cDNA_P Parameter: Tissue Value: Aerial
  misc_feature: MA Experiment 20000117 PARAMETER Experiment Name: At_100uM_ABA_Mutants_cDNA_P Parameter: Treatment Value: 100uM ABA vs. No Treatment
  misc_feature: MA Experiment ID: 20000180 Result: Down-regulated in Transcription
  misc_feature: MA Experiment 20000180 PARAMETER Experiment Name: At_Germinating_Seeds_P Parameter: Age (hr) Value: 24 vs. 0
  misc_feature: MA Experiment 20000180 PARAMETER Experiment Name: At_Germinating_Seeds_P Parameter: Tissue Value: Germinating Seeds
  misc_feature: MA Experiment ID: 20000234 Result: Up-regulated in Transcription
  misc_feature: MA Experiment 20000234 PARAMETER Experiment Name: At_Siliques_P Parameter: Age (day) Value: 21
  misc_feature: MA Experiment 20000234 PARAMETER Experiment Name: At_Siliques_P Parameter: Organism Value: A. thaliana
  misc_feature: MA Experiment 20000234 PARAMETER Experiment Name: At_Siliques_P Parameter: Plant Line Value: WS
  misc_feature: MA Experiment 20000234 PARAMETER Experiment Name: At_Siliques_P Parameter: Tissue Value: Less Than 5mm Siliques vs. Whole Plant
  misc_feature: MA Experiment ID: 20000235 Result: Up-regulated in Transcription
  misc_feature: MA Experiment 20000235 PARAMETER Experiment Name: At_Siliques_P Parameter: Age (day) Value: 21
  misc_feature: MA Experiment 20000235 PARAMETER Experiment Name: At_Siliques_P Parameter: Organism Value: A. thaliana
  misc_feature: MA Experiment 20000235 PARAMETER Experiment Name: At_Siliques_P Parameter: Plant Line Value: WS
  misc_feature: MA Experiment 20000235 PARAMETER Experiment Name: At_Siliques_P Parameter: Tissue Value: 5-10mm Siliques vs. Whole Plant
  misc_feature: MA Experiment ID: 20000264 Result: Up-regulated in Transcription
  misc_feature: MA Experiment 20000264 PARAMETER Experiment Name: At_Open_Flower_P Parameter: Age (day) Value: 21
  misc_feature: MA Experiment 20000264 PARAMETER Experiment Name: At_Open_Flower_P Parameter: Plant Line Value: WS
  misc_feature: MA Experiment 20000264 PARAMETER Experiment Name: At_Open_Flower_P Parameter: Tissue Value: Open Flower vs. Whole Plant
  misc_feature: MA Experiment ID: 20000286 Result: Up-regulated in Transcription
  misc_feature: MA Experiment 20000286 PARAMETER Experiment Name: At_Open_Flower_P Parameter: Age (day) Value: 21
  misc_feature: MA Experiment 20000286 PARAMETER Experiment Name: At_Open_Flower_P Parameter: Plant Line Value: WS
  misc_feature: MA Experiment 20000286 PARAMETER Experiment Name: At_Open_Flower_P Parameter: Tissue Value: Half Open vs. Whole Plant
  misc_feature: MA Experiment ID: 20000437 Result: Up-regulated in Transcription
  misc_feature: MA Experiment 20000437 PARAMETER Experiment Name: At_Drought_P Parameter: Age (day) Value: 8
  misc_feature: MA Experiment 20000437 PARAMETER Experiment Name: At_Drought_P Parameter: Organism Value: A. thaliana
  misc_feature: MA Experiment 20000437 PARAMETER Experiment Name: At_Drought_P Parameter: Plant Line Value: WS
  misc_feature: MA Experiment 20000437 PARAMETER Experiment Name: At_Drought_P Parameter: Timepoint (hr) Value: 24
  misc_feature: MA Experiment 20000437 PARAMETER Experiment Name: At_Drought_P Parameter: Tissue Value: Whole Plant
  misc_feature: MA Experiment 20000437 PARAMETER Experiment Name: At_Drought_P Parameter: Treatment Value: Drought vs. No Drought
  misc_feature: MA Experiment ID: 20000527 Result: Down-regulated in Transcription
  misc_feature: MA Experiment 20000527 PARAMETER Experiment Name: At_10percent_PEG_P Parameter: Age (day) Value: 20
  misc_feature: MA Experiment 20000527 PARAMETER Experiment Name: At_10percent_PEG_P Parameter: Organism Value: A. thaliana
  misc_feature: MA Experiment 20000527 PARAMETER Experiment Name: At_10percent_PEG_P Parameter: Plant Line Value: WS
  misc_feature: MA Experiment 20000527 PARAMETER Experiment Name: At_10percent_PEG_P Parameter: Timepoint (day) Value: 20
  misc_feature: MA Experiment 20000527 PARAMETER Experiment Name: At_10percent_PEG_P Parameter: Tissue Value: Whole Plant
  misc_feature: MA Experiment 20000527 PARAMETER Experiment Name: At_10percent_PEG_P Parameter: Treatment Value: 10percent PEG vs. No Treatment
  misc_feature: MA Experiment ID: 20000794 Result: Up-regulated in Transcription
  misc_feature: MA Experiment 20000794 PARAMETER Experiment Name: At_Petals_P Parameter: Age (day) Value: 23-25 days
  misc_feature: MA Experiment 20000794 PARAMETER Experiment Name: At_Petals_P Parameter: Plant Line Value: WS
  misc_feature: MA Experiment 20000794 PARAMETER Experiment Name: At_Petals_P Parameter: Tissue Value: Petals vs. Whole plant
  misc_feature: MA Experiment ID: 20001556 Result: Up-regulated in Transcription
  misc_feature: MA Experiment 20001556 PARAMETER Experiment Name: At_Drought_Soil_Dry_P Parameter: Age (day) Value: 26
  misc_feature: MA Experiment 20001556 PARAMETER Experiment Name: At_Drought_Soil_Dry_P Parameter: Organism Value: A. thaliana
  misc_feature: MA Experiment 20001556 PARAMETER Experiment Name: At_Drought_Soil_Dry_P Parameter: Plant Line Value: WS
  misc_feature: MA Experiment 20001556 PARAMETER Experiment Name: At_Drought_Soil_Dry_P Parameter: Post Timepoint (hr) Value: None
  misc_feature: MA Experiment 20001556 PARAMETER Experiment Name: At_Drought_Soil_Dry_P Parameter: Post-Treatment Value: None
  misc_feature: MA Experiment 20001556 PARAMETER Experiment Name: At_Drought_Soil_Dry_P Parameter: Timepoint (day) Value: 12
  misc_feature: MA Experiment 20001556 PARAMETER Experiment Name: At_Drought_Soil_Dry_P Parameter: Treatment Value: Drought vs. No Drought
  misc_feature: MA Experiment ID: 20001904 Result: Up-regulated in Transcription
  misc_feature: MA Experiment 20001904 PARAMETER Experiment Name: At_Drought_Reproduction_P Parameter: Age (day) Value: 37
  misc_feature: MA Experiment 20001904 PARAMETER Experiment Name: At_Drought_Reproduction_P Parameter: Organism Value: A. thaliana
  misc_feature: MA Experiment 20001904 PARAMETER Experiment Name: At_Drought_Reproduction_P Parameter: Plant Line Value: WS
  misc_feature: MA Experiment 20001904 PARAMETER Experiment Name: At_Drought_Reproduction_P Parameter: Timepoint (day) Value: 7
  misc_feature: MA Experiment 20001904 PARAMETER Experiment Name: At_Drought_Reproduction_P Parameter: Tissue Value: Rosettes
  misc_feature: MA Experiment 20001904 PARAMETER Experiment Name: At_Drought_Reproduction_P Parameter: Treatment Value: Drought vs. No Drought
  misc_feature: MA Experiment ID: 20001905 Result: Up-regulated in Transcription
  misc_feature: MA Experiment 20001905 PARAMETER Experiment Name: At_Drought_Reproduction_P Parameter: Age (day) Value: 40
  misc_feature: MA Experiment 20001905 PARAMETER Experiment Name: At_Drought_Reproduction_P Parameter: Organism Value: A. thaliana
  misc_feature: MA Experiment 20001905 PARAMETER Experiment Name: At_Drought_Reproduction_P Parameter: Plant Line Value: WS
  misc_feature: MA Experiment 20001905 PARAMETER Experiment Name: At_Drought_Reproduction_P Parameter: Timepoint (day) Value: 10
  misc_feature: MA Experiment 20001905 PARAMETER Experiment Name: At_Drought_Reproduction_P Parameter: Tissue Value: Rosettes
  misc_feature: MA Experiment 20001905 PARAMETER Experiment Name: At_Drought_Reproduction_P Parameter: Treatment Value: Drought vs. No Drought
  misc_feature: MA Experiment ID: 20001911 Result: Up-regulated in Transcription
  misc_feature: MA Experiment 20001911 PARAMETER Experiment Name: At_Drought_Reproduction_P Parameter: Age (day) Value: 40
  misc_feature: MA Experiment 20001911 PARAMETER Experiment Name: At_Drought_Reproduction_P Parameter: Organism Value: A. thaliana
  misc_feature: MA Experiment 20001911 PARAMETER Experiment Name: At_Drought_Reproduction_P Parameter: Plant Line Value: WS
  misc_feature: MA Experiment 20001911 PARAMETER Experiment Name: At_Drought_Reproduction_P Parameter: Timepoint (day) Value: 10
  misc_feature: MA Experiment 20001911 PARAMETER Experiment Name: At_Drought_Reproduction_P Parameter: Tissue Value: Flowers
  misc_feature: MA Experiment 20001911 PARAMETER Experiment Name: At_Drought_Reproduction_P Parameter: Treatment Value: Drought vs. No Drought
aatgtgattaagtaaagtgagggagaagcaacgagagatagagatagagagatcaagatgagaggatctgatcagaagattctactgatggttatggtggttgtagcagttgtagctgcggctcaaggccaagaagagactactggattcgtgacatggggtaacaattactaccagacatggggacatcaagctttggttattaataaaacctctgagctccagctcaccctcgataaaaactctgggtccgggtttgaatcccaattgatttacggatcaggatacttcaacgtaagaatcaaggcacctcaaactacgtctacgggagtcattacttccttctatttaatctcccgttcaagccgccatgatgagctctgtttccagatcttgggaaagaatgggccaccgtatttgctgaatacgaatatgtatctgtacggtgaaggaggcaaagatcagaggtttcgtctctggtttgatccaacaaaagattaccattcctacagttttctttggaaccctaatcaacttgtgttttatgttgacgatacaccgatcagggtgtacagcaagaatccagatgtttactacccatcggtgcagacaatgttcctaatgggaagtgtgcaaaacggatcgataattgacccgaagcagatgccttacattgctaagttccaggcatcaaagattgaagggtgtaagactgagttcatgggaatagataaatgcactgatcctaagttctggtggaatcgcaaacagctaagctctaaagagaagacactgtacctaaacgcaaggaagacgtacctggattatgactattgttctgacagacagcgatatccaaaggtgcctcaagaatgtggaagttacacttagagaaagatcaatacctgtcacagggttaagcctacaaaacaattatcttgaaaaaataacttatgttactgtaagatgctttatgataagccttttctatcaaataacaacattattgtcatcaatgctagatacattactatg

SEQ ID NO: 71922 - protein, 277 aa, Arabidopsis thaliana; identical to SEQ ID NO: 28169
  peptide (1)..(277): Ceres Seq. ID no. 4905611
  misc_feature (34)..(218): Pfam Name: Glycosyl hydrolases family 16 Pfam Description: Glycosyl hydrolases family 16
  misc_feature (1)..(277): Homolog of NCBI NO: 18408662 NR Description: xyloglucan endotransglycosylase, putative;
  misc_feature (11)..(277): Homolog of NCBI NO: 38605515 NR Description: Probable xyloglucan
  misc_feature (8)..(273): Homolog of NCBI NO: 15230246 NR Description: xyloglucan endotransglycosylase, putative; id: At3g25050.1 [Arabidopsis thaliana]
  misc_feature (15)..(273): Homolog of NCBI NO: 15235587 NR Description: xyloglucan endotransglycosylase, putative;
  misc_feature (8)..(273): Homolog of NCBI NO: 22328589 NR Description: xyloglucan endotransglycosylase, putative;
  misc_feature (8)..(273): Homolog of NCBI NO: 38605518 NR Description: Putative xyloglucan
  misc_feature (9)..(273): Homolog of NCBI NO: 15240733 NR Description: xyloglucan endotransglycosylase (EXGT-A4); id: At5g13870.1 [Arabidopsis thaliana] endoxyloglucan transferase [Arabidopsis thaliana]
  misc_feature (32)..(273): Homolog of NCBI NO: 11138242 NR Description: xyloglucan endotransglycosylase [Pisum sativum]
  misc_feature (7)..(273): Homolog of NCBI NO: 7447416 NR Description: xyloglucan endo-1,4-beta-D-glucanase (EC 3.2.1.-) - common nasturtium >gi|1008904|gb|AAB39950.1| xyloglucan
  misc_feature (32)..(273): Homolog of NCBI NO: 3986172 NR Description: EXGT1 [Pisum sativum]

SEQ ID NO: 71923 - protein, 267 aa, Arabidopsis thaliana; identical to SEQ ID NO: 28170
  peptide (1)..(267): Ceres Seq. ID no. 4905612
  misc_feature (24)..(208): Pfam Name: Glycosyl hydrolases family 16 Pfam Description: Glycosyl hydrolases family 16
  misc_feature (1)..(267): Homolog of NCBI NO: 18408662 NR Description: xyloglucan endotransglycosylase, putative;
  misc_feature (1)..(267): Homolog of NCBI NO: 38605515 NR Description: Probable xyloglucan
  misc_feature (1)..(263): Homolog of NCBI NO: 15230246 NR Description: xyloglucan endotransglycosylase, putative; id: At3g25050.1 [Arabidopsis thaliana]
  misc_feature (5)..(263): Homolog of NCBI NO: 15235587 NR Description: xyloglucan endotransglycosylase, putative;
  misc_feature (1)..(263): Homolog of NCBI NO: 22328589 NR Description: xyloglucan endotransglycosylase, putative;
  misc_feature (1)..(263): Homolog of NCBI NO: 38605518 NR Description: Putative xyloglucan
  misc_feature (1)..(263): Homolog of NCBI NO: 15240733 NR Description: xyloglucan endotransglycosylase (EXGT-A4); id: At5g13870.1 [Arabidopsis thaliana] endoxyloglucan transferase [Arabidopsis thaliana]
  misc_feature (22)..(263): Homolog of NCBI NO: 11138242 NR Description: xyloglucan endotransglycosylase [Pisum sativum]
  misc_feature (1)..(263): Homolog of NCBI NO: 7447416 NR Description: xyloglucan endo-1,4-beta-D-glucanase (EC 3.2.1.-) - common nasturtium >gi|1008904|gb|AAB39950.1| xyloglucan
  misc_feature (22)..(263): Homolog of NCBI NO: 3986172 NR Description: EXGT1 [Pisum sativum]

SEQ ID NO: 71924 - protein, 265 aa, Arabidopsis thaliana; identical to SEQ ID NO: 28171
  peptide (1)..(265): Ceres Seq. ID no. 4905613
  misc_feature (22)..(206): Pfam Name: Glycosyl hydrolases family 16 Pfam Description: Glycosyl hydrolases family 16
  misc_feature (1)..(265): Homolog of NCBI NO: 18408662 NR Description: xyloglucan endotransglycosylase, putative;
  misc_feature (1)..(265): Homolog of NCBI NO: 38605515 NR Description: Probable xyloglucan
  misc_feature (1)..(261): Homolog of NCBI NO: 15230246 NR Description: xyloglucan endotransglycosylase, putative; id: At3g25050.1 [Arabidopsis thaliana]
  misc_feature (3)..(261): Homolog of NCBI NO: 15235587 NR Description: xyloglucan endotransglycosylase, putative;
  misc_feature (1)..(261): Homolog of NCBI NO: 22328589 NR Description: xyloglucan endotransglycosylase, putative;
  misc_feature (1)..(261): Homolog of NCBI NO: 38605518 NR Description: Putative xyloglucan
  misc_feature (1)..(261): Homolog of NCBI NO: 15240733 NR Description: xyloglucan endotransglycosylase (EXGT-A4); id: At5g13870.1 [Arabidopsis thaliana] endoxyloglucan transferase [Arabidopsis thaliana]
  misc_feature (20)..(261): Homolog of NCBI NO: 11138242 NR Description: xyloglucan endotransglycosylase [Pisum sativum]
  misc_feature (1)..(261): Homolog of NCBI NO: 7447416 NR Description: xyloglucan endo-1,4-beta-D-glucanase (EC 3.2.1.-) - common nasturtium >gi|1008904|gb|AAB39950.1| xyloglucan
  misc_feature (20)..(261): Homolog of NCBI NO: 3986172 NR Description: EXGT1 [Pisum sativum]

SEQ ID NO: 71925 - DNA, 830 bp, Arabidopsis thaliana
  misc_feature (1)..(830): Ceres Seq. ID no. 4905806
  misc_feature: MA Experiment ID: 108461 Result: Up-regulated in Transcription
  misc_feature: MA Experiment 108461 PARAMETER Experiment Name: At_Germinating_Seeds_cDNA_P Parameter: Age (day) Value: 1 vs. 0
  misc_feature: MA Experiment 108461 PARAMETER Experiment Name: At_Germinating_Seeds_cDNA_P Parameter: Tissue Value: Germinating Seeds
  misc_feature: MA Experiment ID: 108462 Result: Up-regulated in Transcription
  misc_feature: MA Experiment 108462 PARAMETER Experiment Name: At_Germinating_Seeds_cDNA_P Parameter: Age (day) Value: 2 vs. 0
  misc_feature: MA Experiment 108462 PARAMETER Experiment Name: At_Germinating_Seeds_cDNA_P Parameter: Tissue Value: Germinating Seeds
  misc_feature: MA Experiment ID: 108463 Result: Up-regulated in Transcription
  misc_feature: MA Experiment 108463 PARAMETER Experiment Name: At_Germinating_Seeds_cDNA_P Parameter: Age (day) Value: 3 vs. 0
  misc_feature: MA Experiment 108463 PARAMETER Experiment Name: At_Germinating_Seeds_cDNA_P Parameter: Tissue Value: Germinating Seeds
  misc_feature: MA Experiment ID: 108464 Result: Up-regulated in Transcription
  misc_feature: MA Experiment 108464 PARAMETER Experiment Name: At_Germinating_Seeds_cDNA_P Parameter: Age (day) Value: 4 vs. 0
  misc_feature: MA Experiment 108464 PARAMETER Experiment Name: At_Germinating_Seeds_cDNA_P Parameter: Tissue Value: Germinating Seeds
  misc_feature: MA Experiment ID: 108488 Result: Down-regulated in Transcription
  misc_feature: MA Experiment ID: 108595 Result: Up-regulated in Transcription
  misc_feature: MA Experiment 108595 PARAMETER Experiment Name: At_Ler-pi_Ovule_cDNA_P Parameter: Plant Line Value: null
  misc_feature: MA Experiment ID: 108667 Result: Down-regulated in Transcription
  misc_feature: MA Experiment 108667 PARAMETER Experiment Name: At_2mM_SA_cDNA_P Parameter: Plant Line Value: WS
  misc_feature: MA Experiment 108667 PARAMETER Experiment Name: At_2mM_SA_cDNA_P Parameter: Timepoint (hr) Value: 1
  misc_feature: MA Experiment 108667 PARAMETER Experiment Name: At_2mM_SA_cDNA_P Parameter: Treatment Value: 2mM SA vs. No Treatment
  misc_feature: MA Experiment ID: 20000144 Result: Down-regulated in Transcription
  misc_feature: MA Experiment 20000144 PARAMETER Experiment Name: At_42deg_Heat_cDNA_P Parameter: Temperature (deg C) Value: 42 vs. 22
  misc_feature: MA Experiment 20000144 PARAMETER Experiment Name: At_42deg_Heat_cDNA_P Parameter: Timepoint (hr) Value: 1
  misc_feature: MA Experiment 20000144 PARAMETER Experiment Name: At_42deg_Heat_cDNA_P Parameter: Tissue Value: Aerial
  misc_feature: MA Experiment ID: 20000224 Result: Up-regulated in Transcription
  misc_feature: MA Experiment ID: 20000264 Result: Up-regulated in Transcription
  misc_feature: MA Experiment 20000264 PARAMETER Experiment Name: At_Open_Flower_P Parameter: Age (day) Value: 21
  misc_feature: MA Experiment 20000264 PARAMETER Experiment Name: At_Open_Flower_P Parameter: Plant Line Value: WS
  misc_feature: MA Experiment 20000264 PARAMETER Experiment Name: At_Open_Flower_P Parameter: Tissue Value: Open Flower vs. Whole Plant
  misc_feature: MA Experiment ID: 20000265 Result: Up-regulated in Transcription
  misc_feature: MA Experiment 20000265 PARAMETER Experiment Name: At_Open_Flower_P Parameter: Age (day) Value: 21
  misc_feature: MA Experiment 20000265 PARAMETER Experiment Name: At_Open_Flower_P Parameter: Plant Line Value: WS
  misc_feature: MA Experiment 20000265 PARAMETER Experiment Name: At_Open_Flower_P Parameter: Tissue Value: Closed Flower vs. Whole Plant
  misc_feature: MA Experiment ID: 20000286 Result: Up-regulated in Transcription
  misc_feature: MA Experiment 20000286 PARAMETER Experiment Name: At_Open_Flower_P Parameter: Age (day) Value: 21
  misc_feature: MA Experiment 20000286 PARAMETER Experiment Name: At_Open_Flower_P Parameter: Plant Line Value: WS
  misc_feature: MA Experiment 20000286 PARAMETER Experiment Name: At_Open_Flower_P Parameter: Tissue Value: Half Open vs. Whole Plant
  misc_feature: MA Experiment ID: 20000495 Result: Down-regulated in Transcription
  misc_feature: MA Experiment 20000495 PARAMETER Experiment Name: At_Guard_Cells_P Parameter: Harvest Date Value: 8/2/2002
  misc_feature: MA Experiment 20000495 PARAMETER Experiment Name: At_Guard_Cells_P Parameter: Organism Value: A. thaliana
  misc_feature: MA Experiment 20000495 PARAMETER Experiment Name: At_Guard_Cells_P Parameter: Tissue Value: Guard Cells vs. Leaves
  misc_feature: MA Experiment ID: 20000573 Result: Up-regulated in Transcription
  misc_feature: MA Experiment 20000573 PARAMETER Experiment Name: At_100uM_ABA_Mutants__P Parameter: Organism Value: A. thaliana
  misc_feature: MA Experiment 20000573 PARAMETER Experiment Name: At_100uM_ABA_Mutants__P Parameter: Plant Line Value: CS22 vs. Ler wt
  misc_feature: MA Experiment 20000573 PARAMETER Experiment Name: At_100uM_ABA_Mutants__P Parameter: Timepoint (hr) Value: N/A
  misc_feature: MA Experiment 20000573 PARAMETER Experiment Name: At_100uM_ABA_Mutants__P Parameter: Tissue Value: Whole Plant
  misc_feature: MA Experiment 20000573 PARAMETER Experiment Name: At_100uM_ABA_Mutants__P Parameter: Treatment Value: None
  misc_feature: MA Experiment ID: 20000574 Result: Up-regulated in Transcription
  misc_feature: MA Experiment 20000574 PARAMETER Experiment Name: At_100uM_ABA_Mutants__P Parameter: Organism Value: A. thaliana
  misc_feature: MA Experiment 20000574 PARAMETER Experiment Name: At_100uM_ABA_Mutants__P Parameter: Plant Line Value: CS23 vs. Ler wt
  misc_feature: MA Experiment 20000574 PARAMETER Experiment Name: At_100uM_ABA_Mutants__P Parameter: Timepoint (hr) Value: N/A
  misc_feature: MA Experiment 20000574 PARAMETER Experiment Name: At_100uM_ABA_Mutants__P Parameter: Tissue Value: Whole Plant
  misc_feature: MA Experiment 20000574 PARAMETER Experiment Name: At_100uM_ABA_Mutants__P Parameter: Treatment Value: None
  misc_feature: MA Experiment ID: 20000794 Result: Up-regulated in Transcription
  misc_feature: MA Experiment 20000794 PARAMETER Experiment Name: At_Petals_P Parameter: Age (day) Value: 23-25 days
  misc_feature: MA Experiment 20000794 PARAMETER Experiment Name: At_Petals_P Parameter: Plant Line Value: WS
  misc_feature: MA Experiment 20000794 PARAMETER Experiment Name: At_Petals_P Parameter: Tissue Value: Petals vs. Whole plant
  misc_feature: MA Experiment ID: 20001457 Result: Down-regulated in Transcription
  misc_feature: MA Experiment 20001457 PARAMETER Experiment Name: At_50mM_NH4NO3_L-to-H_P Parameter: Age (day) Value: Undefined
  misc_feature: MA Experiment 20001457 PARAMETER Experiment Name: At_50mM_NH4NO3_L-to-H_P Parameter: Organism Value: Undefined
  misc_feature: MA Experiment 20001457 PARAMETER Experiment Name: At_50mM_NH4NO3_L-to-H_P Parameter: Plant Line Value: Undefined
  misc_feature: MA Experiment 20001457 PARAMETER Experiment Name: At_50mM_NH4NO3_L-to-H_P Parameter: Timepoint (hr) Value: 0.5
  misc_feature: MA Experiment 20001457 PARAMETER Experiment Name: At_50mM_NH4NO3_L-to-H_P Parameter: Tissue Value: Siliques
  misc_feature: MA Experiment 20001457 PARAMETER Experiment Name: At_50mM_NH4NO3_L-to-H_P Parameter: Treatment Value: 50mM NH4NO3 vs. 100mM Manitol
  misc_feature: MA Experiment ID: 20001555 Result: Down-regulated in Transcription
  misc_feature: MA Experiment 20001555 PARAMETER Experiment Name: At_Drought_Soil_Dry_P Parameter: Age (day) Value: 24
  misc_feature: MA Experiment 20001555 PARAMETER Experiment Name: At_Drought_Soil_Dry_P Parameter: Organism Value: A. thaliana
  misc_feature: MA Experiment 20001555 PARAMETER Experiment Name: At_Drought_Soil_Dry_P Parameter: Plant Line Value: WS
  misc_feature: MA Experiment 20001555 PARAMETER Experiment Name: At_Drought_Soil_Dry_P Parameter: Post Timepoint (hr) Value: None
  misc_feature: MA Experiment 20001555 PARAMETER Experiment Name: At_Drought_Soil_Dry_P Parameter: Post-Treatment Value: None
  misc_feature: MA Experiment 20001555 PARAMETER Experiment Name: At_Drought_Soil_Dry_P Parameter: Timepoint (day) Value: 10
  misc_feature: MA Experiment 20001555 PARAMETER Experiment Name: At_Drought_Soil_Dry_P Parameter: Treatment Value: Drought vs. No Drought
  misc_feature: MA Experiment ID: 20001556 Result: Down-regulated in Transcription
  misc_feature: MA Experiment 20001556 PARAMETER Experiment Name: At_Drought_Soil_Dry_P Parameter: Age (day) Value: 26
  misc_feature: MA Experiment 20001556 PARAMETER Experiment Name: At_Drought_Soil_Dry_P Parameter: Organism Value: A. thaliana
  misc_feature: MA Experiment 20001556 PARAMETER Experiment Name: At_Drought_Soil_Dry_P Parameter: Plant Line Value: WS
  misc_feature: MA Experiment 20001556 PARAMETER Experiment Name: At_Drought_Soil_Dry_P Parameter: Post Timepoint (hr) Value: None
  misc_feature: MA Experiment 20001556 PARAMETER Experiment Name: At_Drought_Soil_Dry_P Parameter: Post-Treatment Value: None
  misc_feature: MA Experiment 20001556 PARAMETER Experiment Name: At_Drought_Soil_Dry_P Parameter: Timepoint (day) Value: 12
  misc_feature: MA Experiment 20001556 PARAMETER Experiment Name: At_Drought_Soil_Dry_P Parameter: Treatment Value: Drought vs. No Drought
aacacataacaacaacaaagaaccaaataaaagaaaaaaattctataagtaatctttattttgctaaagaaaacatagaaatctgtttgcaaagaagaagatatgggaaacagtttacggtgttgtttggcttgtgtacttccatgtggagctttagatttgatccgtatcgtacatctcaacggccacgtcgacgagatcactagtccaatgaccgccggcgagattcttcaggcgaatcctaaccatgtcttaagcaaaccttgttctcaaggagttgtgcgtaagatcttgatcttgtctcctgaatctgagcttaagcgtggaagcatctattttcttatcccggatacttctatgccggagaagaagaaaacaaagaagagaaaagagctccgatgccggaaaaagcctcttgaaagcggcaacgatattaatagtgatcatgtgagtactaataaggatcttgatggtcattgtttgacgttgtgtgagaaatatttggaagatgttatgttgtcggagaagatgagttcggccggtaaagagaatcgtcaccgtcggaaacatagccggtcggcgtcagtgtccacgtggcggcctcaccttgatagcatcactgaggatcttaattaaattagtacttcttctttttttcacaccttgttaattatgtctctattttcttaaattcttttttttttttttggatccggaatcggatttttatttaacatgcccggtgagaaaatttcaaatattttatttattatgaagttaaaaccaaaactatgtactgttctcatgtggataagatctatgttaaattg

SEQ ID NO: 71926 - protein, 177 aa, Arabidopsis thaliana; identical to SEQ ID NO: 26731
  peptide (1)..(177): Ceres Seq. ID no. 4905807
  misc_feature (1)..(177): Homolog of NCBI NO: 15227725 NR Description: hypothetical protein; protein id: At2g30230.1
  misc_feature (1)..(177): Homolog of NCBI NO: 18390706 NR Description: expressed protein; protein id: At1g06980.1, by cDNA: 7713. [Arabidopsis thaliana] >gi|25342031|pir||E86204
  misc_feature (1)..(175): Homolog of NCBI NO: 34907910 NR Description: P0439E11.22 [Oryza sativa (japonica
  misc_feature (1)..(175): Homolog of NCBI NO: 34896112 NR Description: P0701D05.10 [Oryza sativa (japonica
  misc_feature (1)..(174): Homolog of NCBI NO: 18396990 NR Description: Expressed protein; protein id: At1g29195.1, by cDNA: 39178., supported by cDNA: gi_15529247, supported by gi_16974400 [Arabidopsis thaliana] >gi|25342033|pir||D86414
  misc_feature (3)..(104): Homolog of NCBI NO: 34909702 NR Description: B1131G08.9 [Oryza sativa (japonica
  misc_feature (25)..(91): Homolog of NCBI NO: 34896398 NR Description: hypothetical protein [Oryza sativa (japonica group)] >gi|27764666|gb|AAO23091.1| hypothetical protein [Oryza
  misc_feature (59)..(175): Homolog of NCBI NO: 34909702 NR Description: B1131G08.9 [Oryza sativa (japonica

SEQ ID NO: 71927 - protein, 141 aa, Arabidopsis thaliana; identical to SEQ ID NO: 26732
  peptide (1)..(141): Ceres Seq. ID no. 4905808
  misc_feature (1)..(141): Homolog of NCBI NO: 15227725 NR Description: hypothetical protein; protein id: At2g30230.1
  misc_feature (1)..(141): Homolog of NCBI NO: 18390706 NR Description: expressed protein; protein id: At1g06980.1, by cDNA: 7713. [Arabidopsis thaliana] >gi|25342031|pir||E86204
  misc_feature (1)..(139): Homolog of NCBI NO: 34907910 NR Description: P0439E11.22 [Oryza sativa (japonica
  misc_feature (1)..(139): Homolog of NCBI NO: 34896112 NR Description: P0701D05.10 [Oryza sativa (japonica
  misc_feature (1)..(138): Homolog of NCBI NO: 18396990 NR Description: Expressed protein; protein id: At1g29195.1, by cDNA: 39178., supported by cDNA: gi_15529247, supported by gi_16974400 [Arabidopsis thaliana] >gi|25342033|pir||D86414
  misc_feature (1)..(68): Homolog of NCBI NO: 34909702 NR Description: B1131G08.9 [Oryza sativa (japonica
  misc_feature (1)..(55): Homolog of NCBI NO: 34896398 NR Description: hypothetical protein [Oryza sativa (japonica group)] >gi|27764666|gb|AAO23091.1| hypothetical protein [Oryza
  misc_feature (23)..(139): Homolog of NCBI NO: 34909702 NR Description: B1131G08.9 [Oryza sativa (japonica

SEQ ID NO: 71928 - protein, 92 aa, Arabidopsis thaliana; identical to SEQ ID NO: 26733
  peptide (1)..(92): Ceres Seq. ID no. 4905809
  misc_feature (1)..(92): Homolog of NCBI NO: 15227725 NR Description: hypothetical protein; protein id: At2g30230.1
  misc_feature (1)..(92): Homolog of NCBI NO: 18390706 NR Description: expressed protein; protein id: At1g06980.1, by cDNA: 7713. [Arabidopsis thaliana] >gi|25342031|pir||E86204
  misc_feature (1)..(90): Homolog of NCBI NO: 34907910 NR Description: P0439E11.22 [Oryza sativa (japonica
  misc_feature (1)..(90): Homolog of NCBI NO: 34896112 NR Description: P0701D05.10 [Oryza sativa (japonica
  misc_feature (1)..(89): Homolog of NCBI NO: 18396990 NR Description: Expressed protein; protein id: At1g29195.1, by cDNA: 39178., supported by cDNA: gi_15529247, supported by gi_16974400 [Arabidopsis thaliana] >gi|25342033|pir||D86414
  misc_feature (1)..(19): Homolog of NCBI NO: 34909702 NR Description: B1131G08.9 [Oryza sativa (japonica
  misc_feature (1)..(90): Homolog of NCBI NO: 34909702 NR Description: B1131G08.9 [Oryza sativa (japonica

SEQ ID NO: 71929 - DNA, 1060 bp, Arabidopsis thaliana
  misc_feature (1)..(1060): Ceres Seq. ID no. 4905826
  misc_feature: MA Experiment ID: 108573 Result: Up-regulated in Transcription
  misc_feature: MA Experiment 108573 PARAMETER Experiment Name: At_Drought_cDNA_P Parameter: Timepoint (hr) Value: 6
  misc_feature: MA Experiment 108573 PARAMETER Experiment Name: At_Drought_cDNA_P Parameter: Tissue Value: Aerial
  misc_feature: MA Experiment 108573 PARAMETER Experiment Name: At_Drought_cDNA_P Parameter: Treatment Value: Drought vs. No Drought
  misc_feature: MA Experiment ID: 108585 Result: Up-regulated in Transcription
  misc_feature: MA Experiment 108585 PARAMETER Experiment Name: At_5mM_NaNP_cDNA_P Parameter: Timepoint (hr) Value: 6
  misc_feature: MA Experiment 108585 PARAMETER Experiment Name: At_5mM_NaNP_cDNA_P Parameter: Tissue Value: Aerial
  misc_feature: MA Experiment 108585 PARAMETER Experiment Name: At_5mM_NaNP_cDNA_P Parameter: Treatment Value: null
  misc_feature: MA Experiment ID: 20001905 Result: Up-regulated in Transcription
  misc_feature: MA Experiment 20001905 PARAMETER Experiment Name: At_Drought_Reproduction_P Parameter: Age (day) Value: 40
  misc_feature: MA Experiment 20001905 PARAMETER Experiment Name: At_Drought_Reproduction_P Parameter: Organism Value: A. thaliana
  misc_feature: MA Experiment 20001905 PARAMETER Experiment Name: At_Drought_Reproduction_P Parameter: Plant Line Value: WS
  misc_feature: MA Experiment 20001905 PARAMETER Experiment Name: At_Drought_Reproduction_P Parameter: Timepoint (day) Value: 10
  misc_feature: MA Experiment 20001905 PARAMETER Experiment Name: At_Drought_Reproduction_P Parameter: Tissue Value: Rosettes
  misc_feature: MA Experiment 20001905 PARAMETER Experiment Name: At_Drought_Reproduction_P Parameter: Treatment Value: Drought vs. No Drought
atgatctgatctgatctcccaaaaagtcccaaatccaaatctacgaatctccgtctcctccgtcgcattttccgaggtagagagagagatcaaaccaaagagacacagagagagtatccaccgatggaatccgcagcaacggctgttgtacctccggcagccgccgccaccaccgccaccgccaccgatgataatctccaatcaagcgactcatcatctcccgccgacgccgttaaccgattgatccacgccttttcgcagcgacaacaacatcttctcgacaaaacggttcctcacgttctctatcgatggatcgcatgtctctgtgttgtattgatctacatcgttcgtgtttactttgtggaaggcttctacatcatcacttacgccatcggcatctaccttttgaatctcatcattgcttttctatctcctcaagaagatcccgaagcttctctcacttccggtggttctcttcctactcggagatccgatgagtatcgtcctttcgttcgccgtctccctgagttcaaattctggttatcgatcataagggctttcatcatcggatttatgatgacgttcttcgaggtgtttgatgtacctgtattctggccaatacttctcttctactgggtgatgttgtttttccttacgatgaggaaacagatacagcatatgatcaaatacagatatgtccctttctcttttgggaaaaagcagtatggaaagaaaccggctccaacagagagcagtgaatgatcaatcaaaactgttcaggtcagcaattttacagtcttttgagagaagtagcatttgaaaaggtcggtcttttgttctcttttgatggcctatatctttgttagggatgaagtagagatagacatattttgctcttttatcatcctgactattttactggtttcacctgaactcaatgtacaatcttatttttttacatccttttttcagtgagaaaataatgtttcatacttgacccttttgtaatcatcatggtggaaaactaaagactaatcagtaatcactgtccggttctatc

SEQ ID NO: 71930 - protein, 212 aa, Arabidopsis thaliana; identical to SEQ ID NO: 35807
  peptide (1)..(212): Ceres Seq. ID no. 4905827
  misc_feature (23)..(204): Pfam Name: Rer1 family Pfam Description: Rer1 family
  misc_feature (1)..(212): Homolog of NCBI NO: 18400234 NR Description: putative integral membrane protein; protein id: supported by cDNA: 25204., supported by cDNA: gi_17978977, by cDNA: gi_20453334, supported by cDNA: gi_4163829 [Arabidopsis
  misc_feature (1)..(212): Homolog of NCBI NO: 30682033 NR Description: integral membrane protein -related [Arabidopsis
  misc_feature (1)..(199): Homolog of NCBI NO: 7488292 NR Description: probable integral membrane protein At2g23310
  misc_feature (1)..(140): Homolog of NCBI NO: 27817215 NR Description: putative endoplasmic reticulum retrieval protein
  misc_feature (29)..(202): Homolog of NCBI NO: 15234975 NR Description: AtRer1A; protein id: At4g39220.1, supported by [Arabidopsis thaliana] >gi|6225938|sp|O48670|RERA_ARATH RER1A
  misc_feature (29)..(204): Homolog of NCBI NO: 11281669 NR Description: endoplasmatic reticulum retrieval protein Rer1B
  misc_feature (3)..(144): Homolog of NCBI NO: 35210534 NR Description: putative endoplasmatic reticulum retrieval
  misc_feature (141)..(199): Homolog of NCBI NO: 35210534 NR Description: putative endoplasmatic reticulum retrieval
  misc_feature (29)..(204): Homolog of NCBI NO: 15226596 NR Description: AtRer1B; protein id: At2g21600.1, supported by [Arabidopsis thaliana] >gi|21431803|sp|O48671|RERB_ARATH RER1B
  misc_feature (4)..(200): Homolog of NCBI NO: 34894094 NR Description: putative Rer1A protein (AtRer1A) [Oryza sativa

SEQ ID NO: 71931 - DNA, 1652 bp, Arabidopsis thaliana
  misc_feature (1)..(1652): Ceres Seq. ID no. 4905980
  misc_feature: MA Experiment ID: 108435 Result: Down-regulated in Transcription
  misc_feature: MA Experiment 108435 PARAMETER Experiment Name: At_stm_Mutants_cDNA_P Parameter: Plant Line Value: wt Landsburg vs stm
  misc_feature: MA Experiment 108435 PARAMETER Experiment Name: At_stm_Mutants_cDNA_P Parameter: Tissue Value: Shoot Apical Meristem Region
  misc_feature: MA Experiment ID: 108461 Result: Down-regulated in Transcription
  misc_feature: MA Experiment 108461 PARAMETER Experiment Name: At_Germinating_Seeds_cDNA_P Parameter: Age (day) Value: 1 vs. 0
  misc_feature: MA Experiment 108461 PARAMETER Experiment Name: At_Germinating_Seeds_cDNA_P Parameter: Tissue Value: Germinating Seeds
  misc_feature: MA Experiment ID: 108462 Result: Down-regulated in Transcription
  misc_feature: MA Experiment 108462 PARAMETER Experiment Name: At_Germinating_Seeds_cDNA_P Parameter: Age (day) Value: 2 vs. 0
  misc_feature: MA Experiment 108462 PARAMETER Experiment Name: At_Germinating_Seeds_cDNA_P Parameter: Tissue Value: Germinating Seeds
  misc_feature: MA Experiment ID: 108464 Result: Down-regulated in Transcription
  misc_feature: MA Experiment 108464 PARAMETER Experiment Name: At_Germinating_Seeds_cDNA_P Parameter: Age (day) Value: 4 vs. 0
  misc_feature: MA Experiment 108464 PARAMETER Experiment Name: At_Germinating_Seeds_cDNA_P Parameter: Tissue Value: Germinating Seeds
  misc_feature: MA Experiment ID: 108569 Result: Up-regulated in Transcription
  misc_feature: MA Experiment 108569 PARAMETER Experiment Name: At_0.001%_MeJA__cDNA_P Parameter: Timepoint (hr) Value: 6
  misc_feature: MA Experiment 108569 PARAMETER Experiment Name: At_0.001%_MeJA__cDNA_P Parameter: Tissue Value: Aerial
  misc_feature: MA Experiment 108569 PARAMETER Experiment Name: At_0.001%_MeJA__cDNA_P Parameter: Treatment Value: 0.001% MeJA vs. No Treatment
  misc_feature: MA Experiment ID: 108573 Result: Up-regulated in Transcription
  misc_feature: MA Experiment 108573 PARAMETER Experiment Name: At_Drought_cDNA_P Parameter: Timepoint (hr) Value: 6
  misc_feature: MA Experiment 108573 PARAMETER Experiment Name: At_Drought_cDNA_P Parameter: Tissue Value: Aerial
  misc_feature: MA Experiment 108573 PARAMETER Experiment Name: At_Drought_cDNA_P Parameter: Treatment Value: Drought vs. No Drought
  misc_feature: MA Experiment ID: 108574 Result: Up-regulated in Transcription
  misc_feature: MA Experiment 108574 PARAMETER Experiment Name: At_Wounding__cDNA_P Parameter: Timepoint (hr) Value: 1
  misc_feature: MA Experiment 108574 PARAMETER Experiment Name: At_Wounding__cDNA_P Parameter: Tissue Value: Aerial
  misc_feature: MA Experiment 108574 PARAMETER Experiment Name: At_Wounding__cDNA_P Parameter: Treatment Value: Wounding vs. No Wounding
  misc_feature: MA Experiment ID: 108577 Result: Down-regulated in Transcription
  misc_feature: MA Experiment 108577 PARAMETER Experiment Name: At_42deg_Heat_cDNA_P Parameter: Temperature (deg C) Value: 42 vs. 22
  misc_feature: MA Experiment 108577 PARAMETER Experiment Name: At_42deg_Heat_cDNA_P Parameter: Timepoint (hr) Value: 6
  misc_feature: MA Experiment 108577 PARAMETER Experiment Name: At_42deg_Heat_cDNA_P Parameter: Tissue Value: Aerial
  misc_feature: MA Experiment ID: 108579 Result: Up-regulated in Transcription
  misc_feature: MA Experiment 108579 PARAMETER Experiment Name: At_4deg_Cold_cDNA_P Parameter: Temperature (deg C) Value: 4 vs. 22
  misc_feature: MA Experiment 108579 PARAMETER Experiment Name: At_4deg_Cold_cDNA_P Parameter: Timepoint (hr) Value: 6
  misc_feature: MA Experiment 108579 PARAMETER Experiment Name: At_4deg_Cold_cDNA_P Parameter: Tissue Value: Aerial
  misc_feature: MA Experiment ID: 108585 Result: Up-regulated in Transcription
  misc_feature: MA Experiment 108585 PARAMETER Experiment Name: At_5mM_NaNP_cDNA_P Parameter: Timepoint (hr) Value: 6
  misc_feature: MA Experiment 108585 PARAMETER Experiment Name: At_5mM_NaNP_cDNA_P Parameter: Tissue Value: Aerial
  misc_feature: MA Experiment 108585 PARAMETER Experiment Name: At_5mM_NaNP_cDNA_P Parameter: Treatment Value: null
  misc_feature: MA Experiment ID: 108594 Result: Down-regulated in Transcription
  misc_feature: MA Experiment 108594 PARAMETER Experiment Name: At_Ler-rhl_Root_cDNA_P Parameter: Plant Line Value: null
  misc_feature: MA Experiment ID: 108595 Result: Up-regulated in Transcription
  misc_feature: MA Experiment 108595 PARAMETER Experiment Name: At_Ler-pi_Ovule_cDNA_P Parameter: Plant Line Value: null
  misc_feature: MA Experiment ID: 108608 Result: Up-regulated in Transcription
  misc_feature: MA Experiment 108608 PARAMETER Experiment Name: At_100uM_ABA_cDNA_P Parameter: Timepoint (hr) Value: 1
  misc_feature: MA Experiment 108608 PARAMETER Experiment Name: At_100uM_ABA_cDNA_P Parameter: Tissue Value: Aerial
  misc_feature: MA Experiment 108608 PARAMETER Experiment Name: At_100uM_ABA_cDNA_P Parameter: Treatment Value: 100uM ABA vs. No Treatment
  misc_feature: MA Experiment ID: 20000030 Result: Down-regulated in Transcription
  misc_feature: MA Experiment 20000030 PARAMETER Experiment Name: At_CS6630_Roots_cDNA_P Parameter: Plant Line Value: CS6630 vs. WS
  misc_feature: MA Experiment 20000030 PARAMETER Experiment Name: At_CS6630_Roots_cDNA_P Parameter: Tissue Value: Roots
  misc_feature: MA Experiment ID: 20000069 Result: Up-regulated in Transcription
  misc_feature: MA Experiment 20000069 PARAMETER Experiment Name: At_100uM_ABA_Mutants_cDNA_P Parameter: Plant Line Value: CS23
  misc_feature: MA Experiment 20000069 PARAMETER Experiment Name: At_100uM_ABA_Mutants_cDNA_P Parameter: Timepoint (hr) Value: 6
  misc_feature: MA Experiment 20000069 PARAMETER Experiment Name: At_100uM_ABA_Mutants_cDNA_P Parameter: Tissue Value: Aerial
  misc_feature: MA Experiment 20000069 PARAMETER Experiment Name: At_100uM_ABA_Mutants_cDNA_P Parameter: Treatment Value: 100uM ABA vs. No Treatment
  misc_feature: MA Experiment ID: 20000070 Result: Up-regulated in Transcription
  misc_feature: MA Experiment 20000070 PARAMETER Experiment Name: At_100uM_ABA_Mutants_cDNA_P Parameter: Plant Line Value: CS24
  misc_feature: MA Experiment 20000070 PARAMETER Experiment Name: At_100uM_ABA_Mutants_cDNA_P Parameter: Timepoint (hr) Value: 6
  misc_feature: MA Experiment 20000070 PARAMETER Experiment Name: At_100uM_ABA_Mutants_cDNA_P Parameter: Tissue Value: Aerial
  misc_feature: MA Experiment 20000070 PARAMETER Experiment Name: At_100uM_ABA_Mutants_cDNA_P Parameter: Treatment Value: 100uM ABA vs. No Treatment
  misc_feature: MA Experiment ID: 20000071 Result: Up-regulated in Transcription
  misc_feature: MA Experiment 20000071 PARAMETER Experiment Name: At_100uM_ABA_Mutants_cDNA_P Parameter: Plant Line Value: CS8104
  misc_feature: MA Experiment 20000071 PARAMETER Experiment Name: At_100uM_ABA_Mutants_cDNA_P Parameter: Timepoint (hr) Value: 6
  misc_feature: MA Experiment 20000071 PARAMETER Experiment Name: At_100uM_ABA_Mutants_cDNA_P Parameter: Tissue Value: Aerial
  misc_feature: MA Experiment 20000071 PARAMETER Experiment Name: At_100uM_ABA_Mutants_cDNA_P Parameter: Treatment Value: 100uM ABA vs. No Treatment
  misc_feature: MA Experiment ID: 20000086 Result: Up-regulated in Transcription
  misc_feature: MA Experiment 20000086 PARAMETER Experiment Name: At_100uM_ABA_Mutants_cDNA_P Parameter: Plant Line Value: CS22
  misc_feature: MA Experiment 20000086 PARAMETER Experiment Name: At_100uM_ABA_Mutants_cDNA_P Parameter: Timepoint (hr) Value: 6
  misc_feature: MA Experiment 20000086 PARAMETER Experiment Name: At_100uM_ABA_Mutants_cDNA_P Parameter: Tissue Value: Aerial
  misc_feature: MA Experiment 20000086 PARAMETER Experiment Name: At_100uM_ABA_Mutants_cDNA_P Parameter: Treatment Value: 100uM ABA vs. No Treatment
  misc_feature: MA Experiment ID: 20000088 Result: Up-regulated in Transcription
  misc_feature: MA Experiment 20000088 PARAMETER Experiment Name: At_100uM_ABA_Mutants_cDNA_P Parameter: Plant Line Value: Landsberg
  misc_feature: MA Experiment 20000088 PARAMETER Experiment Name: At_100uM_ABA_Mutants_cDNA_P Parameter: Timepoint (hr) Value: 6
  misc_feature: MA Experiment 20000088 PARAMETER Experiment Name: At_100uM_ABA_Mutants_cDNA_P Parameter: Tissue Value: Aerial
  misc_feature: MA Experiment 20000088 PARAMETER Experiment Name: At_100uM_ABA_Mutants_cDNA_P Parameter: Treatment Value: 100uM ABA vs. No Treatment
  misc_feature: MA Experiment ID: 20000089 Result: Up-regulated in Transcription
  misc_feature: MA Experiment ID: 20000090 Result: Up-regulated in Transcription
  misc_feature: MA Experiment ID: 20000112 Result: Down-regulated in Transcription
  misc_feature: MA Experiment 20000112 PARAMETER Experiment Name: At_42deg_Heat_cDNA_P Parameter: Temperature (deg C) Value: 42 vs. 22
  misc_feature: MA Experiment 20000112 PARAMETER Experiment Name: At_42deg_Heat_cDNA_P Parameter: Timepoint (hr) Value: 2
  misc_feature: MA Experiment 20000112 PARAMETER Experiment Name: At_42deg_Heat_cDNA_P Parameter: Tissue Value: Aerial
  misc_feature: MA Experiment ID: 20000117 Result: Up-regulated in Transcription
  misc_feature: MA Experiment 20000117 PARAMETER Experiment Name: At_100uM_ABA_Mutants_cDNA_P Parameter: Plant Line Value: Columbia
  misc_feature: MA Experiment 20000117 PARAMETER Experiment Name: At_100uM_ABA_Mutants_cDNA_P Parameter: Timepoint (hr) Value: 6
  misc_feature: MA Experiment 20000117 PARAMETER Experiment Name: At_100uM_ABA_Mutants_cDNA_P Parameter: Tissue Value: Aerial
  misc_feature: MA Experiment 20000117 PARAMETER Experiment Name: At_100uM_ABA_Mutants_cDNA_P Parameter: Treatment Value: 100uM ABA vs. No Treatment
  misc_feature: MA Experiment ID: 20000144 Result: Down-regulated in Transcription
  misc_feature: MA Experiment 20000144 PARAMETER Experiment Name: At_42deg_Heat_cDNA_P Parameter: Temperature (deg C) Value: 42 vs. 22
  misc_feature: MA Experiment 20000144 PARAMETER Experiment Name: At_42deg_Heat_cDNA_P Parameter: Timepoint (hr) Value: 1
  misc_feature: MA Experiment 20000144 PARAMETER Experiment Name: At_42deg_Heat_cDNA_P Parameter: Tissue Value: Aerial
  misc_feature: MA Experiment ID: 20000166 Result: Up-regulated in Transcription
  misc_feature: MA Experiment 20000166 PARAMETER Experiment Name: At_100uM_ABA_P Parameter: Age (day) Value: 14
  misc_feature: MA Experiment 20000166 PARAMETER Experiment Name: At_100uM_ABA_P Parameter: Organism Value: A. thaliana
  misc_feature: MA Experiment 20000166 PARAMETER Experiment Name: At_100uM_ABA_P Parameter: Plant Line Value: WS
  misc_feature: MA Experiment 20000166 PARAMETER Experiment Name: At_100uM_ABA_P Parameter: Timepoint (hr) Value: 1
  misc_feature: MA Experiment 20000166 PARAMETER Experiment Name: At_100uM_ABA_P Parameter: Tissue Value: Aerial
  misc_feature: MA Experiment 20000166 PARAMETER Experiment Name: At_100uM_ABA_P Parameter: Treatment Value: 100uM ABA vs. No Treatment
  misc_feature: MA Experiment ID: 20000171 Result: Down-regulated in Transcription
  misc_feature: MA Experiment 20000171 PARAMETER Experiment Name: At_42deg_Heat_P Parameter: Age (day) Value: 14
  misc_feature: MA Experiment 20000171 PARAMETER Experiment Name: At_42deg_Heat_P Parameter: Organism Value: A. thaliana
  misc_feature: MA Experiment 20000171 PARAMETER Experiment Name: At_42deg_Heat_P Parameter: Plant Line Value: WS
  misc_feature: MA Experiment 20000171 PARAMETER Experiment Name: At_42deg_Heat_P Parameter: Temperature (deg C) Value: 42 vs. 22
  misc_feature: MA Experiment 20000171 PARAMETER Experiment Name: At_42deg_Heat_P Parameter: Timepoint (hr) Value: 1
  misc_feature: MA Experiment 20000171 PARAMETER Experiment Name: At_42deg_Heat_P Parameter: Tissue Value: Aerial
  misc_feature: MA Experiment ID: 20000173 Result: Down-regulated in Transcription
  misc_feature: MA Experiment 20000173 PARAMETER Experiment Name: At_42deg_Heat_P Parameter: Age (day) Value: 14
  misc_feature: MA Experiment 20000173 PARAMETER Experiment Name: At_42deg_Heat_P Parameter: Organism Value: A. thaliana
  misc_feature: MA Experiment 20000173 PARAMETER Experiment Name: At_42deg_Heat_P Parameter: Plant Line Value: WS
  misc_feature: MA Experiment 20000173 PARAMETER Experiment Name: At_42deg_Heat_P Parameter: Temperature (deg C) Value: 42 vs. 22
  misc_feature: MA Experiment 20000173 PARAMETER Experiment Name: At_42deg_Heat_P Parameter: Timepoint (hr) Value: 6
  misc_feature: MA Experiment 20000173 PARAMETER Experiment Name: At_42deg_Heat_P Parameter: Tissue Value: Aerial
  misc_feature: MA Experiment ID: 20000180 Result: Down-regulated in Transcription
  misc_feature: MA Experiment 20000180 PARAMETER Experiment Name: At_Germinating_Seeds_P Parameter: Age (hr) Value: 24 vs. 0
  misc_feature: MA Experiment 20000180 PARAMETER Experiment Name: At_Germinating_Seeds_P Parameter: Tissue Value: Germinating Seeds
  misc_feature: MA Experiment ID: 20000184 Result: Down-regulated in Transcription
  misc_feature: MA Experiment 20000184 PARAMETER Experiment Name: At_Shoots__P Parameter: Age (day) Value: 7
  misc_feature: MA Experiment 20000184 PARAMETER Experiment Name: At_Shoots__P Parameter: Tissue Value: Shoots vs. Whole Plant
  misc_feature: MA Experiment ID: 20000185 Result: Down-regulated in Transcription
  misc_feature: MA Experiment 20000185 PARAMETER Experiment Name: At_Roots__P Parameter: Age (day) Value: 7 vs. 21
  misc_feature: MA Experiment 20000185 PARAMETER Experiment Name: At_Roots__P Parameter: Organism Value: A. thaliana
  misc_feature: MA Experiment 20000185 PARAMETER Experiment Name: At_Roots__P Parameter: Tissue Value: Roots vs. Whole Plant
  misc_feature: MA Experiment ID: 20000213 Result: Up-regulated in Transcription
  misc_feature: MA Experiment 20000213 PARAMETER Experiment Name: At_4deg_Cold_P Parameter: Timepoint (hr) Value: 2
  misc_feature: MA Experiment ID: 20000234 Result: Down-regulated in Transcription
  misc_feature: MA Experiment 20000234 PARAMETER Experiment Name: At_Siliques_P Parameter: Age (day) Value: 21
  misc_feature: MA Experiment 20000234 PARAMETER Experiment Name: At_Siliques_P Parameter: Organism Value: A. thaliana
  misc_feature: MA Experiment 20000234 PARAMETER Experiment Name: At_Siliques_P Parameter: Plant Line Value: WS
  misc_feature: MA Experiment 20000234 PARAMETER Experiment Name: At_Siliques_P Parameter: Tissue Value: Less Than 5mm Siliques vs. Whole Plant
  misc_feature: MA Experiment ID: 20000308 Result: Up-regulated in Transcription
  misc_feature: MA Experiment 20000308 PARAMETER Experiment Name: At_100mM_NaCl__P Parameter: Age (day) Value: 17
  misc_feature: MA Experiment 20000308 PARAMETER Experiment Name: At_100mM_NaCl__P Parameter: Organism Value: A. thaliana
  misc_feature: MA Experiment 20000308 PARAMETER Experiment Name: At_100mM_NaCl__P Parameter: Plant Line Value: WS
  misc_feature: MA Experiment 20000308 PARAMETER Experiment Name: At_100mM_NaCl__P Parameter: Timepoint (hr) Value: 72
  misc_feature: MA Experiment 20000308 PARAMETER Experiment Name: At_100mM_NaCl__P Parameter: Tissue Value: Whole Plant
  misc_feature: MA Experiment 20000308 PARAMETER Experiment Name: At_100mM_NaCl__P Parameter: Treatment Value: 100mM NaCl vs. No Treatment
  misc_feature: MA Experiment ID: 20000437 Result: Up-regulated in Transcription
  misc_feature: MA Experiment 20000437 PARAMETER Experiment Name: At_Drought_P Parameter: Age (day) Value: 8
  misc_feature: MA Experiment 20000437 PARAMETER Experiment Name: At_Drought_P Parameter: Organism Value: A. thaliana
  misc_feature: MA Experiment 20000437 PARAMETER Experiment Name: At_Drought_P Parameter: Plant Line Value: WS
  misc_feature: MA Experiment 20000437 PARAMETER Experiment Name: At_Drought_P Parameter: Timepoint (hr) Value: 24
  misc_feature: MA Experiment 20000437 PARAMETER Experiment Name: At_Drought_P Parameter: Tissue Value: Whole Plant
  misc_feature: MA Experiment 20000437 PARAMETER Experiment Name: At_Drought_P Parameter: Treatment Value: Drought vs. No Drought
  misc_feature: MA Experiment ID: 20000438 Result: Down-regulated in Transcription
  misc_feature: MA Experiment 20000438 PARAMETER Experiment Name: At_Shoots__P Parameter: Age (day) Value: 14
  misc_feature: MA Experiment 20000438 PARAMETER Experiment Name: At_Shoots__P Parameter: Tissue Value: Shoots vs. Whole Plant
  misc_feature: MA Experiment ID: 20000439 Result: Down-regulated in Transcription
  misc_feature: MA Experiment 20000439 PARAMETER Experiment Name: At_Roots__P Parameter: Age (day) Value: 14 vs. 21
  misc_feature: MA Experiment 20000439 PARAMETER Experiment Name: At_Roots__P Parameter: Organism Value: A. thaliana
  misc_feature: MA Experiment 20000439 PARAMETER Experiment Name: At_Roots__P Parameter: Tissue Value: Roots vs. Whole Plant
  misc_feature: MA Experiment ID: 20000495 Result: Down-regulated in Transcription
  misc_feature: MA Experiment 20000495 PARAMETER Experiment Name: At_Guard_Cells_P Parameter: Harvest Date Value: 8/2/2002
  misc_feature: MA Experiment 20000495 PARAMETER Experiment Name: At_Guard_Cells_P Parameter: Organism Value: A. thaliana
  misc_feature: MA Experiment 20000495 PARAMETER Experiment Name: At_Guard_Cells_P Parameter: Tissue Value: Guard Cells vs. Leaves
  misc_feature: MA Experiment ID: 20000574 Result: Up-regulated in Transcription
  misc_feature: MA Experiment 20000574 PARAMETER Experiment Name: At_100uM_ABA_Mutants__P Parameter: Organism Value: A. thaliana
  misc_feature: MA Experiment 20000574 PARAMETER Experiment Name: At_100uM_ABA_Mutants__P Parameter: Plant Line Value: CS23 vs. Ler wt
  misc_feature: MA Experiment 20000574 PARAMETER Experiment Name: At_100uM_ABA_Mutants__P Parameter: Timepoint (hr) Value: N/A
  misc_feature: MA Experiment 20000574 PARAMETER Experiment Name: At_100uM_ABA_Mutants__P Parameter: Tissue Value: Whole Plant
  misc_feature: MA Experiment 20000574 PARAMETER Experiment Name: At_100uM_ABA_Mutants__P Parameter: Treatment Value: None
  misc_feature: MA Experiment ID: 20000794 Result: Up-regulated in Transcription
  misc_feature: MA Experiment 20000794 PARAMETER Experiment Name: At_Petals_P Parameter: Age (day) Value: 23-25 days
  misc_feature: MA Experiment 20000794 PARAMETER Experiment Name: At_Petals_P Parameter: Plant Line Value: WS
  misc_feature: MA Experiment 20000794 PARAMETER Experiment Name: At_Petals_P Parameter: Tissue Value: Petals vs. Whole plant
  misc_feature: MA Experiment ID: 20001451 Result: Down-regulated in Transcription
  misc_feature: MA Experiment 20001451 PARAMETER Experiment Name: At_Far-red-induction_P Parameter: Age (day) Value: 7
  misc_feature: MA Experiment 20001451 PARAMETER Experiment Name: At_Far-red-induction_P Parameter: Light Value: Far-red vs. White
  misc_feature: MA Experiment 20001451 PARAMETER Experiment Name: At_Far-red-induction_P Parameter: Organism Value: A. thaliana
  misc_feature: MA Experiment 20001451 PARAMETER Experiment Name: At_Far-red-induction_P Parameter: Plant Line Value: Columbia
  misc_feature: MA Experiment 20001451 PARAMETER Experiment Name: At_Far-red-induction_P Parameter: Timepoint (hr) Value: 24
  misc_feature: MA Experiment 20001451 PARAMETER Experiment Name: At_Far-red-induction_P Parameter: Tissue Value: Whole Plant
  misc_feature: MA Experiment ID: 20001557 Result: Up-regulated in Transcription
  misc_feature: MA Experiment 20001557 PARAMETER Experiment Name: At_Drought_Soil_Dry_P Parameter: Age (day) Value: 27
  misc_feature: MA Experiment 20001557 PARAMETER Experiment Name: At_Drought_Soil_Dry_P Parameter: Organism Value: A. thaliana
  misc_feature: MA Experiment 20001557 PARAMETER Experiment Name: At_Drought_Soil_Dry_P Parameter: Plant Line Value: WS
  misc_feature: MA Experiment 20001557 PARAMETER Experiment Name: At_Drought_Soil_Dry_P Parameter: Post Timepoint (hr) Value: 3
  misc_feature: MA Experiment 20001557 PARAMETER Experiment Name: At_Drought_Soil_Dry_P Parameter: Post-Treatment Value: Re-Water vs. No Drought
  misc_feature: MA Experiment 20001557 PARAMETER Experiment Name: At_Drought_Soil_Dry_P Parameter: Timepoint (day) Value: 13
  misc_feature: MA Experiment 20001557 PARAMETER Experiment Name: At_Drought_Soil_Dry_P Parameter: Treatment Value: Drought vs. No Drought
  misc_feature: MA Experiment ID: 20001906 Result: Up-regulated in Transcription
  misc_feature: MA Experiment 20001906 PARAMETER Experiment Name: At_Drought_Reproduction_P Parameter: Age (day) Value: 35
  misc_feature: MA Experiment 20001906 PARAMETER Experiment Name: At_Drought_Reproduction_P Parameter: Organism Value: A. thaliana
  misc_feature: MA Experiment 20001906 PARAMETER Experiment Name: At_Drought_Reproduction_P Parameter: Plant Line Value: WS
  misc_feature: MA Experiment 20001906 PARAMETER Experiment Name: At_Drought_Reproduction_P Parameter: Timepoint (day) Value: 5
  misc_feature: MA Experiment 20001906 PARAMETER Experiment Name: At_Drought_Reproduction_P Parameter: Tissue Value: Siliques
  misc_feature: MA Experiment 20001906 PARAMETER Experiment Name: At_Drought_Reproduction_P Parameter: Treatment Value: Drought vs. No Drought
attatagaatatctaataatgaagaatcggtttcaaaattaataatgactgattataattacattgacaacatgcagggactaataacaattacactcacagcatcgtttcctcaactccacccagcatcatgcaacagccaggacccactcagttgcggcggtccgaataagctccagatcggagttttgctattgggactctgtttcctctccgtagggagtggaggaatacgaccttgtagcatcccttttggggttgatcagtttgaccaacgaactgaggaaggggttaaaggagtggccagtttcttcaactggtattacatgactttcactgtggttctgatcattacacagaccgtagttgtgtatatccaggatcaagtcagttggattatcggttttagtatccctaccggactcatggctcttgcggttgttatgttttttgccggaatgaagcgttatgtctacgttaaaccagaaggaagtatattctctgggatcgctcaagttatcgtggcagctcgtaagaagcgaaagctgaaacttccggcggaagatgacggcactgtcacctattacgacccagccatcaagtctagcgtgttatccaagttacaccgcagtaaccaattcaggtgtcttgacaaagccgcggtggttatagaaggtgacctaacacccgagggacctcccgcagacaagtggcggttatgcagcgtccaagaagtggaagaagtgaagtgtttgatccgaattgttcctatctggtcggccggaataatctcactcgcggccatgacaacacaaggcactttcacggtctctcaagctttgaaaatggatcgaaacttaggtcctaaattcgagattccggctggttcactctccgtcatctctctcctcacaatcggcatctttcttcccttctacgaccgcgtttttgtaccattcatgcggcgaatcaccggccataaatccggaatcacactcctccaaaggataggaacagggatcgttttcgcgatcttttctatgatcgttgcgggcattgtggagcgtatgagacgcatacgctccatcaatgccggagatccaacgggaatgactccaatgtcggtgttttggctttcgccgcagctaattctcatgggactatgtgaagcattcaatatcatcggacaaattgagttcttcaacagtcagtttccagagcacatgagaagtatcgctaactctctcttctctttatcgttcgccggttcgagctaccttagtagtttccttgtgactgtcgttcataaattctccggtgggcatgatcgtccggattggctaaacaagaatctcaacgcgggaaaattggattacttctattatctgattgcggttttgggtgtggttaatctggtttacttttggtattgtgctcggggataccggtacaaggtcggtttaccgattgaagactttgaggaggacaagtcctccgatgatgttgagatgacttcgaagaaatcgatgaaatgatttaatagactatccttagggacaacaagaagattgtcgatgttgtttgaataattactatgacaatgtatgtatcataatatgtaagaactagaatatttaataaaattttacctt

SEQ ID NO: 71932 - protein, 510 aa, Arabidopsis thaliana
  peptide (1)..(510): Ceres Seq. ID no. 4905981
  misc_feature (27)..(420): Pfam Name: POT family Pfam Description: POT family
  misc_feature (21)..(510): Homolog of NCBI NO: 25404847 NR Description: probable peptide transporter T17F3.10 [imported] Arabidopsis thaliana >gi|12325237|gb|AAG52567.1|AC010675_15
  misc_feature (26)..(510): Homolog of NCBI NO: 18409391 NR Description: putative peptide transporter; protein id: supported by cDNA: 22243., supported by cDNA: gi_19699103 thaliana] >gi|19699104|gb|AAL90918.1| At1g69870/T17F3_10
  misc_feature (18)..(502): Homolog of NCBI NO: 15223425 NR Description: peptide transporter, putative; protein id:
  misc_feature (18)..(502): Homolog of NCBI NO: 25403285 NR Description: protein T7N9.14 [imported] - Arabidopsis thaliana
  misc_feature (18)..(485): Homolog of NCBI NO: 34906908 NR Description: putative peptide transporter [Oryza sativa
  misc_feature (26)..(484): Homolog of NCBI NO: 15241927 NR Description: peptide transporter; protein id: At5g62680.1 thaliana] >gi|8809664|dbj|BAA97215.1| peptide transporter
  misc_feature (26)..(500): Homolog of NCBI NO: 7488141 NR Description: probable peptide transport protein T17F15.170 - thaliana >gi|4678332|emb|CAB41143.1| putative peptide transporter
  misc_feature (26)..(500): Homolog of NCBI NO: 16226701 NR Description: AT3g47960/T17F15_170 [Arabidopsis thaliana]
  misc_feature (26)..(500): Homolog of NCBI NO: 18408546 NR Description: putative peptide transporter; protein id: supported by cDNA: gi_13877878, supported by cDNA: gi_16226700 thaliana] >gi|13877879|gb|AAK44017.1|AF370202_1 putative peptide
  misc_feature (26)..(505): Homolog of NCBI NO: 15221883 NR Description: peptide transporter, putative; protein id: supported by cDNA: gi_17979086 [Arabidopsis thaliana]
YRISNNEESVSKLIMTDYNYIDNMQGLITITLTASFPQLHPASCNSQDPLSCGGPNKLQIGVLLLGLCFLSVGSGGIRPCSIPFGVDQFDQRTEEGVKGVASFFNWYYMTFTVVLIITQTVVVYIQDQVSWIIGFSIPTGLMALAVVMFFAGMKRYVYVKPEGSIFSGIAQVIVAARKKRKLKLPAEDDGTVTYYDPAIKSSVLSKLHRSNQFRCLDKAAVVIEGDLTPEGPPADKWRLCSVQEVEEVKCLIRIVPIWSAGIISLAAMTTQGTFTVSQALKMDRNLGPKFEIPAGSLSVISLLTIGIFLPFYDRVFVPFMRRITGHKSGITLLQRIGTGIVFAIFSMIVAGIVERMRRIRSINAGDPTGMTPMSVFWLSPQLILMGLCEAFNIIGQIEFFNSQFPEHMRSIANSLFSLSFAGSSYLSSFLVTVVHKFSGGHDRPDWLNKNLNAGKLDYFYYLIAVLGVVNLVYFWYCARGYRYKVGLPIEDFEEDKSSDDVEMTSKKSMK

SEQ ID NO: 71933 - protein, 496 aa, Arabidopsis thaliana
  peptide (1)..(496): Ceres Seq. ID no. 4905982
  misc_feature (13)..(406): Pfam Name: POT family Pfam Description: POT family
  misc_feature (7)..(496): Homolog of NCBI NO: 25404847 NR Description: probable peptide transporter T17F3.10 [imported] Arabidopsis thaliana >gi|12325237|gb|AAG52567.1|AC010675_15
  misc_feature (12)..(496): Homolog of NCBI NO: 18409391 NR Description: putative peptide transporter; protein id: supported by cDNA: 22243., supported by cDNA: gi_19699103 thaliana] >gi|19699104|gb|AAL90918.1| At1g69870/T17F3_10
  misc_feature (4)..(488): Homolog of NCBI NO: 15223425 NR Description: peptide transporter, putative; protein id:
  misc_feature (4)..(488): Homolog of NCBI NO: 25403285 NR Description: protein T7N9.14 [imported] - Arabidopsis thaliana
  misc_feature (4)..(471): Homolog of NCBI NO: 34906908 NR Description: putative peptide transporter [Oryza sativa
  misc_feature (12)..(470): Homolog of NCBI NO: 15241927 NR Description: peptide transporter; protein id: At5g62680.1 thaliana] >gi|8809664|dbj|BAA97215.1| peptide transporter
  misc_feature (12)..(486): Homolog of NCBI NO: 7488141 NR Description: probable peptide transport protein T17F15.170 - thaliana >gi|4678332|emb|CAB41143.1| putative peptide transporter
  misc_feature (12)..(486): Homolog of NCBI NO: 18408546 NR Description: putative peptide transporter; protein id: supported by cDNA: gi_13877878, supported by cDNA: gi_16226700 thaliana] >gi|13877879|gb|AAK44017.1|AF370202_1 putative peptide
  misc_feature (12)..(486): Homolog of NCBI NO: 16226701 NR Description: AT3g47960/T17F15_170 [Arabidopsis thaliana]
  misc_feature (12)..(491): Homolog of NCBI NO: 15221883 NR Description: peptide transporter, putative; protein id: supported by cDNA: gi_17979086 [Arabidopsis thaliana]
MTDYNYIDNMQGLITITLTASFPQLHPASCNSQDPLSCGGPNKLQIGVLLLGLCFLSVGSGGIRPCSIPFGVDQFDQRTEEGVKGVASFFNWYYMTFTVVLIITQTVVVYIQDQVSWIIGFSIPTGLMALAVVMFFAGMKRYVYVKPEGSIFSGIAQVIVAARKKRKLKLPAEDDGTVTYYDPAIKSSVLSKLHRSNQFRCLDKAAVVIEGDLTPEGPPADKWRLCSVQEVEEVKCLIRIVPIWSAGIISLAAMTTQGTFTVSQALKMDRNLGPKFEIPAGSLSVISLLTIGIFLPFYDRVFVPFMRRITGHKSGITLLQRIGTGIVFAIFSMIVAGIVERMRRIRSINAGDPTGMTPMSVFWLSPQLILMGLCEAFNIIGQIEFFNSQFPEHMRSIANSLFSLSFAGSSYLSSFLVTVVHKFSGGHDRPDWLNKNLNAGKLDYFYYLIAVLGVVNLVYFWYCARGYRYKVGLPIEDFEEDKSSDDVEMTSKKSMK

SEQ ID NO: 71934 - protein, 487 aa, Arabidopsis thaliana
  peptide (1)..(487): Ceres Seq. ID no. 4905983
  misc_feature (4)..(397): Pfam Name: POT family Pfam Description: POT family
  misc_feature (1)..(487): Homolog of NCBI NO: 25404847 NR Description: probable peptide transporter T17F3.10 [imported] Arabidopsis thaliana >gi|12325237|gb|AAG52567.1|AC010675_15
  misc_feature (3)..(487): Homolog of NCBI NO: 18409391 NR Description: putative peptide transporter; protein id: supported by cDNA: 22243., supported by cDNA: gi_19699103 thaliana] >gi|19699104|gb|AAL90918.1| At1g69870/T17F3_10
  misc_feature (1)..(479): Homolog of NCBI NO: 15223425 NR Description: peptide transporter, putative; protein id:
  misc_feature (1)..(479): Homolog of NCBI NO: 25403285 NR Description: protein T7N9.14 [imported] - Arabidopsis thaliana
  misc_feature (1)..(462): Homolog of NCBI NO: 34906908 NR Description: putative peptide transporter [Oryza sativa
  misc_feature (3)..(461): Homolog of NCBI NO: 15241927 NR Description: peptide transporter; protein id: At5g62680.1 thaliana] >gi|8809664|dbj|BAA97215.1| peptide transporter
  misc_feature (3)..(477): Homolog of NCBI NO: 7488141 NR Description: probable peptide transport protein T17F15.170 - thaliana >gi|4678332|emb|CAB41143.1| putative peptide transporter
  misc_feature (3)..(477): Homolog of NCBI NO: 16226701 NR Description: AT3g47960/T17F15_170 [Arabidopsis thaliana]
  misc_feature (3)..(477): Homolog of NCBI NO: 18408546 NR Description: putative peptide transporter; protein id: supported by cDNA: gi_13877878, supported by cDNA: gi_16226700 thaliana] >gi|13877879|gb|AAK44017.1|AF370202_1 putative peptide
  misc_feature (3)..(482): Homolog of NCBI NO: 15221883 NR Description: peptide transporter, putative; protein id: supported by cDNA: gi_17979086 [Arabidopsis thaliana]
MQGLITITLTASFPQLHPASCNSQDPLSCGGPNKLQIGVLLLGLCFLSVGSGGIRPCSIPFGVDQFDQRTEEGVKGVASFFNWYYMTFTVVLIITQTVVVYIQDQVSWIIGFSIPTGLMALAVVMFFAGMKRYVYVKPEGSIFSGIAQVIVAARKKRKLKLPAEDDGTVTYYDPAIKSSVLSKLHRSNQFRCLDKAAVVIEGDLTPEGPPADKWRLCSVQEVEEVKCLIRIVPIWSAGIISLAAMTTQGTFTVSQALKMDRNLGPKFEIPAGSLSVISLLTIGIFLPFYDRVFVPFMRRITGHKSGITLLQRIGTGIVFAIFSMIVAGIVERMRRIRSINAGDPTGMTPMSVFWLSPQLILMGLCEAFNIIGQIEFFNSQFPEHMRSIANSLFSLSFAGSSYLSSFLVTVVHKFSGGHDRPDWLNKNLNAGKLDYFYYLIAVLGVVNLVYFWYCARGYRYKVGLPIEDFEEDKSSDDVEMTSKKSMK

SEQ ID NO: 71935 - DNA, 978 bp, Arabidopsis thaliana
  misc_feature (1)..(978): Ceres Seq. ID no. 4906235
  misc_feature: MA Experiment ID: 108474 Result: Down-regulated in Transcription
  misc_feature: MA Experiment 108474 PARAMETER Experiment Name: At_Drought_Flowers_cDNA_P Parameter: Timepoint (hr) Value: null
  misc_feature: MA Experiment 108474 PARAMETER Experiment Name: At_Drought_Flowers_cDNA_P Parameter: Treatment Value: Drought vs. No Drought
  misc_feature: MA Experiment ID: 20000180 Result: Down-regulated in Transcription
  misc_feature: MA Experiment 20000180 PARAMETER Experiment Name: At_Germinating_Seeds_P Parameter: Age (hr) Value: 24 vs. 0
  misc_feature: MA Experiment 20000180 PARAMETER Experiment Name: At_Germinating_Seeds_P Parameter: Tissue Value: Germinating Seeds
  misc_feature: Pfam Name: DUF1264 Pfam Description: Protein of unknown function (DUF1264)
aaagaacaagaaaaaagggtgttgttacgatggcatcgagtgataaggttccggtggcgtgtccggcaagcagtggagatggaaaggagccaatgggaaatccgacgaaaaccactacggcgatgctagagaaaggaacggctatgatgcaatcgatgaaaccgatcaggcaaatgagcctccacgtgtgttcattcgcttgctatagccatgatcccggtcgtcagatcgaagttcatatttacggccaccgtgtaaaccaggatttcctccaatgtgctgtctacgattccaattcctctaaggctcatctcatagggatcgaatatatagtgtcggaaaagttattcgaaagtctctcaccggaggaacaaaagctttggcactcgcatgattacgaggttcatgattttcgatacattgtccgatatgtttattatttatctgaaaaacgaaaatgatcgaatgagagttgtttttagatccaaatggctcttctagtaactccaagggtccctgagctcgttgcgaaaccggagcttaaaaatcttgccaaatcttacgggaaattttggtgtacatggcagattgaccgaggggataaattaccactaggtgtaccatcactaatggtatcgccacaagacgtgaatctcgggagaatcaaaccggagttggtgaaaaagagagatgaagaacatggaatctcgactgaatcgttgaagccgtcaagagatgggatctgtggaccagagaagaagaacctggttgctgattattgggttaggtttaggaaaggctttgcgcttgatgttgttgaaacagatatgaagagaacagctcccttcccctaacttttgtgtgtgctttttttctcagacattaattatataagttttcgtaagcttacactagatgggttgtgtacttattatgttatggagtatgataatgtcataaacatgagaattttttcgc

SEQ ID NO: 71936 - protein, 143 aa, Arabidopsis thaliana; identical to SEQ ID NO: 29572
  peptide (1)..(143): Ceres Seq. ID no. 4906236
  misc_feature: Pfam Name: DUF1264 Pfam Description: Protein of unknown function (DUF1264)
  misc_feature (1)..(133): Homolog of NCBI NO: 7452426 NR Description: hypothetical protein F13C5.90 - Arabidopsis >gi|2832620|emb|CAA16749.1| hypothetical protein [Arabidopsis >gi|7268686|emb|CAB78894.1| hypothetical protein [Arabidopsis
  misc_feature (1)..(133): Homolog of NCBI NO: 9758672 NR Description: gene_id:MRA19.8~pir||T05029~strong similarity to
  misc_feature (1)..(125): Homolog of NCBI NO: 15242474 NR Description: putative protein; protein id: At5g45690.1, by cDNA: gi_15450432, supported by cDNA: gi_18958059 [Arabidopsis >gi|15450433|gb|AAK96510.1| AT5g45690/MRA19_8 [Arabidopsis
  misc_feature (1)..(141): Homolog of NCBI NO: 34909516 NR Description: P0481E12.28 [Oryza sativa (japonica
  misc_feature (130)..(143): Homolog of NCBI NO: 34910820 NR Description: P0456A01.15 [Oryza sativa (japonica
  misc_feature (1)..(125): Homolog of NCBI NO: 34910820 NR Description: P0456A01.15 [Oryza sativa (japonica
  misc_feature (1)..(125): Homolog of NCBI NO: 18415199 NR Description: expressed protein; protein id: At4g18920.1,
  misc_feature (1)..(125): Homolog of NCBI NO: 21617913 NR Description: unknown [Arabidopsis thaliana]
  misc_feature (117)..(143): Homolog of NCBI NO: 18415199 NR Description: expressed protein; protein id: At4g18920.1,
  misc_feature (117)..(143): Homolog of NCBI NO: 21617913 NR Description: unknown [Arabidopsis thaliana]

SEQ ID NO: 71937 - protein, 122 aa, Arabidopsis thaliana; identical to SEQ ID NO: 29573
  peptide (1)..(122): Ceres Seq. ID no. 4906237
  misc_feature: Pfam Name: DUF1264 Pfam Description: Protein of unknown function (DUF1264)
  misc_feature (1)..(112): Homolog of NCBI NO: 7452426 NR Description: hypothetical protein F13C5.90 - Arabidopsis >gi|2832620|emb|CAA16749.1| hypothetical protein [Arabidopsis >gi|7268686|emb|CAB78894.1| hypothetical protein [Arabidopsis
  misc_feature (1)..(112): Homolog of NCBI NO: 9758672 NR Description: gene_id:MRA19.8~pir||T05029~strong similarity to
  misc_feature (1)..(104): Homolog of NCBI NO: 15242474 NR Description: putative protein; protein id: At5g45690.1, by cDNA: gi_15450432, supported by cDNA: gi_18958059 [Arabidopsis >gi|15450433|gb|AAK96510.1| AT5g45690/MRA19_8 [Arabidopsis
  misc_feature (1)..(120): Homolog of NCBI NO: 34909516 NR Description: P0481E12.28 [Oryza sativa (japonica
  misc_feature (109)..(122): Homolog of NCBI NO: 34910820 NR Description: P0456A01.15 [Oryza sativa (japonica
  misc_feature (1)..(104): Homolog of NCBI NO: 34910820 NR Description: P0456A01.15 [Oryza sativa (japonica
  misc_feature (1)..(104): Homolog of NCBI NO: 18415199 NR Description: expressed protein; protein id: At4g18920.1,
  misc_feature (1)..(104): Homolog of NCBI NO: 21617913 NR Description: unknown [Arabidopsis thaliana]
  misc_feature (96)..(122): Homolog of NCBI NO: 18415199 NR Description: expressed protein; protein id: At4g18920.1,
  misc_feature (96)..(122): Homolog of NCBI NO: 21617913 NR Description: unknown [Arabidopsis thaliana]

SEQ ID NO: 71938 - protein, 152 aa, Arabidopsis thaliana; identical to SEQ ID NO: 29571
  peptide (1)..(152): Ceres Seq. ID no. 4906238
  misc_feature: Pfam Name: DUF1264 Pfam Description: Protein of unknown function (DUF1264)
  misc_feature (10)..(142): Homolog of NCBI NO: 7452426 NR Description: hypothetical protein F13C5.90 - Arabidopsis >gi|2832620|emb|CAA16749.1| hypothetical protein [Arabidopsis >gi|7268686|emb|CAB78894.1| hypothetical protein [Arabidopsis
  misc_feature (10)..(142): Homolog of NCBI NO: 9758672 NR Description: gene_id:MRA19.8~pir||T05029~strong similarity to
  misc_feature (10)..(134): Homolog of NCBI NO: 15242474 NR Description: putative protein; protein id: At5g45690.1, by cDNA: gi_15450432, supported by cDNA: gi_18958059 [Arabidopsis >gi|15450433|gb|AAK96510.1| AT5g45690/MRA19_8 [Arabidopsis
  misc_feature (10)..(150): Homolog of NCBI NO: 34909516 NR Description: P0481E12.28 [Oryza sativa (japonica
  misc_feature (139)..(152): Homolog of NCBI NO: 34910820 NR Description: P0456A01.15 [Oryza sativa (japonica
  misc_feature (10)..(134): Homolog of NCBI NO: 34910820 NR Description: P0456A01.15 [Oryza sativa (japonica
  misc_feature (10)..(134): Homolog of NCBI NO: 18415199 NR Description: expressed protein; protein id: At4g18920.1,
  misc_feature (10)..(134): Homolog of NCBI NO: 21617913 NR Description: unknown [Arabidopsis thaliana]
  misc_feature (126)..(152): Homolog of NCBI NO: 18415199 NR Description: expressed protein; protein id: At4g18920.1,
  misc_feature (126)..(152): Homolog of NCBI NO: 21617913 NR Description: unknown [Arabidopsis thaliana]

SEQ ID NO: 71939 - DNA, 751 bp, Arabidopsis thaliana
  misc_feature (1)..(751): Ceres Seq. ID no. 4906360
  misc_feature: MA Experiment ID: 108434 Result: Up-regulated in Transcription
  misc_feature: MA Experiment 108434 PARAMETER Experiment Name: At_Root_Tips_cDNA_P Parameter: Tissue Value: Root Tips
  misc_feature: MA Experiment ID: 108461 Result: Up-regulated in Transcription
  misc_feature: MA Experiment 108461 PARAMETER Experiment Name: At_Germinating_Seeds_cDNA_P Parameter: Age (day) Value: 1 vs. 0
  misc_feature: MA Experiment 108461 PARAMETER Experiment Name: At_Germinating_Seeds_cDNA_P Parameter: Tissue Value: Germinating Seeds
  misc_feature: MA Experiment ID: 108462 Result: Up-regulated in Transcription
  misc_feature: MA Experiment 108462 PARAMETER Experiment Name: At_Germinating_Seeds_cDNA_P Parameter: Age (day) Value: 2 vs. 0
  misc_feature: MA Experiment 108462 PARAMETER Experiment Name: At_Germinating_Seeds_cDNA_P Parameter: Tissue Value: Germinating Seeds
  misc_feature: MA Experiment ID: 108573 Result: Down-regulated in Transcription
  misc_feature: MA Experiment 108573 PARAMETER Experiment Name: At_Drought_cDNA_P Parameter: Timepoint (hr) Value: 6
  misc_feature: MA Experiment 108573 PARAMETER Experiment Name: At_Drought_cDNA_P Parameter: Tissue Value: Aerial
  misc_feature: MA Experiment 108573 PARAMETER Experiment Name: At_Drought_cDNA_P Parameter: Treatment Value: Drought vs. No Drought
  misc_feature: MA Experiment ID: 108595 Result: Up-regulated in Transcription
  misc_feature: MA Experiment 108595 PARAMETER Experiment Name: At_Ler-pi_Ovule_cDNA_P Parameter: Plant Line Value: null
  misc_feature: MA Experiment ID: 20000112 Result: Up-regulated in Transcription
  misc_feature: MA Experiment 20000112 PARAMETER Experiment Name: At_42deg_Heat_cDNA_P Parameter: Temperature (deg C) Value: 42 vs. 22
  misc_feature: MA Experiment 20000112 PARAMETER Experiment Name: At_42deg_Heat_cDNA_P Parameter: Timepoint (hr) Value: 2
  misc_feature: MA Experiment 20000112 PARAMETER Experiment Name: At_42deg_Heat_cDNA_P Parameter: Tissue Value: Aerial
  misc_feature: MA Experiment ID: 20000144 Result: Up-regulated in Transcription
  misc_feature: MA Experiment 20000144 PARAMETER Experiment Name: At_42deg_Heat_cDNA_P Parameter: Temperature (deg C) Value: 42 vs. 22
  misc_feature: MA Experiment 20000144 PARAMETER Experiment Name: At_42deg_Heat_cDNA_P Parameter: Timepoint (hr) Value: 1
  misc_feature: MA Experiment 20000144 PARAMETER Experiment Name: At_42deg_Heat_cDNA_P Parameter: Tissue Value: Aerial
  misc_feature: MA Experiment ID: 20000180 Result: Up-regulated in Transcription
  misc_feature: MA Experiment 20000180 PARAMETER Experiment Name: At_Germinating_Seeds_P Parameter: Age (hr) Value: 24 vs. 0
  misc_feature: MA Experiment 20000180 PARAMETER Experiment Name: At_Germinating_Seeds_P Parameter: Tissue Value: Germinating Seeds
  misc_feature: MA Experiment ID: 20000437 Result: Down-regulated in Transcription
  misc_feature: MA Experiment 20000437 PARAMETER Experiment Name: At_Drought_P Parameter: Age (day) Value: 8
  misc_feature: MA Experiment 20000437 PARAMETER Experiment Name: At_Drought_P Parameter: Organism Value: A. thaliana
  misc_feature: MA Experiment 20000437 PARAMETER Experiment Name: At_Drought_P Parameter: Plant Line Value: WS
  misc_feature: MA Experiment 20000437 PARAMETER Experiment Name: At_Drought_P Parameter: Timepoint (hr) Value: 24
  misc_feature: MA Experiment 20000437 PARAMETER Experiment Name: At_Drought_P Parameter: Tissue Value: Whole Plant
  misc_feature: MA Experiment 20000437 PARAMETER Experiment Name: At_Drought_P Parameter: Treatment Value: Drought vs. No Drought
  misc_feature: MA Experiment ID: 20000794 Result: Down-regulated in Transcription
  misc_feature: MA Experiment 20000794 PARAMETER Experiment Name: At_Petals_P Parameter: Age (day) Value: 23-25 days
  misc_feature: MA Experiment 20000794 PARAMETER Experiment Name: At_Petals_P Parameter: Plant Line Value: WS
  misc_feature: MA Experiment 20000794 PARAMETER Experiment Name: At_Petals_P Parameter: Tissue Value: Petals vs. Whole plant
  misc_feature: MA Experiment ID: 20001558 Result: Up-regulated in Transcription
  misc_feature: MA Experiment 20001558 PARAMETER Experiment Name: At_Drought_Soil_Dry_P Parameter: Age (day) Value: 27
  misc_feature: MA Experiment 20001558 PARAMETER Experiment Name: At_Drought_Soil_Dry_P Parameter: Organism Value: A. thaliana
  misc_feature: MA Experiment 20001558 PARAMETER Experiment Name: At_Drought_Soil_Dry_P Parameter: Plant Line Value: WS
  misc_feature: MA Experiment 20001558 PARAMETER Experiment Name: At_Drought_Soil_Dry_P Parameter: Post Timepoint (hr) Value: 6
  misc_feature: MA Experiment 20001558 PARAMETER Experiment Name: At_Drought_Soil_Dry_P Parameter: Post-Treatment Value: Re-Water vs. No Drought
  misc_feature: MA Experiment 20001558 PARAMETER Experiment Name: At_Drought_Soil_Dry_P Parameter: Timepoint (day) Value: 13
  misc_feature: MA Experiment 20001558 PARAMETER Experiment Name: At_Drought_Soil_Dry_P Parameter: Treatment Value: Drought vs. No Drought
  misc_feature: MA Experiment ID: 20001560 Result: Up-regulated in Transcription
  misc_feature: MA Experiment 20001560 PARAMETER Experiment Name: At_Drought_Soil_Dry_P Parameter: Age (day) Value: 28
  misc_feature: MA Experiment 20001560 PARAMETER Experiment Name: At_Drought_Soil_Dry_P Parameter: Organism Value: A. thaliana
  misc_feature: MA Experiment 20001560 PARAMETER Experiment Name: At_Drought_Soil_Dry_P Parameter: Plant Line Value: WS
  misc_feature: MA Experiment 20001560 PARAMETER Experiment Name: At_Drought_Soil_Dry_P Parameter: Post Timepoint (hr) Value: None
  misc_feature: MA Experiment 20001560 PARAMETER Experiment Name: At_Drought_Soil_Dry_P Parameter: Post-Treatment Value: None
  misc_feature: MA Experiment 20001560 PARAMETER Experiment Name: At_Drought_Soil_Dry_P Parameter: Timepoint (day) Value: 14
  misc_feature: MA Experiment 20001560 PARAMETER Experiment Name: At_Drought_Soil_Dry_P Parameter: Treatment Value: Drought vs. No Drought
  misc_feature: MA Experiment ID: 20001911 Result: Down-regulated in Transcription
  misc_feature: MA Experiment 20001911 PARAMETER Experiment Name: At_Drought_Reproduction_P Parameter: Age (day) Value: 40
  misc_feature: MA Experiment 20001911 PARAMETER Experiment Name: At_Drought_Reproduction_P Parameter: Organism Value: A. thaliana
  misc_feature: MA Experiment 20001911 PARAMETER Experiment Name: At_Drought_Reproduction_P Parameter: Plant Line Value: WS
  misc_feature: MA Experiment 20001911 PARAMETER Experiment Name: At_Drought_Reproduction_P Parameter: Timepoint (day) Value: 10
  misc_feature: MA Experiment 20001911 PARAMETER Experiment Name: At_Drought_Reproduction_P Parameter: Tissue Value: Flowers
  misc_feature: MA Experiment 20001911 PARAMETER Experiment Name: At_Drought_Reproduction_P Parameter: Treatment Value: Drought vs. No Drought
agaactcagatttgaagcaaaacatcaatcggagaaggaagaaagaaaagatgggagctttagggaagctaatcgacgtagctctcttcgtatactttgtttcaatggcgataattgcgccgctcatcgacgggcaaacctcacttccttcaggaatatatccagcgtttctcaccgatctgaaaagcaagtacattgccgattttggagattacttgctcatggagaagccgcatttcctagttggactcgtttggcatgagcttctgttcttatggccgctctccattgctaacgtctacgccattcttgccggaaagtcgtggtttggtaccacctgcttgttgtatggagcttccctcgtcacttccatggctgcaatcctaggagatatgataggttcagggaaggcatctgatcgattgctaatgatgtatgtgcctttcatgggttttgggattctggctgttcttcgtggcttagtttatcgatccaccaaaaacactggatcttctggcaagagatccactatcatgcccagaagaaagctggcctgagattcaaaaaaaaaaaaaagcagttgatttttctctctggaagacttactcatcctttttctgtatatgcctagaaagaggtgtttatttttccttgtgaaaactttattgctttctgatttatgtggaattcttgtttgttgactcagcaacaatgaaatgtttacttggttgatataaaattcattcttgac

SEQ ID NO: 71940 - protein, 184 aa, Arabidopsis thaliana
  peptide (1)..(184): Ceres Seq. ID no. 4906361
  misc_feature (17)..(184): Homolog of NCBI NO: 18390494 NR Description: expressed protein; protein id: At1g05210.1, by cDNA: 29808. [Arabidopsis thaliana] >gi|25372732|pir||E86186
  misc_feature (17)..(184): Homolog of NCBI NO: 18402955 NR Description: expressed protein; protein id: At2g32380.1, by cDNA: 9671. [Arabidopsis thaliana] >gi|25372728|pir||D84732
  misc_feature (17)..(184): Homolog of NCBI NO: 15220447 NR Description: hypothetical protein; protein id: At1g05220.1
  misc_feature (17)..(171): Homolog of NCBI NO: 28411944 NR Description: OSJNBa0027N13.37 [Oryza sativa (japonica
  misc_feature (17)..(169): Homolog of NCBI NO: 28411943 NR Description: OSJNBa0027N13.35 [Oryza sativa (japonica
  misc_feature (17)..(128): Homolog of NCBI NO: 19526880 NR Description: RIKEN cDNA 1810014L12 [Mus musculus]
NSDLKQNINRRRKKEKMGALGKLIDVALFVYFVSMAIIAPLIDGQTSLPSGIYPAFLTDLKSKYIADFGDYLLMEKPHFLVGLVWHELLFLWPLSIANVYAILAGKSWFGTTCLLYGASLVTSMAAILGDMIGSGKASDRLLMMYVPFMGFGILAVLRGLVYRSTKNTGSSGKRSTIMPRRKLA

SEQ ID NO: 71941 - protein, 168 aa, Arabidopsis thaliana; identical to SEQ ID NO: 21380
  peptide (1)..(168): Ceres Seq. ID no. 4906362
  misc_feature (1)..(168): Homolog of NCBI NO: 18390494 NR Description: expressed protein; protein id: At1g05210.1, by cDNA: 29808. [Arabidopsis thaliana] >gi|25372732|pir||E86186
  misc_feature (1)..(168): Homolog of NCBI NO: 18402955 NR Description: expressed protein; protein id: At2g32380.1, by cDNA: 9671. [Arabidopsis thaliana] >gi|25372728|pir||D84732
  misc_feature (1)..(168): Homolog of NCBI NO: 15220447 NR Description: hypothetical protein; protein id: At1g05220.1
  misc_feature (1)..(155): Homolog of NCBI NO: 28411944 NR Description: OSJNBa0027N13.37 [Oryza sativa (japonica
  misc_feature (1)..(153): Homolog of NCBI NO: 28411943 NR Description: OSJNBa0027N13.35 [Oryza sativa (japonica
  misc_feature (1)..(112): Homolog of NCBI NO: 19526880 NR Description: RIKEN cDNA 1810014L12 [Mus musculus]

SEQ ID NO: 71942 - protein, 150 aa, Arabidopsis thaliana; identical to SEQ ID NO: 21381
  peptide (1)..(150): Ceres Seq. ID no. 4906363
  misc_feature (1)..(150): Homolog of NCBI NO: 18390494 NR Description: expressed protein; protein id: At1g05210.1, by cDNA: 29808. [Arabidopsis thaliana] >gi|25372732|pir||E86186
  misc_feature (1)..(150): Homolog of NCBI NO: 18402955 NR Description: expressed protein; protein id: At2g32380.1, by cDNA: 9671. [Arabidopsis thaliana] >gi|25372728|pir||D84732
  misc_feature (1)..(150): Homolog of NCBI NO: 15220447 NR Description: hypothetical protein; protein id: At1g05220.1
  misc_feature (1)..(137): Homolog of NCBI NO: 28411944 NR Description: OSJNBa0027N13.37 [Oryza sativa (japonica
  misc_feature (1)..(135): Homolog of NCBI NO: 28411943 NR Description: OSJNBa0027N13.35 [Oryza sativa (japonica
  misc_feature (1)..(94): Homolog of NCBI NO: 19526880 NR Description: RIKEN cDNA 1810014L12 [Mus musculus]

SEQ ID NO: 71943 - DNA, 752 bp, Arabidopsis thaliana
  misc_feature (1)..(752): Ceres Seq. ID no. 4906628
  misc_feature: MA Experiment ID: 108473 Result: Down-regulated in Transcription
  misc_feature: MA Experiment 108473 PARAMETER Experiment Name: At_Drought_Flowers_cDNA_P Parameter: Timepoint (hr) Value: 7 d
  misc_feature: MA Experiment 108473 PARAMETER Experiment Name: At_Drought_Flowers_cDNA_P Parameter: Tissue Value: Flower
  misc_feature: MA Experiment 108473 PARAMETER Experiment Name: At_Drought_Flowers_cDNA_P Parameter: Treatment Value: Drought vs. No Drought
  misc_feature: MA Experiment ID: 108501 Result: Down-regulated in Transcription
  misc_feature: MA Experiment 108501 PARAMETER Experiment Name: At_ap2_floral_buds_cDNA_P Parameter: Plant Line Value: ap2 (Ler.)
  misc_feature: MA Experiment 108501 PARAMETER Experiment Name: At_ap2_floral_buds_cDNA_P Parameter: Tissue Value: Closed Flower
  misc_feature: MA Experiment ID: 20000184 Result: Down-regulated in Transcription
  misc_feature: MA Experiment 20000184 PARAMETER Experiment Name: At_Shoots__P Parameter: Age (day) Value: 7
  misc_feature: MA Experiment 20000184 PARAMETER Experiment Name: At_Shoots__P Parameter: Tissue Value: Shoots vs. Whole Plant
  misc_feature: MA Experiment ID: 20000234 Result: Down-regulated in Transcription
  misc_feature: MA Experiment 20000234 PARAMETER Experiment Name: At_Siliques_P Parameter: Age (day) Value: 21
  misc_feature: MA Experiment 20000234 PARAMETER Experiment Name: At_Siliques_P Parameter: Organism Value: A. thaliana
  misc_feature: MA Experiment 20000234 PARAMETER Experiment Name: At_Siliques_P Parameter: Plant Line Value: WS
  misc_feature: MA Experiment 20000234 PARAMETER Experiment Name: At_Siliques_P Parameter: Tissue Value: Less Than 5mm Siliques vs. Whole Plant
  misc_feature: MA Experiment ID: 20000235 Result: Down-regulated in Transcription
  misc_feature: MA Experiment 20000235 PARAMETER Experiment Name: At_Siliques_P Parameter: Age (day) Value: 21
  misc_feature: MA Experiment 20000235 PARAMETER Experiment Name: At_Siliques_P Parameter: Organism Value: A. thaliana
  misc_feature: MA Experiment 20000235 PARAMETER Experiment Name: At_Siliques_P Parameter: Plant Line Value: WS
  misc_feature: MA Experiment 20000235 PARAMETER Experiment Name: At_Siliques_P Parameter: Tissue Value: 5-10mm Siliques vs. Whole Plant
  misc_feature: MA Experiment ID: 20000265 Result: Up-regulated in Transcription
  misc_feature: MA Experiment 20000265 PARAMETER Experiment Name: At_Open_Flower_P Parameter: Age (day) Value: 21
  misc_feature: MA Experiment 20000265 PARAMETER Experiment Name: At_Open_Flower_P Parameter: Plant Line Value: WS
  misc_feature: MA Experiment 20000265 PARAMETER Experiment Name: At_Open_Flower_P Parameter: Tissue Value: Closed Flower vs. Whole Plant
  misc_feature: MA Experiment ID: 20000286 Result: Up-regulated in Transcription
  misc_feature: MA Experiment 20000286 PARAMETER Experiment Name: At_Open_Flower_P Parameter: Age (day) Value: 21
  misc_feature: MA Experiment 20000286 PARAMETER Experiment Name: At_Open_Flower_P Parameter: Plant Line Value: WS
  misc_feature: MA Experiment 20000286 PARAMETER Experiment Name: At_Open_Flower_P Parameter: Tissue Value: Half Open vs. Whole Plant
  misc_feature: MA Experiment ID: 20000438 Result: Down-regulated in Transcription
  misc_feature: MA Experiment 20000438 PARAMETER Experiment Name: At_Shoots__P Parameter: Age (day) Value: 14
  misc_feature: MA Experiment 20000438 PARAMETER Experiment Name: At_Shoots__P Parameter: Tissue Value: Shoots vs. Whole Plant
  misc_feature: MA Experiment ID: 20000439 Result: Down-regulated in Transcription
  misc_feature: MA Experiment 20000439 PARAMETER Experiment Name: At_Roots__P Parameter: Age (day) Value: 14 vs. 21
  misc_feature: MA Experiment 20000439 PARAMETER Experiment Name: At_Roots__P Parameter: Organism Value: A. thaliana
  misc_feature: MA Experiment 20000439 PARAMETER Experiment Name: At_Roots__P Parameter: Tissue Value: Roots vs. Whole Plant
  misc_feature: MA Experiment ID: 20001760 Result: Up-regulated in Transcription
  misc_feature: MA Experiment 20001760 PARAMETER Experiment Name: At_50mM_NH4NO3_L-to-H_P Parameter: Timepoint (hr) Value: 2
  misc_feature: MA Experiment 20001760 PARAMETER Experiment Name: At_50mM_NH4NO3_L-to-H_P Parameter: Tissue Value: Siliques
  misc_feature: MA Experiment 20001760 PARAMETER Experiment Name: At_50mM_NH4NO3_L-to-H_P Parameter: Treatment Value: 50mM NH4NO3 vs 100mM Mannitol
  misc_feature: MA Experiment ID: 20001761 Result: Up-regulated in Transcription
  misc_feature: MA Experiment 20001761 PARAMETER Experiment Name: At_50mM_NH4NO3_L-to-H_P Parameter: Timepoint (hr) Value: 4
  misc_feature: MA Experiment 20001761 PARAMETER Experiment Name: At_50mM_NH4NO3_L-to-H_P Parameter: Tissue Value: Siliques
  misc_feature: MA Experiment 20001761 PARAMETER Experiment Name: At_50mM_NH4NO3_L-to-H_P Parameter: Treatment Value: 50mM NH4NO3 vs 100mM Mannitol
  misc_feature: MA Experiment ID: 20001773 Result: Up-regulated in Transcription
  misc_feature: MA Experiment 20001773 PARAMETER Experiment Name: At_Far-red-enriched-adult_P Parameter: Age (day) Value: 30
  misc_feature: MA Experiment 20001773 PARAMETER Experiment Name: At_Far-red-enriched-adult_P Parameter: Light Value: Far-red enriched vs. White
  misc_feature: MA Experiment 20001773 PARAMETER Experiment Name: At_Far-red-enriched-adult_P Parameter: Organism Value: A. thaliana
  misc_feature: MA Experiment 20001773 PARAMETER Experiment Name: At_Far-red-enriched-adult_P Parameter: Plant Line Value: Columbia
  misc_feature: MA Experiment 20001773 PARAMETER Experiment Name: At_Far-red-enriched-adult_P Parameter: Timepoint (hr) Value: 48
  misc_feature: MA Experiment 20001773 PARAMETER Experiment Name: At_Far-red-enriched-adult_P Parameter: Tissue Value: Aerial
  misc_feature: MA Experiment ID: 20001910 Result: Down-regulated in Transcription
  misc_feature: MA Experiment 20001910 PARAMETER Experiment Name: At_Drought_Reproduction_P Parameter: Age (day) Value: 37
  misc_feature: MA Experiment 20001910 PARAMETER Experiment Name: At_Drought_Reproduction_P Parameter: Organism Value: A. thaliana
  misc_feature: MA Experiment 20001910 PARAMETER Experiment Name: At_Drought_Reproduction_P Parameter: Plant Line Value: WS
  misc_feature: MA Experiment 20001910 PARAMETER Experiment Name: At_Drought_Reproduction_P Parameter: Timepoint (day) Value: 7
  misc_feature: MA Experiment 20001910 PARAMETER Experiment Name: At_Drought_Reproduction_P Parameter: Tissue Value: Flowers
  misc_feature: MA Experiment 20001910 PARAMETER Experiment Name: At_Drought_Reproduction_P Parameter: Treatment Value: Drought vs. No Drought
  misc_feature: Pfam Name: AP2 Pfam Description: AP2 domain
attaattttgacatgcgtgatgatctttcaaaataaaaaggaaacggaggatttggctagggacgttcgagaccgcagaggaggcagcaagagcatacgacgaggccgccgttttaatgagcggccgcaacgccaaaaccaactttcccctcaacaacaacaacaccggagaaacttccgagggcaaaaccgatatttcagcttcgtccacaatgtcatcctcaacatcatcttcatcgctctcttccatcctcagcgccaaactgaggaaatgctgcaagtctccttccccatccctcacctgcctccgtcttgacacagccagctcccatatcggcgtctggcagaaacgggccggttcaaagtctgactccagctgggtcatgacggtggagctaggtcccgcaagctcctcccaagagactactagtaaagcttcacaagacgctattcttgctccgaccactgaagttgaaattggtggcagcagagaagaagtattggatgaggaagaaaaggttgctttgcaaatgatagaggagcttctcaatacaaactaaatcttatttgcttatatatatgtacctattttcattgctgatttacagccaaaataatcaattataccgtgtattttatagatgttttatattaaaaggttgttagctatatattgtttctctttttccacatttgtatctaataaagtattggtgtttgtaactaaaatccagaagtgacctttttctttc

SEQ ID NO: 71944 - protein, 147 aa, Arabidopsis thaliana; identical to SEQ ID NO: 30301
  peptide (1)..(147): Ceres Seq. ID no. 4906629
  misc_feature: Pfam Name: AP2 Pfam Description: AP2 domain
  misc_feature (1)..(147): Homolog of NCBI NO: 15218134 NR Description: putative ethylene responsive element; protein id:
  misc_feature (1)..(147): Homolog of NCBI NO: 21553845 NR Description: putative ethylene responsive element [Arabidopsis
  misc_feature (1)..(145): Homolog of NCBI NO: 15238976 NR Description: putative protein; protein id: At5g11190.1 thaliana] >gi|8953381|emb|CAB96654.1| putative protein
  misc_feature (1)..(145): Homolog of NCBI NO: 15239413 NR Description: AP2 domain containing protein; protein id:
  misc_feature (1)..(145): Homolog of NCBI NO: 30689846 NR Description: AP2 domain transcription factor, putative thaliana] >gi|26452577|dbj|BAC43373.1| putative AP2 domain protein [Arabidopsis thaliana] >gi|28973113|gb|AAO63881.1|
  misc_feature (1)..(49): Homolog of NCBI NO: 18650662 NR Description: ethylene response factor 1 [Lycopersicon
  misc_feature (1)..(41): Homolog of NCBI NO: 15239863 NR Description: Nicotiana EREBP-3 like; protein id: At5g43410.1
  misc_feature (1)..(49): Homolog of NCBI NO: 15238727 NR Description: ethylene-responsive element - like protein; id: At5g25190.1, supported by cDNA: gi_15010715, supported by gi_16974344 [Arabidopsis thaliana] >gi|15010716|gb|AAK74017.1|
  misc_feature (1)..(44): Homolog of NCBI NO: 15218649 NR Description: ethylene-responsive element binding factor protein id: At1g28370.1, supported by cDNA: 27635., supported by gi_13430639 [Arabidopsis thaliana]
  misc_feature (1)..(44): Homolog of NCBI NO: 25403338 NR Description: protein F3M18.20 [imported] - Arabidopsis >gi|6560756|gb|AAF16756.1|AC010155_9 F3M18.20 [Arabidopsis

SEQ ID NO: 71945 - protein, 115 aa, Arabidopsis thaliana; identical to SEQ ID NO: 30302
  peptide (1)..(115): Ceres Seq. ID no. 4906630
  misc_feature: Pfam Name: AP2 Pfam Description: AP2 domain
  misc_feature (1)..(115): Homolog of NCBI NO: 15218134 NR Description: putative ethylene responsive element; protein id:
  misc_feature (1)..(115): Homolog of NCBI NO: 21553845 NR Description: putative ethylene responsive element [Arabidopsis
  misc_feature (1)..(113): Homolog of NCBI NO: 15238976 NR Description: putative protein; protein id: At5g11190.1 thaliana] >gi|8953381|emb|CAB96654.1| putative protein
  misc_feature (1)..(113): Homolog of NCBI NO: 15239413 NR Description: AP2 domain containing protein; protein id:
  misc_feature (1)..(113): Homolog of NCBI NO: 30689846 NR Description: AP2 domain transcription factor, putative thaliana] >gi|26452577|dbj|BAC43373.1| putative AP2 domain protein [Arabidopsis thaliana] >gi|28973113|gb|AAO63881.1|
  misc_feature (1)..(17): Homolog of NCBI NO: 18650662 NR Description: ethylene response factor 1 [Lycopersicon
  misc_feature (1)..(17): Homolog of NCBI NO: 15238727 NR Description: ethylene-responsive element - like protein; id: At5g25190.1, supported by cDNA: gi_15010715, supported by gi_16974344 [Arabidopsis thaliana] >gi|15010716|gb|AAK74017.1|
  misc_feature (1)..(12): Homolog of NCBI NO: 15218649 NR Description: ethylene-responsive element binding factor protein id: At1g28370.1, supported by cDNA: 27635., supported by gi_13430639 [Arabidopsis thaliana]
  misc_feature (1)..(12): Homolog of NCBI NO: 25403338 NR Description: protein F3M18.20 [imported] - Arabidopsis >gi|6560756|gb|AAF16756.1|AC010155_9 F3M18.20 [Arabidopsis
  misc_feature (1)..(20): Homolog of NCBI NO: 21592595 NR Description: ethylene responsive element binding factor 2

SEQ ID NO: 71946 - protein, 104 aa, Arabidopsis thaliana
  peptide (1)..(104): Ceres Seq. ID no. 4906631
  misc_feature: Pfam Name: AP2 Pfam Description: AP2 domain
LILTCVMIFQNKKETEDLARDVRDRRGGSKSIRRGRRFNERPQRQNQLSPQQQQHRRNFRGQNRYFSFVHNVILNIIFIALFHPQRQTEEMLQVSFPIPHLPPS

SEQ ID NO: 71947 - DNA, 587 bp, Arabidopsis thaliana
  misc_feature (1)..(587): Ceres Seq. ID no. 4906669
  misc_feature: MA Experiment ID: 108434 Result: Up-regulated in Transcription
  misc_feature: MA Experiment 108434 PARAMETER Experiment Name: At_Root_Tips_cDNA_P Parameter: Tissue Value: Root Tips
  misc_feature: MA Experiment ID: 108461 Result: Up-regulated in Transcription
  misc_feature: MA Experiment 108461 PARAMETER Experiment Name: At_Germinating_Seeds_cDNA_P Parameter: Age (day) Value: 1 vs. 0
  misc_feature: MA Experiment 108461 PARAMETER Experiment Name: At_Germinating_Seeds_cDNA_P Parameter: Tissue Value: Germinating Seeds
  misc_feature: MA Experiment ID: 108462 Result: Up-regulated in Transcription
  misc_feature: MA Experiment 108462 PARAMETER Experiment Name: At_Germinating_Seeds_cDNA_P Parameter: Age (day) Value: 2 vs. 0
  misc_feature: MA Experiment 108462 PARAMETER Experiment Name: At_Germinating_Seeds_cDNA_P Parameter: Tissue Value: Germinating Seeds
  misc_feature: MA Experiment ID: 108573 Result: Down-regulated in Transcription
  misc_feature: MA Experiment 108573 PARAMETER Experiment Name: At_Drought_cDNA_P Parameter: Timepoint (hr) Value: 6
  misc_feature: MA Experiment 108573 PARAMETER Experiment Name: At_Drought_cDNA_P Parameter: Tissue Value: Aerial
  misc_feature: MA Experiment 108573 PARAMETER Experiment Name: At_Drought_cDNA_P Parameter: Treatment Value: Drought vs. No Drought
  misc_feature: MA Experiment ID: 108577 Result: Down-regulated in Transcription
  misc_feature: MA Experiment 108577 PARAMETER Experiment Name: At_42deg_Heat_cDNA_P Parameter: Temperature (deg C) Value: 42 vs. 22
  misc_feature: MA Experiment 108577 PARAMETER Experiment Name: At_42deg_Heat_cDNA_P Parameter: Timepoint (hr) Value: 6
  misc_feature: MA Experiment 108577 PARAMETER Experiment Name: At_42deg_Heat_cDNA_P Parameter: Tissue Value: Aerial
  misc_feature: MA Experiment ID: 108579 Result: Up-regulated in Transcription
  misc_feature: MA Experiment 108579 PARAMETER Experiment Name: At_4deg_Cold_cDNA_P Parameter: Temperature (deg C) Value: 4 vs. 22
  misc_feature: MA Experiment 108579 PARAMETER Experiment Name: At_4deg_Cold_cDNA_P Parameter: Timepoint (hr) Value: 6
  misc_feature: MA Experiment 108579 PARAMETER Experiment Name: At_4deg_Cold_cDNA_P Parameter: Tissue Value: Aerial
  misc_feature: MA Experiment ID: 108585 Result: Down-regulated in Transcription
  misc_feature: MA Experiment 108585 PARAMETER Experiment Name: At_5mM_NaNP_cDNA_P Parameter: Timepoint (hr) Value: 6
  misc_feature: MA Experiment 108585 PARAMETER Experiment Name: At_5mM_NaNP_cDNA_P Parameter: Tissue Value: Aerial
  misc_feature: MA Experiment 108585 PARAMETER Experiment Name: At_5mM_NaNP_cDNA_P Parameter: Treatment Value: null
  misc_feature: MA Experiment ID: 20000112 Result: Down-regulated in Transcription
  misc_feature: MA Experiment 20000112 PARAMETER Experiment Name: At_42deg_Heat_cDNA_P Parameter: Temperature (deg C) Value: 42 vs. 22
  misc_feature: MA Experiment 20000112 PARAMETER Experiment Name: At_42deg_Heat_cDNA_P Parameter: Timepoint (hr) Value: 2
  misc_feature: MA Experiment 20000112 PARAMETER Experiment Name: At_42deg_Heat_cDNA_P Parameter: Tissue Value: Aerial
  misc_feature: MA Experiment ID: 20000117 Result: Down-regulated in Transcription
  misc_feature: MA Experiment 20000117 PARAMETER Experiment Name: At_100uM_ABA_Mutants_cDNA_P Parameter: Plant Line Value: Columbia
  misc_feature: MA Experiment 20000117 PARAMETER Experiment Name: At_100uM_ABA_Mutants_cDNA_P Parameter: Timepoint (hr) Value: 6
  misc_feature: MA Experiment 20000117 PARAMETER Experiment Name: At_100uM_ABA_Mutants_cDNA_P Parameter: Tissue Value: Aerial
  misc_feature: MA Experiment 20000117 PARAMETER Experiment Name: At_100uM_ABA_Mutants_cDNA_P Parameter: Treatment Value: 100uM ABA vs. No Treatment
  misc_feature: MA Experiment ID: 20000144 Result: Down-regulated in Transcription
  misc_feature: MA Experiment 20000144 PARAMETER Experiment Name: At_42deg_Heat_cDNA_P Parameter: Temperature (deg C) Value: 42 vs. 22
  misc_feature: MA Experiment 20000144 PARAMETER Experiment Name: At_42deg_Heat_cDNA_P Parameter: Timepoint (hr) Value: 1
  misc_feature: MA Experiment 20000144 PARAMETER Experiment Name: At_42deg_Heat_cDNA_P Parameter: Tissue Value: Aerial
  misc_feature: MA Experiment ID: 20000171 Result: Down-regulated in Transcription
  misc_feature: MA Experiment 20000171 PARAMETER Experiment Name: At_42deg_Heat_P Parameter: Age (day) Value: 14
  misc_feature: MA Experiment 20000171 PARAMETER Experiment Name: At_42deg_Heat_P Parameter: Organism Value: A. thaliana
  misc_feature: MA Experiment 20000171 PARAMETER Experiment Name: At_42deg_Heat_P Parameter: Plant Line Value: WS
  misc_feature: MA Experiment 20000171 PARAMETER Experiment Name: At_42deg_Heat_P Parameter: Temperature (deg C) Value: 42 vs. 22
  misc_feature: MA Experiment 20000171 PARAMETER Experiment Name: At_42deg_Heat_P Parameter: Timepoint (hr) Value: 1
  misc_feature: MA Experiment 20000171 PARAMETER Experiment Name: At_42deg_Heat_P Parameter: Tissue Value: Aerial
  misc_feature: MA Experiment ID: 20000173 Result: Down-regulated in Transcription
  misc_feature: MA Experiment 20000173 PARAMETER Experiment Name: At_42deg_Heat_P Parameter: Age (day) Value: 14
  misc_feature: MA Experiment 20000173 PARAMETER Experiment Name: At_42deg_Heat_P Parameter: Organism Value: A. thaliana
  misc_feature: MA Experiment 20000173 PARAMETER Experiment Name: At_42deg_Heat_P Parameter: Plant Line Value: WS
  misc_feature: MA Experiment 20000173 PARAMETER Experiment Name: At_42deg_Heat_P Parameter: Temperature (deg C) Value: 42 vs. 22
  misc_feature: MA Experiment 20000173 PARAMETER Experiment Name: At_42deg_Heat_P Parameter: Timepoint (hr) Value: 6
  misc_feature: MA Experiment 20000173 PARAMETER Experiment Name: At_42deg_Heat_P Parameter: Tissue Value: Aerial
  misc_feature: MA Experiment ID: 20000179 Result: Up-regulated in Transcription
  misc_feature: MA Experiment 20000179 PARAMETER Experiment Name: At_Germinating_Seeds_P Parameter: Age (hr) Value: 6 vs. 0
  misc_feature: MA Experiment 20000179 PARAMETER Experiment Name: At_Germinating_Seeds_P Parameter: Tissue Value: Germinating Seeds
  misc_feature: MA Experiment ID: 20000180 Result: Up-regulated in Transcription
  misc_feature: MA Experiment 20000180 PARAMETER Experiment Name: At_Germinating_Seeds_P Parameter: Age (hr) Value: 24 vs. 0
  misc_feature: MA Experiment 20000180 PARAMETER Experiment Name: At_Germinating_Seeds_P Parameter: Tissue Value: Germinating Seeds
  misc_feature: MA Experiment ID: 20000234 Result: Up-regulated in Transcription
  misc_feature: MA Experiment 20000234 PARAMETER Experiment Name: At_Siliques_P Parameter: Age (day) Value: 21
  misc_feature: MA Experiment 20000234 PARAMETER Experiment Name: At_Siliques_P Parameter: Organism Value: A. thaliana
  misc_feature: MA Experiment 20000234 PARAMETER Experiment Name: At_Siliques_P Parameter: Plant Line Value: WS
  misc_feature: MA Experiment 20000234 PARAMETER Experiment Name: At_Siliques_P Parameter: Tissue Value: Less Than 5mm Siliques vs. Whole Plant
  misc_feature: MA Experiment ID: 20000264 Result: Up-regulated in Transcription
  misc_feature: MA Experiment 20000264 PARAMETER Experiment Name: At_Open_Flower_P Parameter: Age (day) Value: 21
  misc_feature: MA Experiment 20000264 PARAMETER Experiment Name: At_Open_Flower_P Parameter: Plant Line Value: WS
  misc_feature: MA Experiment 20000264 PARAMETER Experiment Name: At_Open_Flower_P Parameter: Tissue Value: Open Flower vs. Whole Plant
  misc_feature: MA Experiment ID: 20000265 Result: Up-regulated in Transcription
  misc_feature: MA Experiment 20000265 PARAMETER Experiment Name: At_Open_Flower_P Parameter: Age (day) Value: 21
  misc_feature: MA Experiment 20000265 PARAMETER Experiment Name: At_Open_Flower_P Parameter: Plant Line Value: WS
  misc_feature: MA Experiment 20000265 PARAMETER Experiment Name: At_Open_Flower_P Parameter: Tissue Value: Closed Flower vs. Whole Plant
  misc_feature: MA Experiment ID: 20000437 Result: Down-regulated in Transcription
  misc_feature: MA Experiment 20000437 PARAMETER Experiment Name: At_Drought_P Parameter: Age (day) Value: 8
  misc_feature: MA Experiment 20000437 PARAMETER Experiment Name: At_Drought_P Parameter: Organism Value: A. thaliana
  misc_feature: MA Experiment 20000437 PARAMETER Experiment Name: At_Drought_P Parameter: Plant Line Value: WS
  misc_feature: MA Experiment 20000437 PARAMETER Experiment Name: At_Drought_P Parameter: Timepoint (hr) Value: 24
  misc_feature: MA Experiment 20000437 PARAMETER Experiment Name: At_Drought_P Parameter: Tissue Value: Whole Plant
  misc_feature: MA Experiment 20000437 PARAMETER Experiment Name: At_Drought_P Parameter: Treatment Value: Drought vs. No Drought
  misc_feature: MA Experiment ID: 20000495 Result: Down-regulated in Transcription
  misc_feature: MA Experiment 20000495 PARAMETER Experiment Name: At_Guard_Cells_P Parameter: Harvest Date Value: 8/2/2002
  misc_feature: MA Experiment 20000495 PARAMETER Experiment Name: At_Guard_Cells_P Parameter: Organism Value: A. thaliana
  misc_feature: MA Experiment 20000495 PARAMETER Experiment Name: At_Guard_Cells_P Parameter: Tissue Value: Guard Cells vs. Leaves
  misc_feature: MA Experiment ID: 20000496 Result: Down-regulated in Transcription
  misc_feature: MA Experiment 20000496 PARAMETER Experiment Name: At_Guard_Cells_P Parameter: Harvest Date Value: 7/19/2002
  misc_feature: MA Experiment 20000496 PARAMETER Experiment Name: At_Guard_Cells_P Parameter: Organism Value: Canola
  misc_feature: MA Experiment 20000496 PARAMETER Experiment Name: At_Guard_Cells_P Parameter: Tissue Value: Guard Cells vs. Leaves
  misc_feature: MA Experiment ID: 20001451 Result: Down-regulated in Transcription
  misc_feature: MA Experiment 20001451 PARAMETER Experiment Name: At_Far-red-induction_P Parameter: Age (day) Value: 7
  misc_feature: MA Experiment 20001451 PARAMETER Experiment Name: At_Far-red-induction_P Parameter: Light Value: Far-red vs. White
  misc_feature: MA Experiment 20001451 PARAMETER Experiment Name: At_Far-red-induction_P Parameter: Organism Value: A. thaliana
  misc_feature: MA Experiment 20001451 PARAMETER Experiment Name: At_Far-red-induction_P Parameter: Plant Line Value: Columbia
  misc_feature: MA Experiment 20001451 PARAMETER Experiment Name: At_Far-red-induction_P Parameter: Timepoint (hr) Value: 24
  misc_feature: MA Experiment 20001451 PARAMETER Experiment Name: At_Far-red-induction_P Parameter: Tissue Value: Whole Plant
  misc_feature: MA Experiment ID: 20001555 Result: Down-regulated in Transcription
  misc_feature: MA Experiment 20001555 PARAMETER Experiment Name: At_Drought_Soil_Dry_P Parameter: Age (day) Value: 24
  misc_feature: MA Experiment 20001555 PARAMETER Experiment Name: At_Drought_Soil_Dry_P Parameter: Organism Value: A. thaliana
  misc_feature: MA Experiment 20001555 PARAMETER Experiment Name: At_Drought_Soil_Dry_P Parameter: Plant Line Value: WS
  misc_feature: MA Experiment 20001555 PARAMETER Experiment Name: At_Drought_Soil_Dry_P Parameter: Post Timepoint (hr) Value: None
  misc_feature: MA Experiment 20001555 PARAMETER Experiment Name: At_Drought_Soil_Dry_P Parameter: Post-Treatment Value: None
  misc_feature: MA Experiment 20001555 PARAMETER Experiment Name: At_Drought_Soil_Dry_P Parameter: Timepoint (day) Value: 10
  misc_feature: MA Experiment 20001555 PARAMETER Experiment Name: At_Drought_Soil_Dry_P Parameter: Treatment Value: Drought vs. No Drought
  misc_feature: MA Experiment ID: 20001557 Result: Down-regulated in Transcription
  misc_feature: MA Experiment 20001557 PARAMETER Experiment Name: At_Drought_Soil_Dry_P Parameter: Age (day) Value: 27
  misc_feature: MA Experiment 20001557 PARAMETER Experiment Name: At_Drought_Soil_Dry_P Parameter: Organism Value: A. thaliana
  misc_feature: MA Experiment 20001557 PARAMETER Experiment Name: At_Drought_Soil_Dry_P Parameter: Plant Line Value: WS
  misc_feature: MA Experiment 20001557 PARAMETER Experiment Name: At_Drought_Soil_Dry_P Parameter: Post Timepoint (hr) Value: 3
  misc_feature: MA Experiment 20001557 PARAMETER Experiment Name: At_Drought_Soil_Dry_P Parameter: Post-Treatment Value: Re-Water vs. No Drought
  misc_feature: MA Experiment 20001557 PARAMETER Experiment Name: At_Drought_Soil_Dry_P Parameter: Timepoint (day) Value: 13
  misc_feature: MA Experiment 20001557 PARAMETER Experiment Name: At_Drought_Soil_Dry_P Parameter: Treatment Value: Drought vs. No Drought
atccagatctcaactttctctcatcttcaaattaaaatcaaacagtttcttaataacattttacttcatggctcgtaccaagcagacggctaggaaatcaaccggaggaaaggctccaaggaagcagctggcgacaaaagcggcgaggaaatctgctccggccaccggaggagtgaagaagccacacagattcagacccggaactgttgctttaagagaaatcaggaagtaccagaagagcactgagcttcttatccgtaaactccctttccagaggcttgtcagagagatcgctcaggacttcaaaaccgatcttcgtttccagagcagtgccgtcgccgctcttcaggaagctgctgaagcttacctcgtcggactcttcgaagacaccaatctctgcgccattcacgccaagagggtcacgatcatgcccaaggacatccagctcgcgagaagaatcagaggagaacgagcttagatctaagtattctggttactcttgtgttttgattagaaccataagattgtaaaatttcaagttaaatccaagggttataatattaattccaagcaattatcttttgttc

SEQ ID NO: 71948 - protein, 158 aa, Arabidopsis thaliana
  peptide (1)..(158): Ceres Seq. ID no. 4906670
  misc_feature (39)..(157): Pfam Name: Core histone H2A/H2B/H3/H4 Pfam Description: Core histone H2A/H2B/H3/H4
  misc_feature (23)..(158): Homolog of NCBI NO: 15232146 NR Description: histone H3, putative; protein id: At3g27360.1, by cDNA: gi_14335141, supported by cDNA: gi_18655352 [Arabidopsis >gi|15238433|ref|NP_201339.1| histone H3 (sp|P05203); id:
  misc_feature (23)..(158): Homolog of NCBI NO: 122087 NR Description: Histone H3 >gi|81849|pir||S04520 histone H3
  misc_feature (23)..(158): Homolog of NCBI NO: 1362108 NR Description: histone H3 homolog - common tobacco
  misc_feature (23)..(158): Homolog of NCBI NO: 166384 NR Description: histone H3 (H3-1.1)
  misc_feature (24)..(158): Homolog of NCBI NO: 70753 NR Description: histone H3 - garden pea (tentative sequence)
  misc_feature (24)..(158): Homolog of NCBI NO: 122083 NR Description: Histone H3 >gi|70751|pir||HSEAH3 histone H3 -
  misc_feature (2)..(158): Homolog of NCBI NO: 34876396 NR Description: similar to H3 histone family, member I [Rattus
  misc_feature (20)..(158): Homolog of NCBI NO: 37546835 NR Description: similar to histone protein Hist2h3c1 [Homo
  misc_feature (4)..(158): Homolog of NCBI NO: 31239843 NR Description: ENSANGP00000014183 [Anopheles gambiae]
  misc_feature (4)..(158): Homolog of NCBI NO: 31210959 NR Description: ENSANGP00000016066 [Anopheles gambiae]
SRSQLSLIFKLKSNSFLITFYFMARTKQTARKSTGGKAPRKQLATKAARKSAPATGGVKKPHRFRPGTVALREIRKYQKSTELLIRKLPFQRLVREIAQDFKTDLRFQSSAVAALQEAAEAYLVGLFEDTNLCAIHAKRVTIMPKDIQLARRIRGERA

SEQ ID NO: 71949 - protein, 136 aa, Arabidopsis thaliana; identical to SEQ ID NO: 8709
  peptide (1)..(136): Ceres Seq. ID no. 4906671
  misc_feature (17)..(135): Pfam Name: Core histone H2A/H2B/H3/H4 Pfam Description: Core histone H2A/H2B/H3/H4
  misc_feature (1)..(136): Homolog of NCBI NO: 15232146 NR Description: histone H3, putative; protein id: At3g27360.1, by cDNA: gi_14335141, supported by cDNA: gi_18655352 [Arabidopsis >gi|15238433|ref|NP_201339.1| histone H3 (sp|P05203); id:
  misc_feature (1)..(136): Homolog of NCBI NO: 122087 NR Description: Histone H3 >gi|81849|pir||S04520 histone H3
  misc_feature (1)..(136): Homolog of NCBI NO: 1362108 NR Description: histone H3 homolog - common tobacco
  misc_feature (1)..(136): Homolog of NCBI NO: 166384 NR Description: histone H3 (H3-1.1)
  misc_feature (2)..(136): Homolog of NCBI NO: 70753 NR Description: histone H3 - garden pea (tentative sequence)
  misc_feature (2)..(136): Homolog of NCBI NO: 122083 NR Description: Histone H3 >gi|70751|pir||HSEAH3 histone H3 -
  misc_feature (1)..(136): Homolog of NCBI NO: 34876396 NR Description: similar to H3 histone family, member I [Rattus
  misc_feature (1)..(136): Homolog of NCBI NO: 37546835 NR Description: similar to histone protein Hist2h3c1 [Homo
  misc_feature (1)..(136): Homolog of NCBI NO: 31239843 NR Description: ENSANGP00000014183 [Anopheles gambiae]
  misc_feature (1)..(136): Homolog of NCBI NO: 31210959 NR Description: ENSANGP00000016066 [Anopheles gambiae]

SEQ ID NO: 71950 - DNA, 940 bp, Arabidopsis thaliana
  misc_feature (1)..(940): Ceres Seq. ID no. 4907228
  misc_feature: MA Experiment ID: 108434 Result: Down-regulated in Transcription
  misc_feature: MA Experiment 108434 PARAMETER Experiment Name: At_Root_Tips_cDNA_P Parameter: Tissue Value: Root Tips
  misc_feature: MA Experiment ID: 108576 Result: Down-regulated in Transcription
  misc_feature: MA Experiment 108576 PARAMETER Experiment Name: At_42deg_Heat_cDNA_P Parameter: Temperature (deg C) Value: 42 vs. 22
  misc_feature: MA Experiment 108576 PARAMETER Experiment Name: At_42deg_Heat_cDNA_P Parameter: Timepoint (hr) Value: 1
  misc_feature: MA Experiment 108576 PARAMETER Experiment Name: At_42deg_Heat_cDNA_P Parameter: Tissue Value: Aerial
  misc_feature: MA Experiment ID: 20000069 Result: Up-regulated in Transcription
  misc_feature: MA Experiment 20000069 PARAMETER Experiment Name: At_100uM_ABA_Mutants_cDNA_P Parameter: Plant Line Value: CS23
  misc_feature: MA Experiment 20000069 PARAMETER Experiment Name: At_100uM_ABA_Mutants_cDNA_P Parameter: Timepoint (hr) Value: 6
  misc_feature: MA Experiment 20000069 PARAMETER Experiment Name: At_100uM_ABA_Mutants_cDNA_P Parameter: Tissue Value: Aerial
  misc_feature: MA Experiment 20000069 PARAMETER Experiment Name: At_100uM_ABA_Mutants_cDNA_P Parameter: Treatment Value: 100uM ABA vs. No Treatment
  misc_feature: MA Experiment ID: 20000070 Result: Up-regulated in Transcription
  misc_feature: MA Experiment 20000070 PARAMETER Experiment Name: At_100uM_ABA_Mutants_cDNA_P Parameter: Plant Line Value: CS24
  misc_feature: MA Experiment 20000070 PARAMETER Experiment Name: At_100uM_ABA_Mutants_cDNA_P Parameter: Timepoint (hr) Value: 6
  misc_feature: MA Experiment 20000070 PARAMETER Experiment Name: At_100uM_ABA_Mutants_cDNA_P Parameter: Tissue Value: Aerial
  misc_feature: MA Experiment 20000070 PARAMETER Experiment Name: At_100uM_ABA_Mutants_cDNA_P Parameter: Treatment Value: 100uM ABA vs. No Treatment
  misc_feature: MA Experiment ID: 20000111 Result: Down-regulated in Transcription
  misc_feature: MA Experiment 20000111 PARAMETER Experiment Name: At_42deg_Heat_cDNA_P Parameter: Temperature (deg C) Value: 42 vs. 22
  misc_feature: MA Experiment 20000111 PARAMETER Experiment Name: At_42deg_Heat_cDNA_P Parameter: Timepoint (hr) Value: 6
  misc_feature: MA Experiment 20000111 PARAMETER Experiment Name: At_42deg_Heat_cDNA_P Parameter: Tissue Value: Aerial
  misc_feature: MA Experiment ID: 20000113 Result: Down-regulated in Transcription
  misc_feature: MA Experiment 20000113 PARAMETER Experiment Name: At_42deg_Heat_cDNA_P Parameter: Temperature (deg C) Value: 42 vs. 22
  misc_feature: MA Experiment 20000113 PARAMETER Experiment Name: At_42deg_Heat_cDNA_P Parameter: Timepoint (hr) Value: 8
  misc_feature: MA Experiment 20000113 PARAMETER Experiment Name: At_42deg_Heat_cDNA_P Parameter: Tissue Value: Aerial
  misc_feature: MA Experiment ID: 20000234 Result: Up-regulated in Transcription
  misc_feature: MA Experiment 20000234 PARAMETER Experiment Name: At_Siliques_P Parameter: Age (day) Value: 21
  misc_feature: MA Experiment 20000234 PARAMETER Experiment Name: At_Siliques_P Parameter: Organism Value: A. thaliana
  misc_feature: MA Experiment 20000234 PARAMETER Experiment Name: At_Siliques_P Parameter: Plant Line Value: WS
  misc_feature: MA Experiment 20000234 PARAMETER Experiment Name: At_Siliques_P Parameter: Tissue Value: Less Than 5mm Siliques vs. Whole Plant
  misc_feature: MA Experiment ID: 20000264 Result: Up-regulated in Transcription
  misc_feature: MA Experiment 20000264 PARAMETER Experiment Name: At_Open_Flower_P Parameter: Age (day) Value: 21
  misc_feature: MA Experiment 20000264 PARAMETER Experiment Name: At_Open_Flower_P Parameter: Plant Line Value: WS
  misc_feature: MA Experiment 20000264 PARAMETER Experiment Name: At_Open_Flower_P Parameter: Tissue Value: Open Flower vs. Whole Plant
  misc_feature: MA Experiment ID: 20000265 Result: Up-regulated in Transcription
  misc_feature: MA Experiment 20000265 PARAMETER Experiment Name: At_Open_Flower_P Parameter: Age (day) Value: 21
  misc_feature: MA Experiment 20000265 PARAMETER Experiment Name: At_Open_Flower_P Parameter: Plant Line Value: WS
  misc_feature: MA Experiment 20000265 PARAMETER Experiment Name: At_Open_Flower_P Parameter: Tissue Value: Closed Flower vs. Whole Plant
  misc_feature: MA Experiment ID: 20000286 Result: Up-regulated in Transcription
  misc_feature: MA Experiment 20000286 PARAMETER Experiment Name: At_Open_Flower_P Parameter: Age (day) Value: 21
  misc_feature: MA Experiment 20000286 PARAMETER Experiment Name: At_Open_Flower_P Parameter: Plant Line Value: WS
  misc_feature: MA Experiment 20000286 PARAMETER Experiment Name: At_Open_Flower_P Parameter: Tissue Value: Half Open vs. Whole Plant
atagaatataaaagttgctaaatttgattaaagatatggacaaagttccaagattttttgtttcttaatcttaaaatgttttatgttattacttggttttggttttggtaggagttctcggtgatggatttatggctcgtgatttaactatagagaacacggcaggagcagatgcgcaccaagcggttgcgtttagatcagacagtgatttttcggtacttgaaaactgcgagtttcttgggaaccaagacactctttatgctcactctctccgtcagttctacaaacaatgtcgaatccaaggcaacgtagacttcatctttggtaactcagctgccgtattccaagattgtgatatcctaatcgcttcaaaacactccaaactcgagcaaggcggtgcaaacaacgcgatcacagcacacgggaggattgatgcgtcgcagtccacgggatttgtgtttttgaactgttcgattaacggaacagaggaatacatgaaggagtttcaagctaaccctgaagggcataagaacttcttgggaagaccgtggaaggagttttcgaggacggtttttgtaaactgtaatcttgagtctttgattagtcctgatggatggatgccttggaacggggatttcgcattgaagactttgtattacggtgagtataagaatacgggtccgggatcggttagatcgagtagggttccatggagtagtgagataccagagaagcatgttgatgtttactctgttgccaattttattcaggctgatgagtgggcttccacgactgcttgatttttgtaaaggaaacatgaggttttaggattttgaaaagaagagaagagaagtcgtcattgtaactttattgtagtgtcaaatattagtgtggtttctttatcgctcattggggattcataatagattaataattgaag

SEQ ID NO: 71951 - protein, 222 aa, Arabidopsis thaliana
  peptide (1)..(222): Ceres Seq. ID no. 4907229
  misc_feature (1)..(215): Pfam Name: Pectinesterase Pfam Description: Pectinesterase
  misc_feature (1)..(222): Homolog of NCBI NO: 22135882 NR Description: pectin methylesterase-like protein [Arabidopsis
  misc_feature (1)..(222): Homolog of NCBI NO: 22328058 NR Description: pectinesterase family; protein id: At5g64640.1
  misc_feature (1)..(222): Homolog of NCBI NO: 21554293 NR Description: pectin methylesterase-like protein [Arabidopsis
  misc_feature (1)..(222): Homolog of NCBI NO: 9759007 NR Description: pectin methylesterase-like protein [Arabidopsis
  misc_feature (1)..(222): Homolog of NCBI NO: 15242495 NR Description: pectin methylesterase - like protein; protein id:
  misc_feature (1)..(222): Homolog of NCBI NO: 1552379 NR Description: pectin methylesterase [Silene latifolia subsp.
  misc_feature (1)..(217): Homolog of NCBI NO: 34907404 NR Description: putative pectin methylesterase [Oryza sativa
  misc_feature (1)..(217): Homolog of NCBI NO: 38344075 NR Description: OSJNBa0006B20.19 [Oryza sativa (japonica
  misc_feature (1)..(221): Homolog of NCBI NO: 6174914 NR Description: Pectinesterase 2.1 precursor (Pectin
  misc_feature (1)..(221): Homolog of NCBI NO: 7447381 NR Description: pectinesterase (EC 3.1.1.11) PECS-c2 - sweet
MARDLTIENTAGADAHQAVAFRSDSDFSVLENCEFLGNQDTLYAHSLRQFYKQCRIQGNVDFIFGNSAAVFQDCDILIASKHSKLEQGGANNAITAHGRIDASQSTGFVFLNCSINGTEEYMKEFQANPEGHKNFLGRPWKEFSRTVFVNCNLESLISPDGWMPWNGDFALKTLYYGEYKNTGPGSVRSSRVPWSSEIPEKHVDVYSVANFIQADEWASTTA

SEQ ID NO: 71952 - DNA, 751 bp, Arabidopsis thaliana
  misc_feature (1)..(751): Ceres Seq. ID no. 4907328
  misc_feature: MA Experiment ID: 108488 Result: Down-regulated in Transcription
  misc_feature: MA Experiment ID: 108561 Result: Up-regulated in Transcription
  misc_feature: MA Experiment 108561 PARAMETER Experiment Name: At_100uM_ABA_cDNA_P Parameter: Timepoint (hr) Value: 6
  misc_feature: MA Experiment 108561 PARAMETER Experiment Name: At_100uM_ABA_cDNA_P Parameter: Tissue Value: Aerial
  misc_feature: MA Experiment 108561 PARAMETER Experiment Name: At_100uM_ABA_cDNA_P Parameter: Treatment Value: 100uM ABA vs. No Treatment
  misc_feature: MA Experiment ID: 108573 Result: Up-regulated in Transcription
  misc_feature: MA Experiment 108573 PARAMETER Experiment Name: At_Drought_cDNA_P Parameter: Timepoint (hr) Value: 6
  misc_feature: MA Experiment 108573 PARAMETER Experiment Name: At_Drought_cDNA_P Parameter: Tissue Value: Aerial
  misc_feature: MA Experiment 108573 PARAMETER Experiment Name: At_Drought_cDNA_P Parameter: Treatment Value: Drought vs. No Drought
  misc_feature: MA Experiment ID: 108585 Result: Up-regulated in Transcription
  misc_feature: MA Experiment 108585 PARAMETER Experiment Name: At_5mM_NaNP_cDNA_P Parameter: Timepoint (hr) Value: 6
  misc_feature: MA Experiment 108585 PARAMETER Experiment Name: At_5mM_NaNP_cDNA_P Parameter: Tissue Value: Aerial
  misc_feature: MA Experiment 108585 PARAMETER Experiment Name: At_5mM_NaNP_cDNA_P Parameter: Treatment Value: null
  misc_feature: MA Experiment ID: 108605 Result: Up-regulated in Transcription
  misc_feature: MA Experiment 108605 PARAMETER Experiment Name: At_100uM_ABA_cDNA_P Parameter: Timepoint (hr) Value: 6
  misc_feature: MA Experiment 108605 PARAMETER Experiment Name: At_100uM_ABA_cDNA_P Parameter: Tissue Value: Aerial
  misc_feature: MA Experiment 108605 PARAMETER Experiment Name: At_100uM_ABA_cDNA_P Parameter: Treatment Value: 100uM ABA vs. No Treatment
  misc_feature: MA Experiment ID: 108607 Result: Up-regulated in Transcription
  misc_feature: MA Experiment 108607 PARAMETER Experiment Name: At_100uM_ABA_cDNA_P Parameter: Timepoint (hr) Value: 4
  misc_feature: MA Experiment 108607 PARAMETER Experiment Name: At_100uM_ABA_cDNA_P Parameter: Tissue Value: Aerial
  misc_feature: MA Experiment 108607 PARAMETER Experiment Name: At_100uM_ABA_cDNA_P Parameter: Treatment Value: 100uM ABA vs. No Treatment
  misc_feature: MA Experiment ID: 20000069 Result: Up-regulated in Transcription
  misc_feature: MA Experiment 20000069 PARAMETER Experiment Name: At_100uM_ABA_Mutants_cDNA_P Parameter: Plant Line Value: CS23
  misc_feature: MA Experiment 20000069 PARAMETER Experiment Name: At_100uM_ABA_Mutants_cDNA_P Parameter: Timepoint (hr) Value: 6
  misc_feature: MA Experiment 20000069 PARAMETER Experiment Name: At_100uM_ABA_Mutants_cDNA_P Parameter: Tissue Value: Aerial
  misc_feature: MA Experiment 20000069 PARAMETER Experiment Name: At_100uM_ABA_Mutants_cDNA_P Parameter: Treatment Value: 100uM ABA vs. No Treatment
  misc_feature: MA Experiment ID: 20000070 Result: Up-regulated in Transcription
  misc_feature: MA Experiment 20000070 PARAMETER Experiment Name: At_100uM_ABA_Mutants_cDNA_P Parameter: Plant Line Value: CS24
  misc_feature: MA Experiment 20000070 PARAMETER Experiment Name: At_100uM_ABA_Mutants_cDNA_P Parameter: Timepoint (hr) Value: 6
  misc_feature: MA Experiment 20000070 PARAMETER Experiment Name: At_100uM_ABA_Mutants_cDNA_P Parameter: Tissue Value: Aerial
  misc_feature: MA Experiment 20000070 PARAMETER Experiment Name: At_100uM_ABA_Mutants_cDNA_P Parameter: Treatment Value: 100uM ABA vs. No Treatment
  misc_feature: MA Experiment ID: 20000071 Result: Up-regulated in Transcription
  misc_feature: MA Experiment 20000071 PARAMETER Experiment Name: At_100uM_ABA_Mutants_cDNA_P Parameter: Plant Line Value: CS8104
  misc_feature: MA Experiment 20000071 PARAMETER Experiment Name: At_100uM_ABA_Mutants_cDNA_P Parameter: Timepoint (hr) Value: 6
  misc_feature: MA Experiment 20000071 PARAMETER Experiment Name: At_100uM_ABA_Mutants_cDNA_P Parameter: Tissue Value: Aerial
  misc_feature: MA Experiment 20000071 PARAMETER Experiment Name: At_100uM_ABA_Mutants_cDNA_P Parameter: Treatment Value: 100uM ABA vs. No Treatment
  misc_feature: MA Experiment ID: 20000072 Result: Up-regulated in Transcription
  misc_feature: MA Experiment 20000072 PARAMETER Experiment Name: At_100uM_ABA_Mutants_cDNA_P Parameter: Plant Line Value: CS8105
  misc_feature: MA Experiment 20000072 PARAMETER Experiment Name: At_100uM_ABA_Mutants_cDNA_P Parameter: Timepoint (hr) Value: 6
  misc_feature: MA Experiment 20000072 PARAMETER Experiment Name: At_100uM_ABA_Mutants_cDNA_P Parameter: Tissue Value: Aerial
  misc_feature: MA Experiment 20000072 PARAMETER Experiment Name: At_100uM_ABA_Mutants_cDNA_P Parameter: Treatment Value: 100uM ABA vs. No Treatment
  misc_feature: MA Experiment ID: 20000087 Result: Up-regulated in Transcription
  misc_feature: MA Experiment 20000087 PARAMETER Experiment Name: At_100uM_ABA_Mutants_cDNA_P Parameter: Plant Line Value: WS
  misc_feature: MA Experiment 20000087 PARAMETER Experiment Name: At_100uM_ABA_Mutants_cDNA_P Parameter: Timepoint (hr) Value: 6
  misc_feature: MA Experiment 20000087 PARAMETER Experiment Name: At_100uM_ABA_Mutants_cDNA_P Parameter: Tissue Value: Aerial
  misc_feature: MA Experiment 20000087 PARAMETER Experiment Name: At_100uM_ABA_Mutants_cDNA_P Parameter: Treatment Value: 100uM ABA vs. No Treatment
  misc_feature: MA Experiment ID: 20000117 Result: Up-regulated in Transcription
  misc_feature: MA Experiment 20000117 PARAMETER Experiment Name: At_100uM_ABA_Mutants_cDNA_P Parameter: Plant Line Value: Columbia
  misc_feature: MA Experiment 20000117 PARAMETER Experiment Name: At_100uM_ABA_Mutants_cDNA_P Parameter: Timepoint (hr) Value: 6
  misc_feature: MA Experiment 20000117 PARAMETER Experiment Name: At_100uM_ABA_Mutants_cDNA_P Parameter: Tissue Value: Aerial
  misc_feature: MA Experiment 20000117 PARAMETER Experiment Name: At_100uM_ABA_Mutants_cDNA_P Parameter: Treatment Value: 100uM ABA vs. No Treatment
  misc_feature: MA Experiment ID: 20000437 Result: Up-regulated in Transcription
  misc_feature: MA Experiment 20000437 PARAMETER Experiment Name: At_Drought_P Parameter: Age (day) Value: 8
  misc_feature: MA Experiment 20000437 PARAMETER Experiment Name: At_Drought_P Parameter: Organism Value: A. thaliana
  misc_feature: MA Experiment 20000437 PARAMETER Experiment Name: At_Drought_P Parameter: Plant Line Value: WS
  misc_feature: MA Experiment 20000437 PARAMETER Experiment Name: At_Drought_P Parameter: Timepoint (hr) Value: 24
  misc_feature: MA Experiment 20000437 PARAMETER Experiment Name: At_Drought_P Parameter: Tissue Value: Whole Plant
  misc_feature: MA Experiment 20000437 PARAMETER Experiment Name: At_Drought_P Parameter: Treatment Value: Drought vs. No Drought
  misc_feature: MA Experiment ID: 20000496 Result: Up-regulated in Transcription
  misc_feature: MA Experiment 20000496 PARAMETER Experiment Name: At_Guard_Cells_P Parameter: Harvest Date Value: 7/19/2002
  misc_feature: MA Experiment 20000496 PARAMETER Experiment Name: At_Guard_Cells_P Parameter: Organism Value: Canola
  misc_feature: MA Experiment 20000496 PARAMETER Experiment Name: At_Guard_Cells_P Parameter: Tissue Value: Guard Cells vs. Leaves
  misc_feature: MA Experiment ID: 20001906 Result: Up-regulated in Transcription
  misc_feature: MA Experiment 20001906 PARAMETER Experiment Name: At_Drought_Reproduction_P Parameter: Age (day) Value: 35
  misc_feature: MA Experiment 20001906 PARAMETER Experiment Name: At_Drought_Reproduction_P Parameter: Organism Value: A. thaliana
  misc_feature: MA Experiment 20001906 PARAMETER Experiment Name: At_Drought_Reproduction_P Parameter: Plant Line Value: WS
  misc_feature: MA Experiment 20001906 PARAMETER Experiment Name: At_Drought_Reproduction_P Parameter: Timepoint (day) Value: 5
  misc_feature: MA Experiment 20001906 PARAMETER Experiment Name: At_Drought_Reproduction_P Parameter: Tissue Value: Siliques
  misc_feature: MA Experiment 20001906 PARAMETER Experiment Name: At_Drought_Reproduction_P Parameter: Treatment Value: Drought vs. No Drought
  misc_feature: Pfam Name: UQ_con Pfam Description: Ubiquitin-conjugating enzyme
aaaacaaccccttgagatttccgaagatcatcaaatccaaaaccctagaaaccgaacaaaagctagcagaagctaggactattcaatggcgtcgaaaagaattaacaaagagcttagggacttgcaaagagatcctcctgtgtcctgcagtgcaggtcctacgggagatgatatgttccaatggcaagcaactatcatgggtccagcagatagcccgtttgccggaggtgtgtttcttgttaccattcacttcccaccagattaccctttcaagccaccaaaggttgccttccggaccaaggtttatcacccaaacatcaacagtaatggaagtatctgtcttgacattctgaaagagcagtggagccctgcacttaccgtatccaaggttcttctgtcgatatgctcattgctgacggatccaaaccctgacgatcctttggttcctgaaatagcgcacatctacaagacagaccgagtcaagtacgagtccacagctcaatcctggactcagaagtatgcaatgggatgataacaagcaataatacccaccaccagtacattgcgtattaaacaggagaaataagaaagaaagaaaaaaactcagtttggcttttactttggctacttttgcttattagttttttttttttaattatatcttgaagctgtgtgttgggtgtgtacatgagctttatgccttatttgaaacattgagatcttgcaaatgcttttaagccaataatccgct

SEQ ID NO: 71953 - protein, 148 aa, Arabidopsis thaliana; identical to SEQ ID NO: 28390
  peptide (1)..(148): Ceres Seq. ID no. 4907329
  misc_feature: Pfam Name: UQ_con Pfam Description: Ubiquitin-conjugating enzyme
  misc_feature (1)..(148): Homolog of NCBI NO: 18423829 NR Description: E2, ubiquitin-conjugating enzyme, putative; id: At5g56150.1, supported by cDNA: 10022., supported by cDNA:
  misc_feature (1)..(148): Homolog of NCBI NO: 32488376 NR Description: OSJNBa0043A12.6 [Oryza sativa (japonica
  misc_feature (1)..(148): Homolog of NCBI NO: 5762457 NR Description: ubiquitin-conjugating enzyme UBC2
  misc_feature (1)..(148): Homolog of NCBI NO: 456568 NR Description: ubiquitin conjugating enzyme
  misc_feature (1)..(148): Homolog of NCBI NO: 18408001 NR Description: E2, ubiquitin-conjugating enzyme, putative; id: At1g64230.1, supported by cDNA: gi_14326528 [Arabidopsis >gi|14326529|gb|AAK60309.1|AF385718_1 At1g64230/F22C12_17

SEQ ID NO: 71954 - protein, 119 aa, Arabidopsis thaliana; identical to SEQ ID NO: 28391
  peptide (1)..(119): Ceres Seq. ID no. 4907330
  misc_feature: Pfam Name: UQ_con Pfam Description: Ubiquitin-conjugating enzyme
  misc_feature (1)..(119): Homolog of NCBI NO: 18423829 NR Description: E2, ubiquitin-conjugating enzyme, putative; id: At5g56150.1, supported by cDNA: 10022., supported by cDNA:
  misc_feature (1)..(119): Homolog of NCBI NO: 32488376 NR Description: OSJNBa0043A12.6 [Oryza sativa (japonica
  misc_feature (1)..(119): Homolog of NCBI NO: 5762457 NR Description: ubiquitin-conjugating enzyme UBC2
  misc_feature (1)..(119): Homolog of NCBI NO: 456568 NR Description: ubiquitin conjugating enzyme
  misc_feature (1)..(119): Homolog of NCBI NO: 18408001 NR Description: E2, ubiquitin-conjugating enzyme, putative; id: At1g64230.1, supported by cDNA: gi_14326528 [Arabidopsis >gi|14326529|gb|AAK60309.1|AF385718_1 At1g64230/F22C12_17

SEQ ID NO: 71955 - protein, 116 aa, Arabidopsis thaliana; identical to SEQ ID NO: 28392
  peptide (1)..(116): Ceres Seq. ID no. 4907331
  misc_feature: Pfam Name: UQ_con Pfam Description: Ubiquitin-conjugating enzyme

SEQ ID NO: 71956 - DNA, 1706 bp, Arabidopsis thaliana
  misc_feature (1)..(1706): Ceres Seq. ID no. 4907601
  misc_feature: MA Experiment ID: 108561 Result: Down-regulated in Transcription
  misc_feature: MA Experiment 108561 PARAMETER Experiment Name: At_100uM_ABA_cDNA_P Parameter: Timepoint (hr) Value: 6
  misc_feature: MA Experiment 108561 PARAMETER Experiment Name: At_100uM_ABA_cDNA_P Parameter: Tissue Value: Aerial
  misc_feature: MA Experiment 108561 PARAMETER Experiment Name: At_100uM_ABA_cDNA_P Parameter: Treatment Value: 100uM ABA vs. No Treatment
  misc_feature: MA Experiment ID: 108576 Result: Down-regulated in Transcription
  misc_feature: MA Experiment 108576 PARAMETER Experiment Name: At_42deg_Heat_cDNA_P Parameter: Temperature (deg C) Value: 42 vs. 22
  misc_feature: MA Experiment 108576 PARAMETER Experiment Name: At_42deg_Heat_cDNA_P Parameter: Timepoint (hr) Value: 1
  misc_feature: MA Experiment 108576 PARAMETER Experiment Name: At_42deg_Heat_cDNA_P Parameter: Tissue Value: Aerial
  misc_feature: MA Experiment ID: 108577 Result: Down-regulated in Transcription
  misc_feature: MA Experiment 108577 PARAMETER Experiment Name: At_42deg_Heat_cDNA_P Parameter: Temperature (deg C) Value: 42 vs. 22
  misc_feature: MA Experiment 108577 PARAMETER Experiment Name: At_42deg_Heat_cDNA_P Parameter: Timepoint (hr) Value: 6
  misc_feature: MA Experiment 108577 PARAMETER Experiment Name: At_42deg_Heat_cDNA_P Parameter: Tissue Value: Aerial
  misc_feature: MA Experiment ID: 108595 Result: Down-regulated in Transcription
  misc_feature: MA Experiment 108595 PARAMETER Experiment Name: At_Ler-pi_Ovule_cDNA_P Parameter: Plant Line Value: null
  misc_feature: MA Experiment ID: 108605 Result: Down-regulated in Transcription
  misc_feature: MA Experiment 108605 PARAMETER Experiment Name: At_100uM_ABA_cDNA_P Parameter: Timepoint (hr) Value: 6
  misc_feature: MA Experiment 108605 PARAMETER Experiment Name: At_100uM_ABA_cDNA_P Parameter: Tissue Value: Aerial
  misc_feature: MA Experiment 108605 PARAMETER Experiment Name: At_100uM_ABA_cDNA_P Parameter: Treatment Value: 100uM ABA vs. No Treatment
  misc_feature: MA Experiment ID: 108668 Result: Down-regulated in Transcription
  misc_feature: MA Experiment 108668 PARAMETER Experiment Name: At_2mM_SA_cDNA_P Parameter: Plant Line Value: WS
  misc_feature: MA Experiment 108668 PARAMETER Experiment Name: At_2mM_SA_cDNA_P Parameter: Timepoint (hr) Value: 6
  misc_feature: MA Experiment 108668 PARAMETER Experiment Name: At_2mM_SA_cDNA_P Parameter: Treatment Value: 2mM SA vs. No Treatment
  misc_feature: MA Experiment ID: 20000070 Result: Down-regulated in Transcription
  misc_feature: MA Experiment 20000070 PARAMETER Experiment Name: At_100uM_ABA_Mutants_cDNA_P Parameter: Plant Line Value: CS24
  misc_feature: MA Experiment 20000070 PARAMETER Experiment Name: At_100uM_ABA_Mutants_cDNA_P Parameter: Timepoint (hr) Value: 6
  misc_feature: MA Experiment 20000070 PARAMETER Experiment Name: At_100uM_ABA_Mutants_cDNA_P Parameter: Tissue Value: Aerial
  misc_feature: MA Experiment 20000070 PARAMETER Experiment Name: At_100uM_ABA_Mutants_cDNA_P Parameter: Treatment Value: 100uM ABA vs. No Treatment
  misc_feature: MA Experiment ID: 20000071 Result: Down-regulated in Transcription
  misc_feature: MA Experiment 20000071 PARAMETER Experiment Name: At_100uM_ABA_Mutants_cDNA_P Parameter: Plant Line Value: CS8104
  misc_feature: MA Experiment 20000071 PARAMETER Experiment Name: At_100uM_ABA_Mutants_cDNA_P Parameter: Timepoint (hr) Value: 6
  misc_feature: MA Experiment 20000071 PARAMETER Experiment Name: At_100uM_ABA_Mutants_cDNA_P Parameter: Tissue Value: Aerial
  misc_feature: MA Experiment 20000071 PARAMETER Experiment Name: At_100uM_ABA_Mutants_cDNA_P Parameter: Treatment Value: 100uM ABA vs. No Treatment
  misc_feature: MA Experiment ID: 20000111 Result: Down-regulated in Transcription
  misc_feature: MA Experiment 20000111 PARAMETER Experiment Name: At_42deg_Heat_cDNA_P Parameter: Temperature (deg C) Value: 42 vs. 22
  misc_feature: MA Experiment 20000111 PARAMETER Experiment Name: At_42deg_Heat_cDNA_P Parameter: Timepoint (hr) Value: 6
  misc_feature: MA Experiment 20000111 PARAMETER Experiment Name: At_42deg_Heat_cDNA_P Parameter: Tissue Value: Aerial
  misc_feature: MA Experiment ID: 20000112 Result: Down-regulated in Transcription
  misc_feature: MA Experiment 20000112 PARAMETER Experiment Name: At_42deg_Heat_cDNA_P Parameter: Temperature (deg C) Value: 42 vs. 22
  misc_feature: MA Experiment 20000112 PARAMETER Experiment Name: At_42deg_Heat_cDNA_P Parameter: Timepoint (hr) Value: 2
  misc_feature: MA Experiment 20000112 PARAMETER Experiment Name: At_42deg_Heat_cDNA_P Parameter: Tissue Value: Aerial
  misc_feature: MA Experiment ID: 20000113 Result: Down-regulated in Transcription
  misc_feature: MA Experiment 20000113 PARAMETER Experiment Name: At_42deg_Heat_cDNA_P Parameter: Temperature (deg C) Value: 42 vs. 22
  misc_feature: MA Experiment 20000113 PARAMETER Experiment Name: At_42deg_Heat_cDNA_P Parameter: Timepoint (hr) Value: 8
  misc_feature: MA Experiment 20000113 PARAMETER Experiment Name: At_42deg_Heat_cDNA_P Parameter: Tissue Value: Aerial
  misc_feature: MA Experiment ID: 20000117 Result: Down-regulated in Transcription
  misc_feature: MA Experiment 20000117 PARAMETER Experiment Name: At_100uM_ABA_Mutants_cDNA_P Parameter: Plant Line Value: Columbia
  misc_feature: MA Experiment 20000117 PARAMETER Experiment Name: At_100uM_ABA_Mutants_cDNA_P Parameter: Timepoint (hr) Value: 6
  misc_feature: MA Experiment 20000117 PARAMETER Experiment Name: At_100uM_ABA_Mutants_cDNA_P Parameter: Tissue Value: Aerial
  misc_feature: MA Experiment 20000117 PARAMETER Experiment Name: At_100uM_ABA_Mutants_cDNA_P Parameter: Treatment Value: 100uM ABA vs. No Treatment
  misc_feature: MA Experiment ID: 20000184 Result: Up-regulated in Transcription
  misc_feature: MA Experiment 20000184 PARAMETER Experiment Name: At_Shoots__P Parameter: Age (day) Value: 7
  misc_feature: MA Experiment 20000184 PARAMETER Experiment Name: At_Shoots__P Parameter: Tissue Value: Shoots vs. Whole Plant
  misc_feature: MA Experiment ID: 20001555 Result: Down-regulated in Transcription
  misc_feature: MA Experiment 20001555 PARAMETER Experiment Name: At_Drought_Soil_Dry_P Parameter: Age (day) Value: 24
  misc_feature: MA Experiment 20001555 PARAMETER Experiment Name: At_Drought_Soil_Dry_P Parameter: Organism Value: A. thaliana
  misc_feature: MA Experiment 20001555 PARAMETER Experiment Name: At_Drought_Soil_Dry_P Parameter: Plant Line Value: WS
  misc_feature: MA Experiment 20001555 PARAMETER Experiment Name: At_Drought_Soil_Dry_P Parameter: Post Timepoint (hr) Value: None
  misc_feature: MA Experiment 20001555 PARAMETER Experiment Name: At_Drought_Soil_Dry_P Parameter: Post-Treatment Value: None
  misc_feature: MA Experiment 20001555 PARAMETER Experiment Name: At_Drought_Soil_Dry_P Parameter: Timepoint (day) Value: 10
  misc_feature: MA Experiment 20001555 PARAMETER Experiment Name: At_Drought_Soil_Dry_P Parameter: Treatment Value: Drought vs. No Drought
aaaaaaggcttctctgtgttgttctctgtggtcattcttctttcttttcacttcttcttcttcttcgctcttcttctcactgtcgggttccatttggcgcgaaaagttcttcactttttccagcttttttttgttctctgacagtttttttttttgtttggttacaaataaagatgccagtaagtgtggcactagttttgctgttgacattgagcagtgtgattctgattaatgggagaagttacggcgtcggaaacatatgcgatcgtggtcggagaccgagcgagagaccacacagtgtcaaaatcactgattttggtgctgtgggagatgggaaaacgttgaacacacttgcgtttcaaaatgctgtcttttatctaaagtctttcgctgataaaggtggtgctcagctttatgttcctccgggacggtggctcaccggaagtttcaacctcaccagtcatctcactctctttctcgagaaagacgccgtcatacttgcctcacaggatccatcgcattggcaagtcacggatgccttaccgtcatatgggcggggtattgatctaccagggaagagatacatgagtttgataaacggtgacatgctacatgatgtagtagtaacaggtgataacggtaccatagatgggcaaggccttgtttggtgggatcggtttaattctcattctttagagtacagtcgccctcaccttgtcgagtttgtctctgccgaaaatgtcattgtatcaaatcttacattcttgaacgctccggcttatactatccattcagtttattgtcgcaatttatacattcatagagtaacggctaatacttgtccagaatctccttataccatcggtattgtcccagattcttctgaaaatgtgtgtatccaagaatctagtatcaacatggggtatgatgccatttctcttaaaagtggttgtgatgaatacggtttatcgtatgcaagacctactgctaatgtccagataagaaatgtttaccttagagcagcttctggttcctccatttcctttggtagtgaaatgtctggtggtatatctgatgttgaggtcagtgatgctcacatacacaactcgttatccgggattgcctttagaacaacaaatggaagaggtggttatattaaggagattgatatttccaacatccatatggttaatgttggtactgcatttctagccaacggtagcttcggtactcatccggattctggtttcgatgaaaatgcttacccgcttgtgagtcacatcaggttacatgacattgttggagaaaacataagcactgctggatatttctttggaacgaaagagtctcctttcacttcgattttgttatcgaatatctctctgtcgattaaaaactcggcttcccctgctgattcttggcaatgctcatatgttgacgggtcttcggaattcgtagtccctgaaccgtgccttgagctgaagagttttgatagttactatggtagagctgaggccttatgaaaccaaacttcattaggaatgatgattcatatttgtttaagagagagcaaatggttctgattcttttcttttccccaaaaataaaccacagtgtgtagaattattacctgttccttgttggtgttgttgtccctgttatttgcagcttgtgagattaatatatcttgtacaggttcatttctt

SEQ ID NO: 71957 - protein, 506 aa, Arabidopsis thaliana
  peptide (1)..(506): Ceres Seq. ID no. 4907602
  misc_feature (132)..(490): Pfam Name: Glycosyl hydrolases family 28 Pfam Description: Glycosyl hydrolases family 28
  misc_feature (58)..(506): Homolog of NCBI NO: 22327662 NR Description: Expressed protein; protein id: At5g49215.1, by cDNA: gi_20258820 [Arabidopsis thaliana] unknown protein [Arabidopsis thaliana]
  misc_feature (60)..(503): Homolog of NCBI NO: 30679999 NR Description: polygalacturonase, putative [Arabidopsis >gi|20260262|gb|AAM13029.1| unknown protein [Arabidopsis >gi|22136514|gb|AAM91335.1| unknown protein [Arabidopsis
  misc_feature (128)..(503): Homolog of NCBI NO: 21593399 NR Description: polygalacturonase-like protein [Arabidopsis
  misc_feature (128)..(503): Homolog of NCBI NO: 18397713 NR Description: polygalacturonase, putative; protein id: supported by cDNA: 38575. [Arabidopsis thaliana]
  misc_feature (56)..(498): Homolog of NCBI NO: 15228881 NR Description: polygalacturonase, putative; protein id: supported by cDNA: 17203., supported by cDNA: gi_14334801, by cDNA: gi_21280834 [Arabidopsis thaliana]
  misc_feature (60)..(498): Homolog of NCBI NO: 7939578 NR Description: polygalacturonase-like protein [Arabidopsis
  misc_feature (58)..(498): Homolog of NCBI NO: 21553827 NR Description: polygalacturonase, putative [Arabidopsis thaliana]
  misc_feature (96)..(495): Homolog of NCBI NO: 40714685 NR Description: putative polygalacturonase [Oryza sativa
  misc_feature (66)..(494): Homolog of NCBI NO: 18412253 NR Description: polygalacturonase, putative; protein id: supported by cDNA: gi_13358184 [Arabidopsis thaliana] AT3g62110 [Arabidopsis thaliana] >gi|23397166|gb|AAN31866.1|
  misc_feature (66)..(494): Homolog of NCBI NO: 11263971 NR Description: hypothetical protein T17J13.70 - Arabidopsis >gi|6899921|emb|CAB71871.1| putative protein [Arabidopsis
KRLLCVVLCGHSSFFSLLLLLRSSSHCRVPFGAKSSSLFPAFFCSLTVFFFVWLQIKMPVSVALVLLLTLSSVILINGRSYGVGNICDRGRRPSERPHSVKITDFGAVGDGKTLNTLAFQNAVFYLKSFADKGGAQLYVPPGRWLTGSFNLTSHLTLFLEKDAVILASQDPSHWQVTDALPSYGRGIDLPGKRYMSLINGDMLHDVVVTGDNGTIDGQGLVWWDRFNSHSLEYSRPHLVEFVSAENVIVSNLTFLNAPAYTIHSVYCRNLYIHRVTANTCPESPYTIGIVPDSSENVCIQESSINMGYDAISLKSGCDEYGLSYARPTANVQIRNVYLRAASGSSISFGSEMSGGISDVEVSDAHIHNSLSGIAFRTTNGRGGYIKEIDISNIHMVNVGTAFLANGSFGTHPDSGFDENAYPLVSHIRLHDIVGENISTAGYFFGTKESPFTSILLSNISLSIKNSASPADSWQCSYVDGSSEFVVPEPCLELKSFDSYYGRAEAL

SEQ ID NO: 71958 - protein, 449 aa, Arabidopsis thaliana; identical to SEQ ID NO: 39155
  peptide (1)..(449): Ceres Seq. ID no. 4907603
  misc_feature (75)..(433): Pfam Name: Glycosyl hydrolases family 28 Pfam Description: Glycosyl hydrolases family 28
  misc_feature (1)..(449): Homolog of NCBI NO: 22327662 NR Description: Expressed protein; protein id: At5g49215.1, by cDNA: gi_20258820 [Arabidopsis thaliana] unknown protein [Arabidopsis thaliana]
  misc_feature (3)..(446): Homolog of NCBI NO: 30679999 NR Description: polygalacturonase, putative [Arabidopsis >gi|20260262|gb|AAM13029.1| unknown protein [Arabidopsis >gi|22136514|gb|AAM91335.1| unknown protein [Arabidopsis
  misc_feature (71)..(446): Homolog of NCBI NO: 21593399 NR Description: polygalacturonase-like protein [Arabidopsis
  misc_feature (71)..(446): Homolog of NCBI NO: 18397713 NR Description: polygalacturonase, putative; protein id: supported by cDNA: 38575. [Arabidopsis thaliana]
  misc_feature (1)..(441): Homolog of NCBI NO: 15228881 NR Description: polygalacturonase, putative; protein id: supported by cDNA: 17203., supported by cDNA: gi_14334801, by cDNA: gi_21280834 [Arabidopsis thaliana]
  misc_feature (3)..(441): Homolog of NCBI NO: 7939578 NR Description: polygalacturonase-like protein [Arabidopsis
  misc_feature (1)..(441): Homolog of NCBI NO: 21553827 NR Description: polygalacturonase, putative [Arabidopsis thaliana]
  misc_feature (39)..(438): Homolog of NCBI NO: 40714685 NR Description: putative polygalacturonase [Oryza sativa
  misc_feature (9)..(437): Homolog of NCBI NO: 18412253 NR Description: polygalacturonase, putative; protein id: supported by cDNA: gi_13358184 [Arabidopsis thaliana] AT3g62110 [Arabidopsis thaliana] >gi|23397166|gb|AAN31866.1|
  misc_feature (9)..(437): Homolog of NCBI NO: 11263971 NR Description: hypothetical protein T17J13.70 - Arabidopsis >gi|6899921|emb|CAB71871.1| putative protein [Arabidopsis

SEQ ID NO: 71959 - protein, 312 aa, Arabidopsis thaliana; identical to SEQ ID NO: 39156
  peptide (1)..(312): Ceres Seq. ID no. 4907604
  misc_feature (1)..(296): Pfam Name: Glycosyl hydrolases family 28 Pfam Description: Glycosyl hydrolases family 28
  misc_feature (1)..(312): Homolog of NCBI NO: 22327662 NR Description: Expressed protein; protein id: At5g49215.1, by cDNA: gi_20258820 [Arabidopsis thaliana] unknown protein [Arabidopsis thaliana]
  misc_feature (1)..(309): Homolog of NCBI NO: 30679999 NR Description: polygalacturonase, putative [Arabidopsis >gi|20260262|gb|AAM13029.1| unknown protein [Arabidopsis >gi|22136514|gb|AAM91335.1| unknown protein [Arabidopsis
  misc_feature (1)..(309): Homolog of NCBI NO: 21593399 NR Description: polygalacturonase-like protein [Arabidopsis
  misc_feature (1)..(309): Homolog of NCBI NO: 18397713 NR Description: polygalacturonase, putative; protein id: supported by cDNA: 38575. [Arabidopsis thaliana]
  misc_feature (1)..(304): Homolog of NCBI NO: 15228881 NR Description: polygalacturonase, putative; protein id: supported by cDNA: 17203., supported by cDNA: gi_14334801, by cDNA: gi_21280834 [Arabidopsis thaliana]
  misc_feature (1)..(304): Homolog of NCBI NO: 7939578 NR Description: polygalacturonase-like protein [Arabidopsis
  misc_feature (1)..(304): Homolog of NCBI NO: 21553827 NR Description: polygalacturonase, putative [Arabidopsis thaliana]
  misc_feature (1)..(301): Homolog of NCBI NO: 40714685 NR Description: putative polygalacturonase [Oryza sativa
  misc_feature (1)..(300): Homolog of NCBI NO: 18412253 NR Description: polygalacturonase, putative; protein id: supported by cDNA: gi_13358184 [Arabidopsis thaliana] AT3g62110 [Arabidopsis thaliana] >gi|23397166|gb|AAN31866.1|
  misc_feature (1)..(300): Homolog of NCBI NO: 11263971 NR Description: hypothetical protein T17J13.70 - Arabidopsis >gi|6899921|emb|CAB71871.1| putative protein [Arabidopsis

SEQ ID NO: 71960 - DNA, 725 bp, Arabidopsis thaliana
  misc_feature (1)..(725): Ceres Seq. ID no. 4907605
  misc_feature: MA Experiment ID: 108434 Result: Down-regulated in Transcription
  misc_feature: MA Experiment 108434 PARAMETER Experiment Name: At_Root_Tips_cDNA_P Parameter: Tissue Value: Root Tips
  misc_feature: MA Experiment ID: 108463 Result: Up-regulated in Transcription
  misc_feature: MA Experiment 108463 PARAMETER Experiment Name: At_Germinating_Seeds_cDNA_P Parameter: Age (day) Value: 3 vs. 0
  misc_feature: MA Experiment 108463 PARAMETER Experiment Name: At_Germinating_Seeds_cDNA_P Parameter: Tissue Value: Germinating Seeds
  misc_feature: MA Experiment ID: 108464 Result: Up-regulated in Transcription
  misc_feature: MA Experiment 108464 PARAMETER Experiment Name: At_Germinating_Seeds_cDNA_P Parameter: Age (day) Value: 4 vs. 0
  misc_feature: MA Experiment 108464 PARAMETER Experiment Name: At_Germinating_Seeds_cDNA_P Parameter: Tissue Value: Germinating Seeds
  misc_feature: MA Experiment ID: 108488 Result: Down-regulated in Transcription
  misc_feature: MA Experiment ID: 108561 Result: Down-regulated in Transcription
  misc_feature: MA Experiment 108561 PARAMETER Experiment Name: At_100uM_ABA_cDNA_P Parameter: Timepoint (hr) Value: 6
  misc_feature: MA Experiment 108561 PARAMETER Experiment Name: At_100uM_ABA_cDNA_P Parameter: Tissue Value: Aerial
  misc_feature: MA Experiment 108561 PARAMETER Experiment Name: At_100uM_ABA_cDNA_P Parameter: Treatment Value: 100uM ABA vs. No Treatment
  misc_feature: MA Experiment ID: 108569 Result: Down-regulated in Transcription
  misc_feature: MA Experiment 108569 PARAMETER Experiment Name: At_0.001%_MeJA__cDNA_P Parameter: Timepoint (hr) Value: 6
  misc_feature: MA Experiment 108569 PARAMETER Experiment Name: At_0.001%_MeJA__cDNA_P Parameter: Tissue Value: Aerial
  misc_feature: MA Experiment 108569 PARAMETER Experiment Name: At_0.001%_MeJA__cDNA_P Parameter: Treatment Value: 0.001% MeJA vs. No Treatment
  misc_feature: MA Experiment ID: 108579 Result: Up-regulated in Transcription
  misc_feature: MA Experiment 108579 PARAMETER Experiment Name: At_4deg_Cold_cDNA_P Parameter: Temperature (deg C) Value: 4 vs. 22
  misc_feature: MA Experiment 108579 PARAMETER Experiment Name: At_4deg_Cold_cDNA_P Parameter: Timepoint (hr) Value: 6
  misc_feature: MA Experiment 108579 PARAMETER Experiment Name: At_4deg_Cold_cDNA_P Parameter: Tissue Value: Aerial
  misc_feature: MA Experiment ID: 108585 Result: Up-regulated in Transcription
  misc_feature: MA Experiment 108585 PARAMETER Experiment Name: At_5mM_NaNP_cDNA_P Parameter: Timepoint (hr) Value: 6
  misc_feature: MA Experiment 108585 PARAMETER Experiment Name: At_5mM_NaNP_cDNA_P Parameter: Tissue Value: Aerial
  misc_feature: MA Experiment 108585 PARAMETER Experiment Name: At_5mM_NaNP_cDNA_P Parameter: Treatment Value: null
  misc_feature: MA Experiment ID: 108595 Result: Up-regulated in Transcription
  misc_feature: MA Experiment 108595 PARAMETER Experiment Name: At_Ler-pi_Ovule_cDNA_P Parameter: Plant Line Value: null
  misc_feature: MA Experiment ID: 108607 Result: Down-regulated in Transcription
  misc_feature: MA Experiment 108607 PARAMETER Experiment Name: At_100uM_ABA_cDNA_P Parameter: Timepoint (hr) Value: 4
  misc_feature: MA Experiment 108607 PARAMETER Experiment Name: At_100uM_ABA_cDNA_P Parameter: Tissue Value: Aerial
  misc_feature: MA Experiment 108607 PARAMETER Experiment Name: At_100uM_ABA_cDNA_P Parameter: Treatment Value: 100uM ABA vs. No Treatment
  misc_feature: MA Experiment ID: 20000070 Result: Down-regulated in Transcription
  misc_feature: MA Experiment 20000070 PARAMETER Experiment Name: At_100uM_ABA_Mutants_cDNA_P Parameter: Plant Line Value: CS24
  misc_feature: MA Experiment 20000070 PARAMETER Experiment Name: At_100uM_ABA_Mutants_cDNA_P Parameter: Timepoint (hr) Value: 6
  misc_feature: MA Experiment 20000070 PARAMETER Experiment Name: At_100uM_ABA_Mutants_cDNA_P Parameter: Tissue Value: Aerial
  misc_feature: MA Experiment 20000070 PARAMETER Experiment Name: At_100uM_ABA_Mutants_cDNA_P Parameter: Treatment Value: 100uM ABA vs. No Treatment
  misc_feature: MA Experiment ID: 20000071 Result: Down-regulated in Transcription
  misc_feature: MA Experiment 20000071 PARAMETER Experiment Name: At_100uM_ABA_Mutants_cDNA_P Parameter: Plant Line Value: CS8104
  misc_feature: MA Experiment 20000071 PARAMETER Experiment Name: At_100uM_ABA_Mutants_cDNA_P Parameter: Timepoint (hr) Value: 6
  misc_feature: MA Experiment 20000071 PARAMETER Experiment Name: At_100uM_ABA_Mutants_cDNA_P Parameter: Tissue Value: Aerial
  misc_feature: MA Experiment 20000071 PARAMETER Experiment Name: At_100uM_ABA_Mutants_cDNA_P Parameter: Treatment Value: 100uM ABA vs. No Treatment
  misc_feature: MA Experiment ID: 20000087 Result: Down-regulated in Transcription
  misc_feature: MA Experiment 20000087 PARAMETER Experiment Name: At_100uM_ABA_Mutants_cDNA_P Parameter: Plant Line Value: WS
  misc_feature: MA Experiment 20000087 PARAMETER Experiment Name: At_100uM_ABA_Mutants_cDNA_P Parameter: Timepoint (hr) Value: 6
  misc_feature: MA Experiment 20000087 PARAMETER Experiment Name: At_100uM_ABA_Mutants_cDNA_P Parameter: Tissue Value: Aerial
  misc_feature: MA Experiment 20000087 PARAMETER Experiment Name: At_100uM_ABA_Mutants_cDNA_P Parameter: Treatment Value: 100uM ABA vs. No Treatment
  misc_feature: MA Experiment ID: 20000089 Result: Down-regulated in Transcription
  misc_feature: MA Experiment ID: 20000113 Result: Up-regulated in Transcription
  misc_feature: MA Experiment 20000113 PARAMETER Experiment Name: At_42deg_Heat_cDNA_P Parameter: Temperature (deg C) Value: 42 vs. 22
  misc_feature: MA Experiment 20000113 PARAMETER Experiment Name: At_42deg_Heat_cDNA_P Parameter: Timepoint (hr) Value: 8
  misc_feature: MA Experiment 20000113 PARAMETER Experiment Name: At_42deg_Heat_cDNA_P Parameter: Tissue Value: Aerial
  misc_feature: MA Experiment ID: 20000117 Result: Down-regulated in Transcription
  misc_feature: MA Experiment 20000117 PARAMETER Experiment Name: At_100uM_ABA_Mutants_cDNA_P Parameter: Plant Line Value: Columbia
  misc_feature: MA Experiment 20000117 PARAMETER Experiment Name: At_100uM_ABA_Mutants_cDNA_P Parameter: Timepoint (hr) Value: 6
  misc_feature: MA Experiment 20000117 PARAMETER Experiment Name: At_100uM_ABA_Mutants_cDNA_P Parameter: Tissue Value: Aerial
  misc_feature: MA Experiment 20000117 PARAMETER Experiment Name: At_100uM_ABA_Mutants_cDNA_P Parameter: Treatment Value: 100uM ABA vs. No Treatment
  misc_feature: MA Experiment ID: 20000185 Result: Down-regulated in Transcription
  misc_feature: MA Experiment 20000185 PARAMETER Experiment Name: At_Roots__P Parameter: Age (day) Value: 7 vs. 21
  misc_feature: MA Experiment 20000185 PARAMETER Experiment Name: At_Roots__P Parameter: Organism Value: A. thaliana
  misc_feature: MA Experiment 20000185 PARAMETER Experiment Name: At_Roots__P Parameter: Tissue Value: Roots vs. Whole Plant
  misc_feature: MA Experiment ID: 20000234 Result: Down-regulated in Transcription
  misc_feature: MA Experiment 20000234 PARAMETER Experiment Name: At_Siliques_P Parameter: Age (day) Value: 21
  misc_feature: MA Experiment 20000234 PARAMETER Experiment Name: At_Siliques_P Parameter: Organism Value: A. thaliana
  misc_feature: MA Experiment 20000234 PARAMETER Experiment Name: At_Siliques_P Parameter: Plant Line Value: WS
  misc_feature: MA Experiment 20000234 PARAMETER Experiment Name: At_Siliques_P Parameter: Tissue Value: Less Than 5mm Siliques vs. Whole Plant
  misc_feature: MA Experiment ID: 20000264 Result: Down-regulated in Transcription
  misc_feature: MA Experiment 20000264 PARAMETER Experiment Name: At_Open_Flower_P Parameter: Age (day) Value: 21
  misc_feature: MA Experiment 20000264 PARAMETER Experiment Name: At_Open_Flower_P Parameter: Plant Line Value: WS
  misc_feature: MA Experiment 20000264 PARAMETER Experiment Name: At_Open_Flower_P Parameter: Tissue Value: Open Flower vs. Whole Plant
  misc_feature: MA Experiment ID: 20000265 Result: Down-regulated in Transcription
  misc_feature: MA Experiment 20000265 PARAMETER Experiment Name: At_Open_Flower_P Parameter: Age (day) Value: 21
  misc_feature: MA Experiment 20000265 PARAMETER Experiment Name: At_Open_Flower_P Parameter: Plant Line Value: WS
  misc_feature: MA Experiment 20000265 PARAMETER Experiment Name: At_Open_Flower_P Parameter: Tissue Value: Closed Flower vs. Whole Plant
  misc_feature: MA Experiment ID: 20000268 Result: Down-regulated in Transcription
  misc_feature: MA Experiment 20000268 PARAMETER Experiment Name: At_100mM_NaCl__P Parameter: Age (day) Value: 14
  misc_feature: MA Experiment 20000268 PARAMETER Experiment Name: At_100mM_NaCl__P Parameter: Organism Value: A. thaliana
  misc_feature: MA Experiment 20000268 PARAMETER Experiment Name: At_100mM_NaCl__P Parameter: Plant Line Value: WS
  misc_feature: MA Experiment 20000268 PARAMETER Experiment Name: At_100mM_NaCl__P Parameter: Timepoint (hr) Value: 6
  misc_feature: MA Experiment 20000268 PARAMETER Experiment Name: At_100mM_NaCl__P Parameter: Tissue Value: Whole Plant
  misc_feature: MA Experiment 20000268 PARAMETER Experiment Name: At_100mM_NaCl__P Parameter: Treatment Value: 100mM NaCl vs. No Treatment
  misc_feature: MA Experiment ID: 20000286 Result: Down-regulated in Transcription
  misc_feature: MA Experiment 20000286 PARAMETER Experiment Name: At_Open_Flower_P Parameter: Age (day) Value: 21
  misc_feature: MA Experiment 20000286 PARAMETER Experiment Name: At_Open_Flower_P Parameter: Plant Line Value: WS
  misc_feature: MA Experiment 20000286 PARAMETER Experiment Name: At_Open_Flower_P Parameter: Tissue Value: Half Open vs. Whole Plant
  misc_feature: MA Experiment ID: 20000439 Result: Down-regulated in Transcription
  misc_feature: MA Experiment 20000439 PARAMETER Experiment Name: At_Roots__P Parameter: Age (day) Value: 14 vs. 21
  misc_feature: MA Experiment 20000439 PARAMETER Experiment Name: At_Roots__P Parameter: Organism Value: A. thaliana
  misc_feature: MA Experiment 20000439 PARAMETER Experiment Name: At_Roots__P Parameter: Tissue Value: Roots vs. Whole Plant
  misc_feature: MA Experiment ID: 20000460 Result: Up-regulated in Transcription
  misc_feature: MA Experiment 20000460 PARAMETER Experiment Name: At_10percent_PEG_P Parameter: Age (day) Value: 12
  misc_feature: MA Experiment 20000460 PARAMETER Experiment Name: At_10percent_PEG_P Parameter: Organism Value: A. thaliana
  misc_feature: MA Experiment 20000460 PARAMETER Experiment Name: At_10percent_PEG_P Parameter: Plant Line Value: WS
  misc_feature: MA Experiment 20000460 PARAMETER Experiment Name: At_10percent_PEG_P Parameter: Timepoint (day) Value: 12
  misc_feature: MA Experiment 20000460 PARAMETER Experiment Name: At_10percent_PEG_P Parameter: Tissue Value: Whole Plant
  misc_feature: MA Experiment 20000460 PARAMETER Experiment Name: At_10percent_PEG_P Parameter: Treatment Value: 10percent PEG vs. No Treatment
  misc_feature: MA Experiment ID: 20000527 Result: Up-regulated in Transcription
  misc_feature: MA Experiment 20000527 PARAMETER Experiment Name: At_10percent_PEG_P Parameter: Age (day) Value: 20
  misc_feature: MA Experiment 20000527 PARAMETER Experiment Name: At_10percent_PEG_P Parameter: Organism Value: A. thaliana
  misc_feature: MA Experiment 20000527 PARAMETER Experiment Name: At_10percent_PEG_P Parameter: Plant Line Value: WS
  misc_feature: MA Experiment 20000527 PARAMETER Experiment Name: At_10percent_PEG_P Parameter: Timepoint (day) Value: 20
  misc_feature: MA Experiment 20000527 PARAMETER Experiment Name: At_10percent_PEG_P Parameter: Tissue Value: Whole Plant
  misc_feature: MA Experiment 20000527 PARAMETER Experiment Name: At_10percent_PEG_P Parameter: Treatment Value: 10percent PEG vs. No Treatment
  misc_feature: MA Experiment ID: 20000573 Result: Down-regulated in Transcription
  misc_feature: MA Experiment 20000573 PARAMETER Experiment Name: At_100uM_ABA_Mutants__P Parameter: Organism Value: A. thaliana
  misc_feature: MA Experiment 20000573 PARAMETER Experiment Name: At_100uM_ABA_Mutants__P Parameter: Plant Line Value: CS22 vs. Ler wt
  misc_feature: MA Experiment 20000573 PARAMETER Experiment Name: At_100uM_ABA_Mutants__P Parameter: Timepoint (hr) Value: N/A
  misc_feature: MA Experiment 20000573 PARAMETER Experiment Name: At_100uM_ABA_Mutants__P Parameter: Tissue Value: Whole Plant
  misc_feature: MA Experiment 20000573 PARAMETER Experiment Name: At_100uM_ABA_Mutants__P Parameter: Treatment Value: None
  misc_feature: MA Experiment ID: 20000574 Result: Down-regulated in Transcription
  misc_feature: MA Experiment 20000574 PARAMETER Experiment Name: At_100uM_ABA_Mutants__P Parameter: Organism Value: A. thaliana
  misc_feature: MA Experiment 20000574 PARAMETER Experiment Name: At_100uM_ABA_Mutants__P Parameter: Plant Line Value: CS23 vs. Ler wt
  misc_feature: MA Experiment 20000574 PARAMETER Experiment Name: At_100uM_ABA_Mutants__P Parameter: Timepoint (hr) Value: N/A
  misc_feature: MA Experiment 20000574 PARAMETER Experiment Name: At_100uM_ABA_Mutants__P Parameter: Tissue Value: Whole Plant
  misc_feature: MA Experiment 20000574 PARAMETER Experiment Name: At_100uM_ABA_Mutants__P Parameter: Treatment Value: None
  misc_feature: MA Experiment ID: 20000794 Result: Down-regulated in Transcription
  misc_feature: MA Experiment 20000794 PARAMETER Experiment Name: At_Petals_P Parameter: Age (day) Value: 23-25 days
  misc_feature: MA Experiment 20000794 PARAMETER Experiment Name: At_Petals_P Parameter: Plant Line Value: WS
  misc_feature: MA Experiment 20000794 PARAMETER Experiment Name: At_Petals_P Parameter: Tissue Value: Petals vs. Whole plant
  misc_feature: MA Experiment ID: 20001247 Result: Up-regulated in Transcription
  misc_feature: MA Experiment 20001247 PARAMETER Experiment Name: At_Far-red-induction_P Parameter: Age (day) Value: 7
  misc_feature: MA Experiment 20001247 PARAMETER Experiment Name: At_Far-red-induction_P Parameter: Light Value: Far-red vs. White
  misc_feature: MA Experiment 20001247 PARAMETER Experiment Name: At_Far-red-induction_P Parameter: Organism Value: A. thaliana
  misc_feature: MA Experiment 20001247 PARAMETER Experiment Name: At_Far-red-induction_P Parameter: Plant Line Value: Columbia
  misc_feature: MA Experiment 20001247 PARAMETER Experiment Name: At_Far-red-induction_P Parameter: Timepoint (hr) Value: 1
  misc_feature: MA Experiment 20001247 PARAMETER Experiment Name: At_Far-red-induction_P Parameter: Tissue Value: Whole Plant
  misc_feature: MA Experiment ID: 20001248 Result: Down-regulated in Transcription
  misc_feature: MA Experiment 20001248 PARAMETER Experiment Name: At_Far-red-induction_P Parameter: Age (day) Value: 7
  misc_feature: MA Experiment 20001248 PARAMETER Experiment Name: At_Far-red-induction_P Parameter: Light Value: Far-red vs. White
  misc_feature: MA Experiment 20001248 PARAMETER Experiment Name: At_Far-red-induction_P Parameter: Organism Value: A. thaliana
  misc_feature: MA Experiment 20001248 PARAMETER Experiment Name: At_Far-red-induction_P Parameter: Plant Line Value: Columbia
  misc_feature: MA Experiment 20001248 PARAMETER Experiment Name: At_Far-red-induction_P Parameter: Timepoint (hr) Value: 4
  misc_feature: MA Experiment 20001248 PARAMETER Experiment Name: At_Far-red-induction_P Parameter: Tissue Value: Whole Plant
  misc_feature: MA Experiment ID: 20001557 Result: Up-regulated in Transcription
  misc_feature: MA Experiment 20001557 PARAMETER Experiment Name: At_Drought_Soil_Dry_P Parameter: Age (day) Value: 27
  misc_feature: MA Experiment 20001557 PARAMETER Experiment Name: At_Drought_Soil_Dry_P Parameter: Organism Value: A. thaliana
  misc_feature: MA Experiment 20001557 PARAMETER Experiment Name: At_Drought_Soil_Dry_P Parameter: Plant Line Value: WS
  misc_feature: MA Experiment 20001557 PARAMETER Experiment Name: At_Drought_Soil_Dry_P Parameter: Post Timepoint (hr) Value: 3
  misc_feature: MA Experiment 20001557 PARAMETER Experiment Name: At_Drought_Soil_Dry_P Parameter: Post-Treatment Value: Re-Water vs. No Drought
  misc_feature: MA Experiment 20001557 PARAMETER Experiment Name: At_Drought_Soil_Dry_P Parameter: Timepoint (day) Value: 13
  misc_feature: MA Experiment 20001557 PARAMETER Experiment Name: At_Drought_Soil_Dry_P Parameter: Treatment Value: Drought vs. No Drought
  misc_feature: MA Experiment ID: 20001558 Result: Up-regulated in Transcription
  misc_feature: MA Experiment 20001558 PARAMETER Experiment Name: At_Drought_Soil_Dry_P Parameter: Age (day) Value: 27
  misc_feature: MA Experiment 20001558 PARAMETER Experiment Name: At_Drought_Soil_Dry_P Parameter: Organism Value: A. thaliana
  misc_feature: MA Experiment 20001558 PARAMETER Experiment Name: At_Drought_Soil_Dry_P Parameter: Plant Line Value: WS
  misc_feature: MA Experiment 20001558 PARAMETER Experiment Name: At_Drought_Soil_Dry_P Parameter: Post Timepoint (hr) Value: 6
  misc_feature: MA Experiment 20001558 PARAMETER Experiment Name: At_Drought_Soil_Dry_P Parameter: Post-Treatment Value: Re-Water vs. No Drought
  misc_feature: MA Experiment 20001558 PARAMETER Experiment Name: At_Drought_Soil_Dry_P Parameter: Timepoint (day) Value: 13
  misc_feature: MA Experiment 20001558 PARAMETER Experiment Name: At_Drought_Soil_Dry_P Parameter: Treatment Value: Drought vs. No Drought
  misc_feature: MA Experiment ID: 20001560 Result: Up-regulated in Transcription
  misc_feature: MA Experiment 20001560 PARAMETER Experiment Name: At_Drought_Soil_Dry_P Parameter: Age (day) Value: 28
  misc_feature: MA Experiment 20001560 PARAMETER Experiment Name: At_Drought_Soil_Dry_P Parameter: Organism Value: A. thaliana
  misc_feature: MA Experiment 20001560 PARAMETER Experiment Name: At_Drought_Soil_Dry_P Parameter: Plant Line Value: WS
  misc_feature: MA Experiment 20001560 PARAMETER Experiment Name: At_Drought_Soil_Dry_P Parameter: Post Timepoint (hr) Value: None
  misc_feature: MA Experiment 20001560 PARAMETER Experiment Name: At_Drought_Soil_Dry_P Parameter: Post-Treatment Value: None
  misc_feature: MA Experiment 20001560 PARAMETER Experiment Name: At_Drought_Soil_Dry_P Parameter: Timepoint (day) Value: 14
  misc_feature: MA Experiment 20001560 PARAMETER Experiment Name: At_Drought_Soil_Dry_P Parameter: Treatment Value: Drought vs. No Drought
acactactctaaccgttttttttcttctctcaaatctcaaaatctcaatttcttcaacaatgtcatcgaagaacggagttgttcgtagctgtttaggatcaatggacgacatcaaaaaagtcttccaacgattcgacaaaaacggcgacgggaaaatctccgtcgacgagctcaaagaagtgatccgcgctctctcaccaacagcatcaccagaagaaacagtaacgatgatgaaacaattcgatctagacggtaacggattcatagatctggacgaattcgtcgcgcttttccaaatcggaatcggaggaggaggtaacaatcgaaacgacgtaagcgatttgaaagaagcgtttgagttatatgatttggatggtaatggaaggatctcggcgaaagagcttcattcagtgatgaagaatttgggtgagaagtgctctgtgcaagattgtaagaagatgattagtaaagttgatattgatggtgatggttgtgttaattttgatgagtttaagaagatgatgagtaatggtggtggtgcttgaggatttggaagatttcgccggagattagattagtcgacggtgatgattcgtattagcagattaattttagtgacggcgattaaaaaccctagaagtatgtggtgattgatgaatattgattttaacggttgtttctatatcttctgctctttttataattaatatgctttgttgagtgtt

SEQ ID NO: 71961 - protein, 180 aa, Arabidopsis thaliana
  peptide (1)..(180): Ceres Seq. ID no. 4907606
  misc_feature (149)..(177): Pfam Name: EF hand Pfam Description: EF hand
  misc_feature (20)..(180): Homolog of NCBI NO: 15240340 NR Description: CALMODULIN-RELATED PROTEIN 2, TOUCH-INDUCED protein id: At5g37770.1, supported by cDNA: 25475. [Arabidopsis
  misc_feature (22)..(180): Homolog of NCBI NO: 21618074 NR Description: calmodulin-related protein [Arabidopsis thaliana]
  misc_feature (22)..(180): Homolog of NCBI NO: 18408502 NR Description: calmodulin-related protein; protein id: supported by cDNA: 95959., supported by cDNA: gi_17380757
  misc_feature (34)..(176): Homolog of NCBI NO: 14589311 NR Description: calcium binding protein [Sesbania rostrata]
  misc_feature (39)..(175): Homolog of NCBI NO: 13397927 NR Description: putative calmodulin-related protein [Medicago
  misc_feature (9)..(180): Homolog of NCBI NO: 34895640 NR Description: OSJNBa0083M16.33 [Oryza sativa (japonica
  misc_feature (37)..(175): Homolog of NCBI NO: 15237969 NR Description: calmodulin-like protein; protein id: At5g17470.1
  misc_feature (35)..(179): Homolog of NCBI NO: 6901654 NR Description: calcium-binding protein [Olea europaea]
  misc_feature (35)..(179): Homolog of NCBI NO: 14423648 NR Description: Calcium-binding allergen Ole e 8 (PCA18/PCA23)
  misc_feature (10)..(177): Homolog of NCBI NO: 15221781 NR Description: putative calmodulin; protein id: At1g24620.1
TTLTVFFLLSNLKISISSTMSSKNGVVRSCLGSMDDIKKVFQRFDKNGDGKISVDELKEVIRALSPTASPEETVTMMKQFDLDGNGFIDLDEFVALFQIGIGGGGNNRNDVSDLKEAFELYDLDGNGRISAKELHSVMKNLGEKCSVQDCKKMISKVDIDGDGCVNFDEFKKMMSNGGGA

SEQ ID NO: 71962 - protein, 161 aa, Arabidopsis thaliana; identical to SEQ ID NO: 35900
  peptide (1)..(161): Ceres Seq. ID no. 4907607
  misc_feature (130)..(158): Pfam Name: EF hand Pfam Description: EF hand
  misc_feature (1)..(161): Homolog of NCBI NO: 15240340 NR Description: CALMODULIN-RELATED PROTEIN 2, TOUCH-INDUCED protein id: At5g37770.1, supported by cDNA: 25475. [Arabidopsis
  misc_feature (3)..(161): Homolog of NCBI NO: 21618074 NR Description: calmodulin-related protein [Arabidopsis thaliana]
  misc_feature (3)..(161): Homolog of NCBI NO: 18408502 NR Description: calmodulin-related protein; protein id: supported by cDNA: 95959., supported by cDNA: gi_17380757
  misc_feature (15)..(157): Homolog of NCBI NO: 14589311 NR Description: calcium binding protein [Sesbania rostrata]
  misc_feature (20)..(156): Homolog of NCBI NO: 13397927 NR Description: putative calmodulin-related protein [Medicago
  misc_feature (1)..(161): Homolog of NCBI NO: 34895640 NR Description: OSJNBa0083M16.33 [Oryza sativa (japonica
  misc_feature (18)..(156): Homolog of NCBI NO: 15237969 NR Description: calmodulin-like protein; protein id: At5g17470.1
  misc_feature (16)..(160): Homolog of NCBI NO: 6901654 NR Description: calcium-binding protein [Olea europaea]
  misc_feature (16)..(160): Homolog of NCBI NO: 14423648 NR Description: Calcium-binding allergen Ole e 8 (PCA18/PCA23)
  misc_feature (1)..(158): Homolog of NCBI NO: 15221781 NR Description: putative calmodulin; protein id: At1g24620.1

SEQ ID NO: 71963 - protein, 147 aa, Arabidopsis thaliana; identical to SEQ ID NO: 35901
  peptide (1)..(147): Ceres Seq. ID no. 4907608
  misc_feature (116)..(144): Pfam Name: EF hand Pfam Description: EF hand
  misc_feature (1)..(147): Homolog of NCBI NO: 15240340 NR Description: CALMODULIN-RELATED PROTEIN 2, TOUCH-INDUCED protein id: At5g37770.1, supported by cDNA: 25475. [Arabidopsis
  misc_feature (1)..(147): Homolog of NCBI NO: 21618074 NR Description: calmodulin-related protein [Arabidopsis thaliana]
  misc_feature (1)..(147): Homolog of NCBI NO: 18408502 NR Description: calmodulin-related protein; protein id: supported by cDNA: 95959., supported by cDNA: gi_17380757
  misc_feature (1)..(143): Homolog of NCBI NO: 14589311 NR Description: calcium binding protein [Sesbania rostrata]
  misc_feature (6)..(142): Homolog of NCBI NO: 13397927 NR Description: putative calmodulin-related protein [Medicago
  misc_feature (1)..(147): Homolog of NCBI NO: 34895640 NR Description: OSJNBa0083M16.33 [Oryza sativa (japonica
  misc_feature (4)..(142): Homolog of NCBI NO: 15237969 NR Description: calmodulin-like protein; protein id: At5g17470.1
  misc_feature (2)..(146): Homolog of NCBI NO: 6901654 NR Description: calcium-binding protein [Olea europaea]
  misc_feature (2)..(146): Homolog of NCBI NO: 14423648 NR Description: Calcium-binding allergen Ole e 8 (PCA18/PCA23)
  misc_feature (1)..(144): Homolog of NCBI NO: 15221781 NR Description: putative calmodulin; protein id: At1g24620.1

SEQ ID NO: 71964 - DNA, 1594 bp, Arabidopsis thaliana
  misc_feature (1)..(1594): Ceres Seq. ID no. 4907633
  misc_feature: MA Experiment ID: 108463 Result: Down-regulated in Transcription
  misc_feature: MA Experiment 108463 PARAMETER Experiment Name: At_Germinating_Seeds_cDNA_P Parameter: Age (day) Value: 3 vs. 0
  misc_feature: MA Experiment 108463 PARAMETER Experiment Name: At_Germinating_Seeds_cDNA_P Parameter: Tissue Value: Germinating Seeds
  misc_feature: MA Experiment ID: 108464 Result: Down-regulated in Transcription
  misc_feature: MA Experiment 108464 PARAMETER Experiment Name: At_Germinating_Seeds_cDNA_P Parameter: Age (day) Value: 4 vs. 0
  misc_feature: MA Experiment 108464 PARAMETER Experiment Name: At_Germinating_Seeds_cDNA_P Parameter: Tissue Value: Germinating Seeds
  misc_feature: MA Experiment ID: 20000112 Result: Up-regulated in Transcription
  misc_feature: MA Experiment 20000112 PARAMETER Experiment Name: At_42deg_Heat_cDNA_P Parameter: Temperature (deg C) Value: 42 vs. 22
  misc_feature: MA Experiment 20000112 PARAMETER Experiment Name: At_42deg_Heat_cDNA_P Parameter: Timepoint (hr) Value: 2
  misc_feature: MA Experiment 20000112 PARAMETER Experiment Name: At_42deg_Heat_cDNA_P Parameter: Tissue Value: Aerial
  misc_feature: MA Experiment ID: 20000144 Result: Up-regulated in Transcription
  misc_feature: MA Experiment 20000144 PARAMETER Experiment Name: At_42deg_Heat_cDNA_P Parameter: Temperature (deg C) Value: 42 vs. 22
  misc_feature: MA Experiment 20000144 PARAMETER Experiment Name: At_42deg_Heat_cDNA_P Parameter: Timepoint (hr) Value: 1
  misc_feature: MA Experiment 20000144 PARAMETER Experiment Name: At_42deg_Heat_cDNA_P Parameter: Tissue Value: Aerial
  misc_feature: MA Experiment ID: 20000180 Result: Down-regulated in Transcription
  misc_feature: MA Experiment 20000180 PARAMETER Experiment Name: At_Germinating_Seeds_P Parameter: Age (hr) Value: 24 vs. 0
  misc_feature: MA Experiment 20000180 PARAMETER Experiment Name: At_Germinating_Seeds_P Parameter: Tissue Value: Germinating Seeds
  misc_feature: MA Experiment ID: 20000227 Result: Up-regulated in Transcription
  misc_feature: MA Experiment 20000227 PARAMETER Experiment Name: At_Root-Tips-vs-Tops_P Parameter: Tissue Value: Root Tips vs. Root Tops
  misc_feature: MA Experiment ID: 20000794 Result: Up-regulated in Transcription
  misc_feature: MA Experiment 20000794 PARAMETER Experiment Name: At_Petals_P Parameter: Age (day) Value: 23-25 days
  misc_feature: MA Experiment 20000794 PARAMETER Experiment Name: At_Petals_P Parameter: Plant Line Value: WS
  misc_feature: MA Experiment 20000794 PARAMETER Experiment Name: At_Petals_P Parameter: Tissue Value: Petals vs. Whole plant
aaattctcgattttttttttcttctaattctggagttttcttttccatatgtggcaaaatccgtgatcctcacgtttcaaaattacctaaaacccctaacaattctacaattcttcttctatgtcgattctatttagtaatctcgaagaatggttcgtggattgatgaaattcccaggaatctcaacgaagttattaaacataagcgttaattctctctgcaaatttcgaaacttggagagagcagaaacattactcatagacggaatcagattaggtgttcttcctgatgtgatcacttacaacactctaatcaaagggtacactcgtttcattggaatcgacgaagcttatgctgtaacacgtcgtatgagagaagctgggatcgaaccagatgttactacttacaattcattgatctcaggagctgctaaaaacttgatgttgaatcgtgtactccaactgttcgacgaaatgcttcactcaggtttgtctcctgatatgtggagttataatactttaatgtcttgttacttcaaattagggagacatggagaagcgtttaagattcttcatgaggatattcatttagctgggttggttcctgggattgatacttataacattctgcttgatgcgctttgtaaaagcggtcatacggataatgcgattgagttgtttaagcatctgaagagtcgggttaaacccgagcttatgacgtataatattctcatcaatggtctttgtaaatcgagaagggttggttctgtggattggatgatgagagagcttaagaaatcgggctatactccgaatgcggttacgtatacaacgatgcttaaaatgtattttaagactaagaggattgagaaaggtcttcagttgtttttgaagatgaagaaagaagggtatacgtttgacgggtttgcgaattgtgcggttgttagtgcgttgattaaaaccggaagagcagaggaggcgtatgagtgtatgcacgagcttgtgagaagtggtacaaggagtcaagacattgtttcgtacaatacattgttgaatttgtattttaaagatgggaacttggatgcagtagatgatctattggaggagattgagatgaaggggttgaaacctgatgactatactcatacgattatagtcaatggtttgttaaatataggcaatacgggaggagccgagaagcatttggcatgtatcggagagatggggatgcagccgagtgttgtcacttgtaactgtttgattgatgggttgtgcaaagcaggtcatgtagatcgtgcaatgaggttgtttgcgtcaatggaagttagagatgagttcacttacacttctgttgtgcataatctatgcaaagacggacggcttgtttgtgcttcgaagctgctcttgtcgtgttacaataaaggaatgaagattccgtcatcggctagacgagcagtgttgtccggcatacgggagacggtatcttaccaagcagcaaggaagacacatatcaaaatcaaagcagctattgagtgtaatacactaatgtacccttaagacattgaaaagtatctaatagaaaaattattgaattg

SEQ ID NO: 71965 - protein, 468 aa, Arabidopsis thaliana; identical to SEQ ID NO: 40016
  peptide (1)..(468): Ceres Seq. ID no. 4907634
  misc_feature (119)..(153): Pfam Name: PPR repeat Pfam Description: PPR repeat
  misc_feature (1)..(468): Homolog of NCBI NO: 18422700 NR Description: putative protein; protein id: At5g46680.1,
  misc_feature (6)..(468): Homolog of NCBI NO: 21618238 NR Description: unknown [Arabidopsis thaliana]
  misc_feature (52)..(468): Homolog of NCBI NO: 9758504 NR Description: gene_id:MZA15.9~pir||T05077~strong similarity to
  misc_feature (1)..(181): Homolog of NCBI NO: 9758504 NR Description: gene_id:MZA15.9~pir||T05077~strong similarity to
  misc_feature (52)..(460): Homolog of NCBI NO: 15236699 NR Description: putative protein; protein id: At4g17910.1
  misc_feature (1)..(181): Homolog of NCBI NO: 15236699 NR Description: putative protein; protein id: At4g17910.1
  misc_feature (1)..(434): Homolog of NCBI NO: 15218325 NR Description: hypothetical protein; protein id: At1g09900.1
  misc_feature (1)..(440): Homolog of NCBI NO: 34896698 NR Description: putative pentatricopeptide repeat protein [Oryza
  misc_feature (1)..(440): Homolog of NCBI NO: 15221515 NR Description: putative membrane-associated salt-inducible (AL021637); similar to EST gb|AA728420; protein id: At1g62590.1
  misc_feature (1)..(440): Homolog of NCBI NO: 22531122 NR Description: putative membrane-associated salt-inducible

SEQ ID NO: 71966 - protein, 463 aa, Arabidopsis thaliana; identical to SEQ ID NO: 40017
  peptide (1)..(463): Ceres Seq. ID no. 4907635
  misc_feature (114)..(148): Pfam Name: PPR repeat Pfam Description: PPR repeat
  misc_feature (1)..(463): Homolog of NCBI NO: 18422700 NR Description: putative protein; protein id: At5g46680.1,
  misc_feature (1)..(463): Homolog of NCBI NO: 21618238 NR Description: unknown [Arabidopsis thaliana]
  misc_feature (47)..(463): Homolog of NCBI NO: 9758504 NR Description: gene_id:MZA15.9~pir||T05077~strong similarity to
  misc_feature (1)..(176): Homolog of NCBI NO: 9758504 NR Description: gene_id:MZA15.9~pir||T05077~strong similarity to
  misc_feature (47)..(455): Homolog of NCBI NO: 15236699 NR Description: putative protein; protein id: At4g17910.1
  misc_feature (1)..(176): Homolog of NCBI NO: 15236699 NR Description: putative protein; protein id: At4g17910.1
  misc_feature (1)..(429): Homolog of NCBI NO: 15218325 NR Description: hypothetical protein; protein id: At1g09900.1
  misc_feature (1)..(435): Homolog of NCBI NO: 34896698 NR Description: putative pentatricopeptide repeat protein [Oryza
  misc_feature (1)..(435): Homolog of NCBI NO: 15221515 NR Description: putative membrane-associated salt-inducible (AL021637); similar to EST gb|AA728420; protein id: At1g62590.1
  misc_feature (1)..(435): Homolog of NCBI NO: 22531122 NR Description: putative membrane-associated salt-inducible

SEQ ID NO: 71967 - protein, 395 aa, Arabidopsis thaliana; identical to SEQ ID NO: 40018
  peptide (1)..(395): Ceres Seq. ID no. 4907636
  misc_feature (46)..(80): Pfam Name: PPR repeat Pfam Description: PPR repeat
  misc_feature (1)..(395): Homolog of NCBI NO: 18422700 NR Description: putative protein; protein id: At5g46680.1,
  misc_feature (1)..(395): Homolog of NCBI NO: 21618238 NR Description: unknown [Arabidopsis thaliana]
  misc_feature (1)..(395): Homolog of NCBI NO: 9758504 NR Description: gene_id:MZA15.9~pir||T05077~strong similarity to
  misc_feature (1)..(108): Homolog of NCBI NO: 9758504 NR Description: gene_id:MZA15.9~pir||T05077~strong similarity to
  misc_feature (1)..(387): Homolog of NCBI NO: 15236699 NR Description: putative protein; protein id: At4g17910.1
  misc_feature (1)..(108): Homolog of NCBI NO: 15236699 NR Description: putative protein; protein id: At4g17910.1
  misc_feature (1)..(361): Homolog of NCBI NO: 15218325 NR Description: hypothetical protein; protein id: At1g09900.1
  misc_feature (1)..(367): Homolog of NCBI NO: 34896698 NR Description: putative pentatricopeptide repeat protein [Oryza
  misc_feature (1)..(367): Homolog of NCBI NO: 15221515 NR Description: putative membrane-associated salt-inducible (AL021637); similar to EST gb|AA728420; protein id: At1g62590.1
  misc_feature (1)..(367): Homolog of NCBI NO: 22531122 NR Description: putative membrane-associated salt-inducible

SEQ ID NO: 71968 - DNA, 801 bp, Arabidopsis thaliana
  misc_feature (1)..(801): Ceres Seq. ID no. 4907656
  misc_feature: MA Experiment ID: 108434 Result: Up-regulated in Transcription
  misc_feature: MA Experiment 108434 PARAMETER Experiment Name: At_Root_Tips_cDNA_P Parameter: Tissue Value: Root Tips
  misc_feature: MA Experiment ID: 108462 Result: Down-regulated in Transcription
  misc_feature: MA Experiment 108462 PARAMETER Experiment Name: At_Germinating_Seeds_cDNA_P Parameter: Age (day) Value: 2 vs. 0
  misc_feature: MA Experiment 108462 PARAMETER Experiment Name: At_Germinating_Seeds_cDNA_P Parameter: Tissue Value: Germinating Seeds
  misc_feature: MA Experiment ID: 108463 Result: Down-regulated in Transcription
  misc_feature: MA Experiment 108463 PARAMETER Experiment Name: At_Germinating_Seeds_cDNA_P Parameter: Age (day) Value: 3 vs. 0
  misc_feature: MA Experiment 108463 PARAMETER Experiment Name: At_Germinating_Seeds_cDNA_P Parameter: Tissue Value: Germinating Seeds
  misc_feature: MA Experiment ID: 108464 Result: Down-regulated in Transcription
  misc_feature: MA Experiment 108464 PARAMETER Experiment Name: At_Germinating_Seeds_cDNA_P Parameter: Age (day) Value: 4 vs. 0
  misc_feature: MA Experiment 108464 PARAMETER Experiment Name: At_Germinating_Seeds_cDNA_P Parameter: Tissue Value: Germinating Seeds
  misc_feature: MA Experiment ID: 108579 Result: Down-regulated in Transcription
  misc_feature: MA Experiment 108579 PARAMETER Experiment Name: At_4deg_Cold_cDNA_P Parameter: Temperature (deg C) Value: 4 vs. 22
  misc_feature: MA Experiment 108579 PARAMETER Experiment Name: At_4deg_Cold_cDNA_P Parameter: Timepoint (hr) Value: 6
  misc_feature: MA Experiment 108579 PARAMETER Experiment Name: At_4deg_Cold_cDNA_P Parameter: Tissue Value: Aerial
aggctccaatgtcgctggacttagctcgttgatcatcgtacaaaaagcttgctcgtagctatcagctccccggagaagaagatggtgcggaaacagtttcaacaggctaaaactggaatagaggcattgaagtcaatggatgctaacaactacttgaagaaggttggattagggcgtgacgatatgttcttttggaaacaagtgggaaaagcattgctatgcacttacacaatctttggtatggcttggatttacaatgaaacgtctcctttaggttggtggacgctgaagccaagaccaaaggaagagagagaattggctcatttgtatgagcggcgtgagtttccttatcctggtgatacagaggctatggaggattttgttgcaaaggggggaatgattggtactgcaattggaccgaaaggaattgttgagtccgaaggtgaggctgataattaccagaaggaaatggagaagaagaagtttgataaagaggctcagaaactgtggttgagaatgaggaatgaggttattactgaacttcaagagaaagggcataatcttgaataaggaagtgcaatagggttttgataaataaaaaagctgtgtgtaatttagggtgtgtatcagttagactaaggattcaaccactcgtacaagtgtttctgtctacgtatagctgaaagtactatactggttgatgttcttgctcttggggaagtagctcttgtcctttattggtggcttgattcatgttttggcttaaaccctttggaatataacttgatgctttttgccccc

SEQ ID NO: 71969 - protein, 162 aa, Arabidopsis thaliana; identical to SEQ ID NO: 26580
  peptide (1)..(162): Ceres Seq. ID no. 4907657
  misc_feature (1)..(162): Homolog of NCBI NO: 15237778 NR Description: putative protein; protein id: At5g58920.1, by cDNA: 3086. [Arabidopsis thaliana] unknown protein [Arabidopsis thaliana]
  misc_feature (1)..(162): Homolog of NCBI NO: 21592650 NR Description: unknown [Arabidopsis thaliana]
  misc_feature (21)..(162): Homolog of NCBI NO: 14587335 NR Description: P0460H02.16 [Oryza sativa (japonica

SEQ ID NO: 71970 - protein, 144 aa, Arabidopsis thaliana; identical to SEQ ID NO: 26581
  peptide (1)..(144): Ceres Seq. ID no. 4907658
  misc_feature (1)..(144): Homolog of NCBI NO: 15237778 NR Description: putative protein; protein id: At5g58920.1, by cDNA: 3086. [Arabidopsis thaliana] unknown protein [Arabidopsis thaliana]
  misc_feature (1)..(144): Homolog of NCBI NO: 21592650 NR Description: unknown [Arabidopsis thaliana]
  misc_feature (3)..(144): Homolog of NCBI NO: 14587335 NR Description: P0460H02.16 [Oryza sativa (japonica

SEQ ID NO: 71971 - protein, 128 aa, Arabidopsis thaliana; identical to SEQ ID NO: 26582
  peptide (1)..(128): Ceres Seq. ID no. 4907659
  misc_feature (1)..(128): Homolog of NCBI NO: 15237778 NR Description: putative protein; protein id: At5g58920.1, by cDNA: 3086. [Arabidopsis thaliana] unknown protein [Arabidopsis thaliana]
  misc_feature (1)..(128): Homolog of NCBI NO: 21592650 NR Description: unknown [Arabidopsis thaliana]
  misc_feature (1)..(128): Homolog of NCBI NO: 14587335 NR Description: P0460H02.16 [Oryza sativa (japonica

SEQ ID NO: 71972 - DNA, 1387 bp, Arabidopsis thaliana
  misc_feature (1)..(1387): Ceres Seq. ID no. 4908231
  misc_feature: MA Experiment ID: 108461 Result: Down-regulated in Transcription
  misc_feature: MA Experiment 108461 PARAMETER Experiment Name: At_Germinating_Seeds_cDNA_P Parameter: Age (day) Value: 1 vs. 0
  misc_feature: MA Experiment 108461 PARAMETER Experiment Name: At_Germinating_Seeds_cDNA_P Parameter: Tissue Value: Germinating Seeds
  misc_feature: MA Experiment ID: 108573 Result: Up-regulated in Transcription
  misc_feature: MA Experiment 108573 PARAMETER Experiment Name: At_Drought_cDNA_P Parameter: Timepoint (hr) Value: 6
  misc_feature: MA Experiment 108573 PARAMETER Experiment Name: At_Drought_cDNA_P Parameter: Tissue Value: Aerial
  misc_feature: MA Experiment 108573 PARAMETER Experiment Name: At_Drought_cDNA_P Parameter: Treatment Value: Drought vs. No Drought
  misc_feature: MA Experiment ID: 20000111 Result: Up-regulated in Transcription
  misc_feature: MA Experiment 20000111 PARAMETER Experiment Name: At_42deg_Heat_cDNA_P Parameter: Temperature (deg C) Value: 42 vs. 22
  misc_feature: MA Experiment 20000111 PARAMETER Experiment Name: At_42deg_Heat_cDNA_P Parameter: Timepoint (hr) Value: 6
  misc_feature: MA Experiment 20000111 PARAMETER Experiment Name: At_42deg_Heat_cDNA_P Parameter: Tissue Value: Aerial
  misc_feature: MA Experiment ID: 20000112 Result: Up-regulated in Transcription
  misc_feature: MA Experiment 20000112 PARAMETER Experiment Name: At_42deg_Heat_cDNA_P Parameter: Temperature (deg C) Value: 42 vs. 22
  misc_feature: MA Experiment 20000112 PARAMETER Experiment Name: At_42deg_Heat_cDNA_P Parameter: Timepoint (hr) Value: 2
  misc_feature: MA Experiment 20000112 PARAMETER Experiment Name: At_42deg_Heat_cDNA_P Parameter: Tissue Value: Aerial
  misc_feature: MA Experiment ID: 20000113 Result: Up-regulated in Transcription
  misc_feature: MA Experiment 20000113 PARAMETER Experiment Name: At_42deg_Heat_cDNA_P Parameter: Temperature (deg C) Value: 42 vs. 22
  misc_feature: MA Experiment 20000113 PARAMETER Experiment Name: At_42deg_Heat_cDNA_P Parameter: Timepoint (hr) Value: 8
  misc_feature: MA Experiment 20000113 PARAMETER Experiment Name: At_42deg_Heat_cDNA_P Parameter: Tissue Value: Aerial
  misc_feature: MA Experiment ID: 20000184 Result: Down-regulated in Transcription
  misc_feature: MA Experiment 20000184 PARAMETER Experiment Name: At_Shoots__P Parameter: Age (day) Value: 7
  misc_feature: MA Experiment 20000184 PARAMETER Experiment Name: At_Shoots__P Parameter: Tissue Value: Shoots vs. Whole Plant
  misc_feature: MA Experiment ID: 20000224 Result: Up-regulated in Transcription
  misc_feature: MA Experiment ID: 20000234 Result: Down-regulated in Transcription
  misc_feature: MA Experiment 20000234 PARAMETER Experiment Name: At_Siliques_P Parameter: Age (day) Value: 21
  misc_feature: MA Experiment 20000234 PARAMETER Experiment Name: At_Siliques_P Parameter: Organism Value: A. thaliana
  misc_feature: MA Experiment 20000234 PARAMETER Experiment Name: At_Siliques_P Parameter: Plant Line Value: WS
  misc_feature: MA Experiment 20000234 PARAMETER Experiment Name: At_Siliques_P Parameter: Tissue Value: Less Than 5mm Siliques vs. Whole Plant
  misc_feature: MA Experiment ID: 20000235 Result: Down-regulated in Transcription
  misc_feature: MA Experiment 20000235 PARAMETER Experiment Name: At_Siliques_P Parameter: Age (day) Value: 21
  misc_feature: MA Experiment 20000235 PARAMETER Experiment Name: At_Siliques_P Parameter: Organism Value: A. thaliana
  misc_feature: MA Experiment 20000235 PARAMETER Experiment Name: At_Siliques_P Parameter: Plant Line Value: WS
  misc_feature: MA Experiment 20000235 PARAMETER Experiment Name: At_Siliques_P Parameter: Tissue Value: 5-10mm Siliques vs. Whole Plant
  misc_feature: MA Experiment ID: 20000437 Result: Up-regulated in Transcription
  misc_feature: MA Experiment 20000437 PARAMETER Experiment Name: At_Drought_P Parameter: Age (day) Value: 8
  misc_feature: MA Experiment 20000437 PARAMETER Experiment Name: At_Drought_P Parameter: Organism Value: A. thaliana
  misc_feature: MA Experiment 20000437 PARAMETER Experiment Name: At_Drought_P Parameter: Plant Line Value: WS
  misc_feature: MA Experiment 20000437 PARAMETER Experiment Name: At_Drought_P Parameter: Timepoint (hr) Value: 24
  misc_feature: MA Experiment 20000437 PARAMETER Experiment Name: At_Drought_P Parameter: Tissue Value: Whole Plant
  misc_feature: MA Experiment 20000437 PARAMETER Experiment Name: At_Drought_P Parameter: Treatment Value: Drought vs. No Drought
  misc_feature: MA Experiment ID: 20000438 Result: Down-regulated in Transcription
  misc_feature: MA Experiment 20000438 PARAMETER Experiment Name: At_Shoots__P Parameter: Age (day) Value: 14
  misc_feature: MA Experiment 20000438 PARAMETER Experiment Name: At_Shoots__P Parameter: Tissue Value: Shoots vs. Whole Plant
  misc_feature: MA Experiment ID: 20001248 Result: Up-regulated in Transcription
  misc_feature: MA Experiment 20001248 PARAMETER Experiment Name: At_Far-red-induction_P Parameter: Age (day) Value: 7
  misc_feature: MA Experiment 20001248 PARAMETER Experiment Name: At_Far-red-induction_P Parameter: Light Value: Far-red vs. White
  misc_feature: MA Experiment 20001248 PARAMETER Experiment Name: At_Far-red-induction_P Parameter: Organism Value: A. thaliana
  misc_feature: MA Experiment 20001248 PARAMETER Experiment Name: At_Far-red-induction_P Parameter: Plant Line Value: Columbia
  misc_feature: MA Experiment 20001248 PARAMETER Experiment Name: At_Far-red-induction_P Parameter: Timepoint (hr) Value: 4
  misc_feature: MA Experiment 20001248 PARAMETER Experiment Name: At_Far-red-induction_P Parameter: Tissue Value: Whole Plant
  misc_feature: MA Experiment ID: 20001450 Result: Up-regulated in Transcription
  misc_feature: MA Experiment 20001450 PARAMETER Experiment Name: At_Far-red-induction_P Parameter: Age (day) Value: 7
  misc_feature: MA Experiment 20001450 PARAMETER Experiment Name: At_Far-red-induction_P Parameter: Light Value: Far-red vs. White
  misc_feature: MA Experiment 20001450 PARAMETER Experiment Name: At_Far-red-induction_P Parameter: Organism Value: A. thaliana
  misc_feature: MA Experiment 20001450 PARAMETER Experiment Name: At_Far-red-induction_P Parameter: Plant Line Value: Columbia
  misc_feature: MA Experiment 20001450 PARAMETER Experiment Name: At_Far-red-induction_P Parameter: Timepoint (hr) Value: 8
  misc_feature: MA Experiment 20001450 PARAMETER Experiment Name: At_Far-red-induction_P Parameter: Tissue Value: Whole Plant
  misc_feature: MA Experiment ID: 20001451 Result: Up-regulated in Transcription
  misc_feature: MA Experiment 20001451 PARAMETER Experiment Name: At_Far-red-induction_P Parameter: Age (day) Value: 7
  misc_feature: MA Experiment 20001451 PARAMETER Experiment Name: At_Far-red-induction_P Parameter: Light Value: Far-red vs. White
  misc_feature: MA Experiment 20001451 PARAMETER Experiment Name: At_Far-red-induction_P Parameter: Organism Value: A. thaliana
  misc_feature: MA Experiment 20001451 PARAMETER Experiment Name: At_Far-red-induction_P Parameter: Plant Line Value: Columbia
  misc_feature: MA Experiment 20001451 PARAMETER Experiment Name: At_Far-red-induction_P Parameter: Timepoint (hr) Value: 24
  misc_feature: MA Experiment 20001451 PARAMETER Experiment Name: At_Far-red-induction_P Parameter: Tissue Value: Whole Plant
  misc_feature: Pfam Name: DUF1644 Pfam Description: Protein of unknown function (DUF1644)
tcgttagctctctcaatgaggagcccgatttagggtttcctccattggttatatcaattcgatcatctccacaaagctctcgaagactctttcggtgatctcatcttcttcttcttgtttagcctcctggaggttactttgtttgttactagttccaaaacatgccgaaagagaggaaagaacggtccgtatctcttgataagtataaacgatcgccactgtgttgtgaggcaagccttgctttgaagccgagtgagaaacaagttaaggaatgggaagaggctcgttgtcctgtttgtatggaacatcctcacaatgggattcttctcatttgttcttcttatgaaaatggttgtcgaccttacatgtgcgacactagccatcggcattctaactgtttcgatcagttccgcaaagcttctaaagagaaaccttctttgtctttacttcgtgaggaagaggaaagtaatgaaccaactgagatggaagatgtggattcagactcaactgctgtaaatctattaggagaagctgcatctgagataacagttgtggatttaagtgatggtgagagaggagaagaagaagtagaagaagatcaagaaaaaaacaaaccacaaaagcttacttgtccgttatgtcgtggacatataaaagaatgggtagttgttaaagcagctcgatgtttcatgaactcaaaacatagaagctgttcttgtgagacttgtgatttcagtggaagctattccgatctgagaaagcacgcaaggcttctacatccaggagttaggccatcagaagcagatccagagagacagagaagctggaggaggctagaaaggcagagcgatttaggggatttacttagcacactccaatcttcttttggaggagatgaaataagtaacgatgatgggtttctatttgctgatactcgcttgcttacagtgtactttctcatccgcgtgtttagaccagaatcgagtggctcaaggagtagtagctggtctggtacatctagagctaggacacatacaagtgggagaagaagatcttcaagacctgcaagtctttggggagagagctatgaaggtaatacaggaacatcacctagagatgaggagaataatcaatcttctgatgaacaagtgtctggaactcggagacgtcgttctagaagaagaactgtcattgatgatgatgatgaagaagaagaaccgtgatgctctgcagtttggaaatttggtctttggagtttatgataaaatgggggaaaccttgtagtaataaccccacttatgaaaccctattatgtaaaatttctttggagattgaaaaaagtttctactattgggaaacaaaatgttcaatatttcattaccgttta

SEQ ID NO: 71973 - protein, 353 aa, Arabidopsis thaliana
  peptide (1)..(353): Ceres Seq. ID no. 4908232
  misc_feature: Pfam Name: DUF1644 Pfam Description: Protein of unknown function (DUF1644)
  misc_feature (77)..(353): Homolog of NCBI NO: 18404727 NR Description: expressed protein; protein id: At3g25910.1, by cDNA: gi_15983782 [Arabidopsis thaliana] gb|AAF16548.1~gene_id:MPE11.8~similar to unknown protein
  misc_feature (1)..(149): Homolog of NCBI NO: 18404727 NR Description: expressed protein; protein id: At3g25910.1, by cDNA: gi_15983782 [Arabidopsis thaliana] gb|AAF16548.1~gene_id:MPE11.8~similar to unknown protein
  misc_feature (145)..(347): Homolog of NCBI NO: 34912600 NR Description: P0046B10.17 [Oryza sativa (japonica
  misc_feature (1)..(89): Homolog of NCBI NO: 34912600 NR Description: P0046B10.17 [Oryza sativa (japonica
  misc_feature (36)..(328): Homolog of NCBI NO: 15230170 NR Description: unknown protein; protein id: At3g24740.1, by cDNA: gi_19715578 [Arabidopsis thaliana] gb|AAF16548.1~gene_id:K7P8.3~similar to unknown protein
  misc_feature (147)..(250): Homolog of NCBI NO: 15221290 NR Description: unknown protein; protein id: At1g68140.1, by cDNA: gi_17064999 [Arabidopsis thaliana]
  misc_feature (36)..(92): Homolog of NCBI NO: 15221290 NR Description: unknown protein; protein id: At1g68140.1, by cDNA: gi_17064999 [Arabidopsis thaliana]
  misc_feature (147)..(250): Homolog of NCBI NO: 38344827 NR Description: OSJNBa0064H22.8 [Oryza sativa (japonica
  misc_feature (31)..(109): Homolog of NCBI NO: 38344827 NR Description: OSJNBa0064H22.8 [Oryza sativa (japonica
  misc_feature (146)..(250): Homolog of NCBI NO: 25365932 NR Description: unknown protein T32E8.10 [imported] - Arabidopsis
MPKERKERSVSLDKYKRSPLCCEASLALKPSEKQVKEWEEARCPVCMEHPHNGILLICSSYENGCRPYMCDTSHRHSNCFDQFRKASKEKPSLSLLREEEESNEPTEMEDVDSDSTAVNLLGEAASEITVVDLSDGERGEEEVEEDQEKNKPQKLTCPLCRGHIKEWVVVKAARCFMNSKHRSCSCETCDFSGSYSDLRKHARLLHPGVRPSEADPERQRSWRRLERQSDLGDLLSTLQSSFGGDEISNDDGFLFADTRLLTVYFLIRVFRPESSGSRSSSWSGTSRARTHTSGRRRSSRPASLWGESYEGNTGTSPRDEENNQSSDEQVSGTRRRRSRRRTVIDDDDEEEEP

SEQ ID NO: 71974 - protein, 307 aa, Arabidopsis thaliana
  peptide (1)..(307): Ceres Seq. ID no. 4908233
  misc_feature: Pfam Name: DUF1644 Pfam Description: Protein of unknown function (DUF1644)
  misc_feature (31)..(307): Homolog of NCBI NO: 18404727 NR Description: expressed protein; protein id: At3g25910.1, by cDNA: gi_15983782 [Arabidopsis thaliana] gb|AAF16548.1~gene_id:MPE11.8~similar to unknown protein
  misc_feature (1)..(103): Homolog of NCBI NO: 18404727 NR Description: expressed protein; protein id: At3g25910.1, by cDNA: gi_15983782 [Arabidopsis thaliana] gb|AAF16548.1~gene_id:MPE11.8~similar to unknown protein
  misc_feature (99)..(301): Homolog of NCBI NO: 34912600 NR Description: P0046B10.17 [Oryza sativa (japonica
  misc_feature (1)..(43): Homolog of NCBI NO: 34912600 NR Description: P0046B10.17 [Oryza sativa (japonica
  misc_feature (1)..(282): Homolog of NCBI NO: 15230170 NR Description: unknown protein; protein id: At3g24740.1, by cDNA: gi_19715578 [Arabidopsis thaliana] gb|AAF16548.1~gene_id:K7P8.3~similar to unknown protein
  misc_feature (101)..(204): Homolog of NCBI NO: 15221290 NR Description: unknown protein; protein id: At1g68140.1, by cDNA: gi_17064999 [Arabidopsis thaliana]
  misc_feature (1)..(46): Homolog of NCBI NO: 15221290 NR Description: unknown protein; protein id: At1g68140.1, by cDNA: gi_17064999 [Arabidopsis thaliana]
  misc_feature (101)..(204): Homolog of NCBI NO: 38344827 NR Description: OSJNBa0064H22.8 [Oryza sativa (japonica
  misc_feature (1)..(63): Homolog of NCBI NO: 38344827 NR Description: OSJNBa0064H22.8 [Oryza sativa (japonica
  misc_feature (100)..(204): Homolog of NCBI NO: 25365932 NR Description: unknown protein T32E8.10 [imported] - Arabidopsis
MEHPHNGILLICSSYENGCRPYMCDTSHRHSNCFDQFRKASKEKPSLSLLREEEESNEPTEMEDVDSDSTAVNLLGEAASEITVVDLSDGERGEEEVEEDQEKNKPQKLTCPLCRGHIKEWVVVKAARCFMNSKHRSCSCETCDFSGSYSDLRKHARLLHPGVRPSEADPERQRSWRRLERQSDLGDLLSTLQSSFGGDEISNDDGFLFADTRLLTVYFLIRVFRPESSGSRSSSWSGTSRARTHTSGRRRSSRPASLWGESYEGNTGTSPRDEENNQSSDEQVSGTRRRRSRRRTVIDDDDEEEEP

SEQ ID NO: 71975 - protein, 285 aa, Arabidopsis thaliana
  peptide (1)..(285): Ceres Seq. ID no. 4908234
  misc_feature: Pfam Name: DUF1644 Pfam Description: Protein of unknown function (DUF1644)
  misc_feature (9)..(285): Homolog of NCBI NO: 18404727 NR Description: expressed protein; protein id: At3g25910.1, by cDNA: gi_15983782 [Arabidopsis thaliana] gb|AAF16548.1~gene_id:MPE11.8~similar to unknown protein
  misc_feature (1)..(81): Homolog of NCBI NO: 18404727 NR Description: expressed protein; protein id: At3g25910.1, by cDNA: gi_15983782 [Arabidopsis thaliana] gb|AAF16548.1~gene_id:MPE11.8~similar to unknown protein
  misc_feature (77)..(279): Homolog of NCBI NO: 34912600 NR Description: P0046B10.17 [Oryza sativa (japonica
  misc_feature (1)..(21): Homolog of NCBI NO: 34912600 NR Description: P0046B10.17 [Oryza sativa (japonica
  misc_feature (1)..(260): Homolog of NCBI NO: 15230170 NR Description: unknown protein; protein id: At3g24740.1, by cDNA: gi_19715578 [Arabidopsis thaliana] gb|AAF16548.1~gene_id:K7P8.3~similar to unknown protein
  misc_feature (79)..(182): Homolog of NCBI NO: 15221290 NR Description: unknown protein; protein id: At1g68140.1, by cDNA: gi_17064999 [Arabidopsis thaliana]
  misc_feature (1)..(24): Homolog of NCBI NO: 15221290 NR Description: unknown protein; protein id: At1g68140.1, by cDNA: gi_17064999 [Arabidopsis thaliana]
  misc_feature (79)..(182): Homolog of NCBI NO: 38344827 NR Description: OSJNBa0064H22.8 [Oryza sativa (japonica
  misc_feature (1)..(41): Homolog of NCBI NO: 38344827 NR Description: OSJNBa0064H22.8 [Oryza sativa (japonica
  misc_feature (78)..(182): Homolog of NCBI NO: 25365932 NR Description: unknown protein T32E8.10 [imported] - Arabidopsis
MCDTSHRHSNCFDQFRKASKEKPSLSLLREEEESNEPTEMEDVDSDSTAVNLLGEAASEITVVDLSDGERGEEEVEEDQEKNKPQKLTCPLCRGHIKEWVVVKAARCFMNSKHRSCSCETCDFSGSYSDLRKHARLLHPGVRPSEADPERQRSWRRLERQSDLGDLLSTLQSSFGGDEISNDDGFLFADTRLLTVYFLIRVFRPESSGSRSSSWSGTSRARTHTSGRRRSSRPASLWGESYEGNTGTSPRDEENNQSSDEQVSGTRRRRSRRRTVIDDDDEEEEP

SEQ ID NO: 71976 - DNA, 1763 bp, Arabidopsis thaliana
  misc_feature (1)..(1763): Ceres Seq. ID no. 4908352
  misc_feature: MA Experiment ID: 108434 Result: Down-regulated in Transcription
  misc_feature: MA Experiment 108434 PARAMETER Experiment Name: At_Root_Tips_cDNA_P Parameter: Tissue Value: Root Tips
  misc_feature: MA Experiment ID: 108462 Result: Up-regulated in Transcription
  misc_feature: MA Experiment 108462 PARAMETER Experiment Name: At_Germinating_Seeds_cDNA_P Parameter: Age (day) Value: 2 vs. 0
  misc_feature: MA Experiment 108462 PARAMETER Experiment Name: At_Germinating_Seeds_cDNA_P Parameter: Tissue Value: Germinating Seeds
  misc_feature: MA Experiment ID: 108463 Result: Up-regulated in Transcription
  misc_feature: MA Experiment 108463 PARAMETER Experiment Name: At_Germinating_Seeds_cDNA_P Parameter: Age (day) Value: 3 vs. 0
  misc_feature: MA Experiment 108463 PARAMETER Experiment Name: At_Germinating_Seeds_cDNA_P Parameter: Tissue Value: Germinating Seeds
  misc_feature: MA Experiment ID: 108464 Result: Up-regulated in Transcription
  misc_feature: MA Experiment 108464 PARAMETER Experiment Name: At_Germinating_Seeds_cDNA_P Parameter: Age (day) Value: 4 vs. 0
  misc_feature: MA Experiment 108464 PARAMETER Experiment Name: At_Germinating_Seeds_cDNA_P Parameter: Tissue Value: Germinating Seeds
  misc_feature: MA Experiment ID: 108577 Result: Down-regulated in Transcription
  misc_feature: MA Experiment 108577 PARAMETER Experiment Name: At_42deg_Heat_cDNA_P Parameter: Temperature (deg C) Value: 42 vs. 22
  misc_feature: MA Experiment 108577 PARAMETER Experiment Name: At_42deg_Heat_cDNA_P Parameter: Timepoint (hr) Value: 6
  misc_feature: MA Experiment 108577 PARAMETER Experiment Name: At_42deg_Heat_cDNA_P Parameter: Tissue Value: Aerial
  misc_feature: MA Experiment ID: 108595 Result: Down-regulated in Transcription
  misc_feature: MA Experiment 108595 PARAMETER Experiment Name: At_Ler-pi_Ovule_cDNA_P Parameter: Plant Line Value: null
  misc_feature: MA Experiment ID: 108609 Result: Up-regulated in Transcription
  misc_feature: MA Experiment 108609 PARAMETER Experiment Name: At_100uM_ABA_cDNA_P Parameter: Timepoint (hr) Value: 24
  misc_feature: MA Experiment 108609 PARAMETER Experiment Name: At_100uM_ABA_cDNA_P Parameter: Tissue Value: Aerial
  misc_feature: MA Experiment 108609 PARAMETER Experiment Name: At_100uM_ABA_cDNA_P Parameter: Treatment Value: 100uM ABA vs. No Treatment
  misc_feature: MA Experiment ID: 20000030 Result: Up-regulated in Transcription
  misc_feature: MA Experiment 20000030 PARAMETER Experiment Name: At_CS6630_Roots_cDNA_P Parameter: Plant Line Value: CS6630 vs. WS
  misc_feature: MA Experiment 20000030 PARAMETER Experiment Name: At_CS6630_Roots_cDNA_P Parameter: Tissue Value: Roots
  misc_feature: MA Experiment ID: 20000069 Result: Up-regulated in Transcription
  misc_feature: MA Experiment 20000069 PARAMETER Experiment Name: At_100uM_ABA_Mutants_cDNA_P Parameter: Plant Line Value: CS23
  misc_feature: MA Experiment 20000069 PARAMETER Experiment Name: At_100uM_ABA_Mutants_cDNA_P Parameter: Timepoint (hr) Value: 6
  misc_feature: MA Experiment 20000069 PARAMETER Experiment Name: At_100uM_ABA_Mutants_cDNA_P Parameter: Tissue Value: Aerial
  misc_feature: MA Experiment 20000069 PARAMETER Experiment Name: At_100uM_ABA_Mutants_cDNA_P Parameter: Treatment Value: 100uM ABA vs. No Treatment
  misc_feature: MA Experiment ID: 20000071 Result: Up-regulated in Transcription
  misc_feature: MA Experiment 20000071 PARAMETER Experiment Name: At_100uM_ABA_Mutants_cDNA_P Parameter: Plant Line Value: CS8104
  misc_feature: MA Experiment 20000071 PARAMETER Experiment Name: At_100uM_ABA_Mutants_cDNA_P Parameter: Timepoint (hr) Value: 6
  misc_feature: MA Experiment 20000071 PARAMETER Experiment Name: At_100uM_ABA_Mutants_cDNA_P Parameter: Tissue Value: Aerial
  misc_feature: MA Experiment 20000071 PARAMETER Experiment Name: At_100uM_ABA_Mutants_cDNA_P Parameter: Treatment Value: 100uM ABA vs. No Treatment
  misc_feature: MA Experiment ID: 20000072 Result: Up-regulated in Transcription
  misc_feature: MA Experiment 20000072 PARAMETER Experiment Name: At_100uM_ABA_Mutants_cDNA_P Parameter: Plant Line Value: CS8105
  misc_feature: MA Experiment 20000072 PARAMETER Experiment Name: At_100uM_ABA_Mutants_cDNA_P Parameter: Timepoint (hr) Value: 6
  misc_feature: MA Experiment 20000072 PARAMETER Experiment Name: At_100uM_ABA_Mutants_cDNA_P Parameter: Tissue Value: Aerial
  misc_feature: MA Experiment 20000072 PARAMETER Experiment Name: At_100uM_ABA_Mutants_cDNA_P Parameter: Treatment Value: 100uM ABA vs. No Treatment
  misc_feature: MA Experiment ID: 20000089 Result: Up-regulated in Transcription
  misc_feature: MA Experiment ID: 20000090 Result: Up-regulated in Transcription
  misc_feature: MA Experiment ID: 20000111 Result: Down-regulated in Transcription
  misc_feature: MA Experiment 20000111 PARAMETER Experiment Name: At_42deg_Heat_cDNA_P Parameter: Temperature (deg C) Value: 42 vs. 22
  misc_feature: MA Experiment 20000111 PARAMETER Experiment Name: At_42deg_Heat_cDNA_P Parameter: Timepoint (hr) Value: 6
  misc_feature: MA Experiment 20000111 PARAMETER Experiment Name: At_42deg_Heat_cDNA_P Parameter: Tissue Value: Aerial
  misc_feature: MA Experiment ID: 20000117 Result: Up-regulated in Transcription
  misc_feature: MA Experiment 20000117 PARAMETER Experiment Name: At_100uM_ABA_Mutants_cDNA_P Parameter: Plant Line Value: Columbia
  misc_feature: MA Experiment 20000117 PARAMETER Experiment Name: At_100uM_ABA_Mutants_cDNA_P Parameter: Timepoint (hr) Value: 6
  misc_feature: MA Experiment 20000117 PARAMETER Experiment Name: At_100uM_ABA_Mutants_cDNA_P Parameter: Tissue Value: Aerial
  misc_feature: MA Experiment 20000117 PARAMETER Experiment Name: At_100uM_ABA_Mutants_cDNA_P Parameter: Treatment Value: 100uM ABA vs. No Treatment
  misc_feature: MA Experiment ID: 20000144 Result: Down-regulated in Transcription
  misc_feature: MA Experiment 20000144 PARAMETER Experiment Name: At_42deg_Heat_cDNA_P Parameter: Temperature (deg C) Value: 42 vs. 22
  misc_feature: MA Experiment 20000144 PARAMETER Experiment Name: At_42deg_Heat_cDNA_P Parameter: Timepoint (hr) Value: 1
  misc_feature: MA Experiment 20000144 PARAMETER Experiment Name: At_42deg_Heat_cDNA_P Parameter: Tissue Value: Aerial
  misc_feature: MA Experiment ID: 20000171 Result: Down-regulated in Transcription
  misc_feature: MA Experiment 20000171 PARAMETER Experiment Name: At_42deg_Heat_P Parameter: Age (day) Value: 14
  misc_feature: MA Experiment 20000171 PARAMETER Experiment Name: At_42deg_Heat_P Parameter: Organism Value: A. thaliana
  misc_feature: MA Experiment 20000171 PARAMETER Experiment Name: At_42deg_Heat_P Parameter: Plant Line Value: WS
  misc_feature: MA Experiment 20000171 PARAMETER Experiment Name: At_42deg_Heat_P Parameter: Temperature (deg C) Value: 42 vs. 22
  misc_feature: MA Experiment 20000171 PARAMETER Experiment Name: At_42deg_Heat_P Parameter: Timepoint (hr) Value: 1
  misc_feature: MA Experiment 20000171 PARAMETER Experiment Name: At_42deg_Heat_P Parameter: Tissue Value: Aerial
  misc_feature: MA Experiment ID: 20000173 Result: Down-regulated in Transcription
  misc_feature: MA Experiment 20000173 PARAMETER Experiment Name: At_42deg_Heat_P Parameter: Age (day) Value: 14
  misc_feature: MA Experiment 20000173 PARAMETER Experiment Name: At_42deg_Heat_P Parameter: Organism Value: A. thaliana
  misc_feature: MA Experiment 20000173 PARAMETER Experiment Name: At_42deg_Heat_P Parameter: Plant Line Value: WS
  misc_feature: MA Experiment 20000173 PARAMETER Experiment Name: At_42deg_Heat_P Parameter: Temperature (deg C) Value: 42 vs. 22
  misc_feature: MA Experiment 20000173 PARAMETER Experiment Name: At_42deg_Heat_P Parameter: Timepoint (hr) Value: 6
  misc_feature: MA Experiment 20000173 PARAMETER Experiment Name: At_42deg_Heat_P Parameter: Tissue Value: Aerial
  misc_feature: MA Experiment ID: 20000184 Result: Down-regulated in Transcription
  misc_feature: MA Experiment 20000184 PARAMETER Experiment Name: At_Shoots__P Parameter: Age (day) Value: 7
  misc_feature: MA Experiment 20000184 PARAMETER Experiment Name: At_Shoots__P Parameter: Tissue Value: Shoots vs. Whole Plant
  misc_feature: MA Experiment ID: 20000185 Result: Down-regulated in Transcription
  misc_feature: MA Experiment 20000185 PARAMETER Experiment Name: At_Roots__P Parameter: Age (day) Value: 7 vs. 21
  misc_feature: MA Experiment 20000185 PARAMETER Experiment Name: At_Roots__P Parameter: Organism Value: A. thaliana
  misc_feature: MA Experiment 20000185 PARAMETER Experiment Name: At_Roots__P Parameter: Tissue Value: Roots vs. Whole Plant
  misc_feature: MA Experiment ID: 20000439 Result: Down-regulated in Transcription
  misc_feature: MA Experiment 20000439 PARAMETER Experiment Name: At_Roots__P Parameter: Age (day) Value: 14 vs. 21
  misc_feature: MA Experiment 20000439 PARAMETER Experiment Name: At_Roots__P Parameter: Organism Value: A. thaliana
  misc_feature: MA Experiment 20000439 PARAMETER Experiment Name: At_Roots__P Parameter: Tissue Value: Roots vs. Whole Plant
  misc_feature: MA Experiment ID: 20000573 Result: Down-regulated in Transcription
  misc_feature: MA Experiment 20000573 PARAMETER Experiment Name: At_100uM_ABA_Mutants__P Parameter: Organism Value: A. thaliana
  misc_feature: MA Experiment 20000573 PARAMETER Experiment Name: At_100uM_ABA_Mutants__P Parameter: Plant Line Value: CS22 vs. Ler wt
  misc_feature: MA Experiment 20000573 PARAMETER Experiment Name: At_100uM_ABA_Mutants__P Parameter: Timepoint (hr) Value: N/A
  misc_feature: MA Experiment 20000573 PARAMETER Experiment Name: At_100uM_ABA_Mutants__P Parameter: Tissue Value: Whole Plant
  misc_feature: MA Experiment 20000573 PARAMETER Experiment Name: At_100uM_ABA_Mutants__P Parameter: Treatment Value: None
  misc_feature: MA Experiment ID: 20000574 Result: Down-regulated in Transcription
  misc_feature: MA Experiment 20000574 PARAMETER Experiment Name: At_100uM_ABA_Mutants__P Parameter: Organism Value: A. thaliana
  misc_feature: MA Experiment 20000574 PARAMETER Experiment Name: At_100uM_ABA_Mutants__P Parameter: Plant Line Value: CS23 vs. Ler wt
  misc_feature: MA Experiment 20000574 PARAMETER Experiment Name: At_100uM_ABA_Mutants__P Parameter: Timepoint (hr) Value: N/A
  misc_feature: MA Experiment 20000574 PARAMETER Experiment Name: At_100uM_ABA_Mutants__P Parameter: Tissue Value: Whole Plant
  misc_feature: MA Experiment 20000574 PARAMETER Experiment Name: At_100uM_ABA_Mutants__P Parameter: Treatment Value: None
  misc_feature: MA Experiment ID: 20001248 Result: Down-regulated in Transcription
  misc_feature: MA Experiment 20001248 PARAMETER Experiment Name: At_Far-red-induction_P Parameter: Age (day) Value: 7
  misc_feature: MA Experiment 20001248 PARAMETER Experiment Name: At_Far-red-induction_P Parameter: Light Value: Far-red vs. White
  misc_feature: MA Experiment 20001248 PARAMETER Experiment Name: At_Far-red-induction_P Parameter: Organism Value: A. thaliana
  misc_feature: MA Experiment 20001248 PARAMETER Experiment Name: At_Far-red-induction_P Parameter: Plant Line Value: Columbia
  misc_feature: MA Experiment 20001248 PARAMETER Experiment Name: At_Far-red-induction_P Parameter: Timepoint (hr) Value: 4
  misc_feature: MA Experiment 20001248 PARAMETER Experiment Name: At_Far-red-induction_P Parameter: Tissue Value: Whole Plant
  misc_feature: MA Experiment ID: 20001560 Result: Down-regulated in Transcription
  misc_feature: MA Experiment 20001560 PARAMETER Experiment Name: At_Drought_Soil_Dry_P Parameter: Age (day) Value: 28
  misc_feature: MA Experiment 20001560 PARAMETER Experiment Name: At_Drought_Soil_Dry_P Parameter: Organism Value: A. thaliana
  misc_feature: MA Experiment 20001560 PARAMETER Experiment Name: At_Drought_Soil_Dry_P Parameter: Plant Line Value: WS
  misc_feature: MA Experiment 20001560 PARAMETER Experiment Name: At_Drought_Soil_Dry_P Parameter: Post Timepoint (hr) Value: None
  misc_feature: MA Experiment 20001560 PARAMETER Experiment Name: At_Drought_Soil_Dry_P Parameter: Post-Treatment Value: None
  misc_feature: MA Experiment 20001560 PARAMETER Experiment Name: At_Drought_Soil_Dry_P Parameter: Timepoint (day) Value: 14
  misc_feature: MA Experiment 20001560 PARAMETER Experiment Name: At_Drought_Soil_Dry_P Parameter: Treatment Value: Drought vs. No Drought
atttttcacttctatcgataaccaaacgaaaaaaaacatggccatctctttcctctgtttttgcctcattaccctcgcttcgttaatctttttcgccaagaagattaaacacttgaaatggaatcttcctccaagccctccaaagtttccggtcatcggaaatttacaccagattggagaattgcctcacaggtcacttcaacatctcgccgaaagatacggacctgtgatgcttcttcactttgggtttgtccctgtaactgtggtctcatcaagagaagcagctgaagaagtgctcagaactcatgacctagactgttgcagcaggcctaaacttgtcgggacaaggttactctcgcggaattttaaagatgtctgttttacgccatacggtaacgagtggaaggcgcggcgtaagtttgccctgcgtgagcttttctgtttgaaaaaggttcagtcctttaggcatatccgagaggaagaatgtaactttctggtcaagcaactgtcggaatccgcggttaatcgctctccggtcgatttgagcaaatcacttttctggctaaccgctagtatctttttcagagttgccttaggacagaattttcatgagagcaattttatcgataaagaaaagatcgaagagctcgtgttcgaagctgagactgccctagcaagtttcacttgttctgatttcttccctgttgccggacttggatggcttgttgattggttttccggacaacacaagagactcaacgatgttttttacaagctcgatgctctgtttcaacatgtcatagatgatcatttaaatccaggaagatcaaaagagcacgaagacatcatcgattcaatgttggatgcgattcataaagaaggaaaagatagttccttagagctcataatagatcatattaaggggtttctcgcggtaatcaagagttatttaaacacattaaaattgtaattggatcgaaatctttaacttacttttcttgtgggttgttagaatatatttcttgcagggatagacacaggggccctcaccatgatatgggcaatgacggagctcgttaaaaacccgaaacttataaagaaagttcaaggcgagatccgagaacaacttggcagcaataaggcgagaatcaccgaggaagatatcgataaagttccttacttgaagatggtaatcaaagaaacattcaggttacacccggcagctcctcttatacttccaagagaaacaatggctcacatcaaagttcaagggtatgatattcctcccaagaggcggatcttggtcaatgtttcggctatcggaagagatcccaaactctggacaaacccggaagagtttgaccctgagaggtttatggatagctctgttgattataggggacaacattacgagctcttaccatttgggtccggtcgaaggatatgtcccgggatgccaatggggattgctgccgtcgaattgggactcttgaacttactttacttcttcgattggaagttgcctgatgggatgacacataaagatattgatactgaagaagctggtactcttacaatcgtcaagaaagtacctctccagctcgttccagttcgagttcagtgatcagaccaaactccaaacggtttggaccaaaccttttgaataaatatatcatgcaaatcatgtaagcttctctgatgatgtatgaagtatatttttcagtaaaatactaaattgaacgttcatttgcgtttgaggaatg

SEQ ID NO: 71977 - protein, 322 aa, Arabidopsis thaliana
  peptide (1)..(322): Ceres Seq. ID no. 4908353
  misc_feature (43)..(313): Pfam Name: Cytochrome P450 Pfam Description: Cytochrome P450
  misc_feature (13)..(313): Homolog of NCBI NO: 15231522 NR Description: cytochrome p450 family; protein id: At3g26180.1, by cDNA: gi_15810462, supported by cDNA: gi_16226473 [Arabidopsis >gi|13878386|sp|Q9LTM3|C72K_ARATH Cytochrome P450 71B20
  misc_feature (13)..(313): Homolog of NCBI NO: 16226474 NR Description: AT3g26180/MTC11_8 [Arabidopsis thaliana]
  misc_feature (13)..(313): Homolog of NCBI NO: 15231516 NR Description: cytochrome p450 family; protein id: At3g26150.1 thaliana] >gi|13878389|sp|Q9LTM7|C72G_ARATH Cytochrome P450 71B16
  misc_feature (13)..(313): Homolog of NCBI NO: 15231517 NR Description: cytochrome p450 family; protein id: At3g26160.1 thaliana] >gi|13878388|sp|Q9LTM6|C72H_ARATH Cytochrome P450 71B17
  misc_feature (46)..(264): Homolog of NCBI NO: 11994435 NR Description: cytochrome P450 [Arabidopsis thaliana]
  misc_feature (13)..(311): Homolog of NCBI NO: 15231525 NR Description: cytochrome p450 family; protein id: At3g26200.1, by cDNA: gi_13430717 [Arabidopsis thaliana] Cytochrome P450 71B22 >gi|11994439|dbj|BAB02441.1| cytochrome
  misc_feature (18)..(310): Homolog of NCBI NO: 15222174 NR Description: cytochrome p450 family; protein id: At1g13080.1, by cDNA: gi_3164139 [Arabidopsis thaliana]
  misc_feature (13)..(319): Homolog of NCBI NO: 15231526 NR Description: cytochrome P450 family; protein id: At3g26210.1 thaliana] >gi|13878383|sp|Q9LTM0|C72N_ARATH Cytochrome P450 71B23
  misc_feature (12)..(319): Homolog of NCBI NO: 15222182 NR Description: cytochrome p450 family; protein id: At1g13110.1, by cDNA: gi_18087622 [Arabidopsis thaliana]
  misc_feature (10)..(294): Homolog of NCBI NO: 18157659 NR Description: cytochrome P450 [Euphorbia lagascae]
FFTSIDNQTKKNMAISFLCFCLITLASLIFFAKKIKHLKWNLPPSPPKFPVIGNLHQIGELPHRSLQHLAERYGPVMLLHFGFVPVTVVSSREAAEEVLRTHDLDCCSRPKLVGTRLLSRNFKDVCFTPYGNEWKARRKFALRELFCLKKVQSFRHIREEECNFLVKQLSESAVNRSPVDLSKSLFWLTASIFFRVALGQNFHESNFIDKEKIEELVFEAETALASFTCSDFFPVAGLGWLVDWFSGQHKRLNDVFYKLDALFQHVIDDHLNPGRSKEHEDIIDSMLDAIHKEGKDSSLELIIDHIKGFLAVIKSYLNTLKL

SEQ ID NO: 71978 - protein, 310 aa, Arabidopsis thaliana
  peptide (1)..(310): Ceres Seq. ID no. 4908354
  misc_feature (31)..(301): Pfam Name: Cytochrome P450 Pfam Description: Cytochrome P450
  misc_feature (1)..(301): Homolog of NCBI NO: 15231522 NR Description: cytochrome p450 family; protein id: At3g26180.1, by cDNA: gi_15810462, supported by cDNA: gi_16226473 [Arabidopsis >gi|13878386|sp|Q9LTM3|C72K_ARATH Cytochrome P450 71B20
  misc_feature (1)..(301): Homolog of NCBI NO: 16226474 NR Description: AT3g26180/MTC11_8 [Arabidopsis thaliana]
  misc_feature (1)..(301): Homolog of NCBI NO: 15231516 NR Description: cytochrome p450 family; protein id: At3g26150.1 thaliana] >gi|13878389|sp|Q9LTM7|C72G_ARATH Cytochrome P450 71B16
  misc_feature (1)..(301): Homolog of NCBI NO: 15231517 NR Description: cytochrome p450 family; protein id: At3g26160.1 thaliana] >gi|13878388|sp|Q9LTM6|C72H_ARATH Cytochrome P450 71B17
  misc_feature (34)..(252): Homolog of NCBI NO: 11994435 NR Description: cytochrome P450 [Arabidopsis thaliana]
  misc_feature (1)..(299): Homolog of NCBI NO: 15231525 NR Description: cytochrome p450 family; protein id: At3g26200.1, by cDNA: gi_13430717 [Arabidopsis thaliana] Cytochrome P450 71B22 >gi|11994439|dbj|BAB02441.1| cytochrome
  misc_feature (6)..(298): Homolog of NCBI NO: 15222174 NR Description: cytochrome p450 family; protein id: At1g13080.1, by cDNA: gi_3164139 [Arabidopsis thaliana]
  misc_feature (1)..(307): Homolog of NCBI NO: 15231526 NR Description: cytochrome P450 family; protein id: At3g26210.1 thaliana] >gi|13878383|sp|Q9LTM0|C72N_ARATH Cytochrome P450 71B23
  misc_feature (1)..(307): Homolog of NCBI NO: 15222182 NR Description: cytochrome p450 family; protein id: At1g13110.1, by cDNA: gi_18087622 [Arabidopsis thaliana]
  misc_feature (1)..(282): Homolog of NCBI NO: 18157659 NR Description: cytochrome P450 [Euphorbia lagascae]
MAISFLCFCLITLASLIFFAKKIKHLKWNLPPSPPKFPVIGNLHQIGELPHRSLQHLAERYGPVMLLHFGFVPVTVVSSREAAEEVLRTHDLDCCSRPKLVGTRLLSRNFKDVCFTPYGNEWKARRKFALRELFCLKKVQSFRHIREEECNFLVKQLSESAVNRSPVDLSKSLFWLTASIFFRVALGQNFHESNFIDKEKIEELVFEAETALASFTCSDFFPVAGLGWLVDWFSGQHKRLNDVFYKLDALFQHVIDDHLNPGRSKEHEDIIDSMLDAIHKEGKDSSLELIIDHIKGFLAVIKSYLNTLKL

SEQ ID NO: 71979 - protein, 246 aa, Arabidopsis thaliana
  peptide (1)..(246): Ceres Seq. ID no. 4908355
  misc_feature (1)..(237): Pfam Name: Cytochrome P450 Pfam Description: Cytochrome P450
  misc_feature (1)..(237): Homolog of NCBI NO: 15231522 NR Description: cytochrome p450 family; protein id: At3g26180.1, by cDNA: gi_15810462, supported by cDNA: gi_16226473 [Arabidopsis >gi|13878386|sp|Q9LTM3|C72K_ARATH Cytochrome P450 71B20
  misc_feature (1)..(237): Homolog of NCBI NO: 16226474 NR Description: AT3g26180/MTC11_8 [Arabidopsis thaliana]
  misc_feature (1)..(237): Homolog of NCBI NO: 15231516 NR Description: cytochrome p450 family; protein id: At3g26150.1 thaliana] >gi|13878389|sp|Q9LTM7|C72G_ARATH Cytochrome P450 71B16
  misc_feature (1)..(237): Homolog of NCBI NO: 15231517 NR Description: cytochrome p450 family; protein id: At3g26160.1 thaliana] >gi|13878388|sp|Q9LTM6|C72H_ARATH Cytochrome P450 71B17
  misc_feature (1)..(188): Homolog of NCBI NO: 11994435 NR Description: cytochrome P450 [Arabidopsis thaliana]
  misc_feature (1)..(235): Homolog of NCBI NO: 15231525 NR Description: cytochrome p450 family; protein id: At3g26200.1, by cDNA: gi_13430717 [Arabidopsis thaliana] Cytochrome P450 71B22 >gi|11994439|dbj|BAB02441.1| cytochrome
  misc_feature (1)..(234): Homolog of NCBI NO: 15222174 NR Description: cytochrome p450 family; protein id: At1g13080.1, by cDNA: gi_3164139 [Arabidopsis thaliana]
  misc_feature (1)..(243): Homolog of NCBI NO: 15231526 NR Description: cytochrome P450 family; protein id: At3g26210.1 thaliana] >gi|13878383|sp|Q9LTM0|C72N_ARATH Cytochrome P450 71B23
  misc_feature (1)..(243): Homolog of NCBI NO: 15222182 NR Description: cytochrome p450 family; protein id: At1g13110.1, by cDNA: gi_18087622 [Arabidopsis thaliana]
  misc_feature (1)..(218): Homolog of NCBI NO: 18157659 NR Description: cytochrome P450 [Euphorbia lagascae]
MLLHFGFVPVTVVSSREAAEEVLRTHDLDCCSRPKLVGTRLLSRNFKDVCFTPYGNEWKARRKFALRELFCLKKVQSFRHIREEECNFLVKQLSESAVNRSPVDLSKSLFWLTASIFFRVALGQNFHESNFIDKEKIEELVFEAETALASFTCSDFFPVAGLGWLVDWFSGQHKRLNDVFYKLDALFQHVIDDHLNPGRSKEHEDIIDSMLDAIHKEGKDSSLELIIDHIKGFLAVIKSYLNTLKL

SEQ ID NO: 71980 - DNA, 1044 bp, Arabidopsis thaliana
  misc_feature (1)..(1044): Ceres Seq. ID no. 4908555
  misc_feature: MA Experiment ID: 108433 Result: Up-regulated in Transcription
  misc_feature: MA Experiment 108433 PARAMETER Experiment Name: At_rhl_Mutant2_cDNA_P Parameter: Age (day) Value: 7
  misc_feature: MA Experiment 108433 PARAMETER Experiment Name: At_rhl_Mutant2_cDNA_P Parameter: Organism Value: A. thaliana
  misc_feature: MA Experiment 108433 PARAMETER Experiment Name: At_rhl_Mutant2_cDNA_P Parameter: Plant Line Value: rhl Mutant vs. wt landsburg
  misc_feature: MA Experiment 108433 PARAMETER Experiment Name: At_rhl_Mutant2_cDNA_P Parameter: Tissue Value: Roots
  misc_feature: MA Experiment ID: 108595 Result: Up-regulated in Transcription
  misc_feature: MA Experiment 108595 PARAMETER Experiment Name: At_Ler-pi_Ovule_cDNA_P Parameter: Plant Line Value: null
  misc_feature: MA Experiment ID: 20000087 Result: Up-regulated in Transcription
  misc_feature: MA Experiment 20000087 PARAMETER Experiment Name: At_100uM_ABA_Mutants_cDNA_P Parameter: Plant Line Value: WS
  misc_feature: MA Experiment 20000087 PARAMETER Experiment Name: At_100uM_ABA_Mutants_cDNA_P Parameter: Timepoint (hr) Value: 6
  misc_feature: MA Experiment 20000087 PARAMETER Experiment Name: At_100uM_ABA_Mutants_cDNA_P Parameter: Tissue Value: Aerial
  misc_feature: MA Experiment 20000087 PARAMETER Experiment Name: At_100uM_ABA_Mutants_cDNA_P Parameter: Treatment Value: 100uM ABA vs. No Treatment
  misc_feature: MA Experiment ID: 20000234 Result: Up-regulated in Transcription
  misc_feature: MA Experiment 20000234 PARAMETER Experiment Name: At_Siliques_P Parameter: Age (day) Value: 21
  misc_feature: MA Experiment 20000234 PARAMETER Experiment Name: At_Siliques_P Parameter: Organism Value: A. thaliana
  misc_feature: MA Experiment 20000234 PARAMETER Experiment Name: At_Siliques_P Parameter: Plant Line Value: WS
  misc_feature: MA Experiment 20000234 PARAMETER Experiment Name: At_Siliques_P Parameter: Tissue Value: Less Than 5mm Siliques vs. Whole Plant
  misc_feature: MA Experiment ID: 20000235 Result: Up-regulated in Transcription
  misc_feature: MA Experiment 20000235 PARAMETER Experiment Name: At_Siliques_P Parameter: Age (day) Value: 21
  misc_feature: MA Experiment 20000235 PARAMETER Experiment Name: At_Siliques_P Parameter: Organism Value: A. thaliana
  misc_feature: MA Experiment 20000235 PARAMETER Experiment Name: At_Siliques_P Parameter: Plant Line Value: WS
  misc_feature: MA Experiment 20000235 PARAMETER Experiment Name: At_Siliques_P Parameter: Tissue Value: 5-10mm Siliques vs. Whole Plant
  misc_feature: MA Experiment ID: 20000264 Result: Up-regulated in Transcription
  misc_feature: MA Experiment 20000264 PARAMETER Experiment Name: At_Open_Flower_P Parameter: Age (day) Value: 21
  misc_feature: MA Experiment 20000264 PARAMETER Experiment Name: At_Open_Flower_P Parameter: Plant Line Value: WS
  misc_feature: MA Experiment 20000264 PARAMETER Experiment Name: At_Open_Flower_P Parameter: Tissue Value: Open Flower vs. Whole Plant
  misc_feature: MA Experiment ID: 20000265 Result: Up-regulated in Transcription
  misc_feature: MA Experiment 20000265 PARAMETER Experiment Name: At_Open_Flower_P Parameter: Age (day) Value: 21
  misc_feature: MA Experiment 20000265 PARAMETER Experiment Name: At_Open_Flower_P Parameter: Plant Line Value: WS
  misc_feature: MA Experiment 20000265 PARAMETER Experiment Name: At_Open_Flower_P Parameter: Tissue Value: Closed Flower vs. Whole Plant
  misc_feature: MA Experiment ID: 20000286 Result: Up-regulated in Transcription
  misc_feature: MA Experiment 20000286 PARAMETER Experiment Name: At_Open_Flower_P Parameter: Age (day) Value: 21
  misc_feature: MA Experiment 20000286 PARAMETER Experiment Name: At_Open_Flower_P Parameter: Plant Line Value: WS
  misc_feature: MA Experiment 20000286 PARAMETER Experiment Name: At_Open_Flower_P Parameter: Tissue Value: Half Open vs. Whole Plant
  misc_feature: MA Experiment ID: 20000451 Result: Down-regulated in Transcription
  misc_feature: MA Experiment 20000451 PARAMETER Experiment Name: At_CS6879_Shoots-Roots_P Parameter: Age (day) Value: 14
  misc_feature: MA Experiment 20000451 PARAMETER Experiment Name: At_CS6879_Shoots-Roots_P Parameter: Organism Value: A. thaliana
  misc_feature: MA Experiment 20000451 PARAMETER Experiment Name: At_CS6879_Shoots-Roots_P Parameter: Plant Line Value: CS6879 vs. WS
  misc_feature: MA Experiment 20000451 PARAMETER Experiment Name: At_CS6879_Shoots-Roots_P Parameter: Tissue Value: Roots
  misc_feature: Pfam Name: DUF1195 Pfam Description: Protein of unknown function (DUF1195)
ctccgatttagatagaaacaacaatcctccggtggtcactcgctaatctccgtttgatctcgccgacactcgagccttttaccgatgaaggatggagattccttaccaataagcacttcttccgtcgcggcgacgacggtgaccggaaagaaggaaaccggttattccgctctcttctcgaaaggccggtacaagttttgggccttagctgcgattctgttactcgctttctggtcaatgctcactggcacggtcaatctccgttggtctgccggtaacattaaccatttcaccgacgatctcgtctttcccatccacgaggatctcgatgttcttgtgagtcttcttcttcttcttcgcgatctgttttctgatttctgtgaattacgtttgatttgtgttgtgttgatgaggttattaggaaatggaggagagggagaaagtggtgaagcacatgtgggatgtgtataacaatggccgtcgtatcagattacctaggttttggcaagaggccttcgaggctgcttacgaggagcttaccagtgatgtacctgatgtggttgaggctgccatttccgagatcgctaggatgtctattcgctccattgttatagatccgcctccgcttcattccacgaatgtacgagaattgacaaagactctaaaacttgcggacaaaggaagagcaactcaaatatcaaaaccaagcagccgtcgattgaaatagctatggaggctttacgaaaaaggtagtgtagcagtcagccgtcgtggcgtgaccatacatatacttgatgtcagaaagatcaatcaacctcatccctagaatatatgtccatcattagtgttattttttcttccactaggggcattaatcctttcactatcatcatcatctcttctataaacaaaattttgaggaagctttttatccacaccttattagctctgaacggtaatgtcttttattttggatttatgaaatatttcatatgtagttagcccatacatttaaataccttccaatgaattttctagttatat

SEQ ID NO: 71981 - protein, 128 aa, Arabidopsis thaliana
  peptide (1)..(128): Ceres Seq. ID no. 4908556
  misc_feature: Pfam Name: DUF1195 Pfam Description: Protein of unknown function (DUF1195)
  misc_feature (1)..(84): Homolog of NCBI NO: 18424975 NR Description: putative protein; protein id: At5g65650.1, by cDNA: 118150. [Arabidopsis thaliana] unknown [Arabidopsis thaliana] >gi|27754375|gb|AAO22636.1|
  misc_feature (1)..(84): Homolog of NCBI NO: 9858772 NR Description: BAC19.4 [Lycopersicon esculentum]
  misc_feature (1)..(84): Homolog of NCBI NO: 15234477 NR Description: hypothetical protein; protein id: At4g36660.1
  misc_feature (31)..(84): Homolog of NCBI NO: 28209490 NR Description: unknown protein [Oryza sativa (japonica
  misc_feature (36)..(84): Homolog of NCBI NO: 15222008 NR Description: hypothetical protein; protein id: At1g19380.1 thaliana] >gi|8778415|gb|AAF79423.1|AC025808_5 F18O14.10
MKDGDSLPISTSSVAATTVTGKKETGYSALFSKGRYKFWALAAILLLAFWSMLTGTVNLRWSAGNINHFTDDLVFPIHEDLDVLVSLLLLLRDLFSDFCELRLICVVLMRLLGNGGEGESGEAHVGCV

SEQ ID NO: 71982 - protein, 100 aa, Arabidopsis thaliana; identical to SEQ ID NO: 37003
  peptide (1)..(100): Ceres Seq. ID no. 4908557
  misc_feature: Pfam Name: DUF1195 Pfam Description: Protein of unknown function (DUF1195)
  misc_feature (1)..(100): Homolog of NCBI NO: 18424975 NR Description: putative protein; protein id: At5g65650.1, by cDNA: 118150. [Arabidopsis thaliana] unknown [Arabidopsis thaliana] >gi|27754375|gb|AAO22636.1|
  misc_feature (1)..(71): Homolog of NCBI NO: 9858772 NR Description: BAC19.4 [Lycopersicon esculentum]
  misc_feature (1)..(70): Homolog of NCBI NO: 15234477 NR Description: hypothetical protein; protein id: At4g36660.1
  misc_feature (1)..(66): Homolog of NCBI NO: 28209490 NR Description: unknown protein [Oryza sativa (japonica
  misc_feature (1)..(58): Homolog of NCBI NO: 15222008 NR Description: hypothetical protein; protein id: At1g19380.1 thaliana] >gi|8778415|gb|AAF79423.1|AC025808_5 F18O14.10

SEQ ID NO: 71983 - protein, 90 aa, Arabidopsis thaliana; identical to SEQ ID NO: 37004
  peptide (1)..(90): Ceres Seq. ID no. 4908558
  misc_feature: Pfam Name: DUF1195 Pfam Description: Protein of unknown function (DUF1195)
  misc_feature (1)..(90): Homolog of NCBI NO: 18424975 NR Description: putative protein; protein id: At5g65650.1, by cDNA: 118150. [Arabidopsis thaliana] unknown [Arabidopsis thaliana] >gi|27754375|gb|AAO22636.1|
  misc_feature (1)..(61): Homolog of NCBI NO: 9858772 NR Description: BAC19.4 [Lycopersicon esculentum]
  misc_feature (1)..(60): Homolog of NCBI NO: 15234477 NR Description: hypothetical protein; protein id: At4g36660.1
  misc_feature (1)..(56): Homolog of NCBI NO: 28209490 NR Description: unknown protein [Oryza sativa (japonica
  misc_feature (1)..(48): Homolog of NCBI NO: 15222008 NR Description: hypothetical protein; protein id: At1g19380.1 thaliana] >gi|8778415|gb|AAF79423.1|AC025808_5 F18O14.10

SEQ ID NO: 71984 - DNA, 820 bp, Arabidopsis thaliana
  misc_feature (1)..(820): Ceres Seq. ID no. 4908848
  misc_feature: MA Experiment ID: 108434 Result: Up-regulated in Transcription
  misc_feature: MA Experiment 108434 PARAMETER Experiment Name: At_Root_Tips_cDNA_P Parameter: Tissue Value: Root Tips
attttcagattcaccgttttagaaattaaatcctctctataagaacctctccaaaaaccctaatttgtcatcatcactttcacaatcttcttcatcgatttctctcttccaaatctcccaaaagatgtcgaaccctagagttttcttcgacatgagtctcagcggtactcccatcggacggatcgagatggagcttttcgctgatacaaccccaaacacggcggagaatttccgtgctctctgtaccggcgagaaaggaatgggaaagctaggtaagccacttcacttcaaaggatcgatcttccaccgtgtgattcccggattcatgtgtcaaggaggtgatttcaccgccaagaacggaaccggtggtgaatcgatctacggtgctaagttcaaggacgagaactttatcaagaagcatacaggagctgggattctctcaatggctaactctggtcctaacactaacggatctcagttcttcatctgtaccgataagacgtcgtggttagatggtaagcacgttgtgtttggacaagttgttaaaggcttggacgtcgtgaaggcgattgagaaagttggatctgattctggaaagacttccaaagtcgttaccatcactgattgtggtcagctttcttagatctgagtgagaaagtgagagactttgatctttatgagtaataatggtgtcttttgctttcggttgttcttcctcttaccttaatggattattctgtttagggtttgagttttcgtttcagagtttgtaacaaaacccttttgtgttttctggggtttgaaataattatgagcttac

SEQ ID NO: 71985 - protein, 172 aa, Arabidopsis thaliana; identical to SEQ ID NO: 25632
  peptide (1)..(172): Ceres Seq. ID no. 4908849
  misc_feature (1)..(172): Homolog of NCBI NO: 15236211 NR Description: peptidylprolyl isomerase (cyclophilin); protein At4g34870.1, supported by cDNA: 37., supported by cDNA: supported by cDNA: gi_460967 [Arabidopsis thaliana]
  misc_feature (1)..(172): Homolog of NCBI NO: 3334157 NR Description: Peptidyl-prolyl cis-trans isomerase (PPIase)
  misc_feature (1)..(171): Homolog of NCBI NO: 11270316 NR Description: peptidylprolyl isomerase (EC 5.2.1.8) - Digitalis lanata >gi|1563719|emb|CAA69622.1| cyclophylin
  misc_feature (2)..(172): Homolog of NCBI NO: 18076088 NR Description: cyclophilin [Ricinus communis]
  misc_feature (1)..(171): Homolog of NCBI NO: 11270322 NR Description: peptidylprolyl isomerase (EC 5.2.1.8) - potato >gi|4559302|gb|AAD22975.1|AF126551_1 cyclophilin
  misc_feature (2)..(172): Homolog of NCBI NO: 21886603 NR Description: peptidylprolyl isomerase (cyclophilin) [Betula
  misc_feature (1)..(172): Homolog of NCBI NO: 18146786 NR Description: CYP1 [Vigna radiata]
  misc_feature (1)..(171): Homolog of NCBI NO: 11270318 NR Description: peptidylprolyl isomerase (EC 5.2.1.8) CYP18 - Digitalis lanata >gi|1561575|emb|CAA69598.1| cyclophilin
  misc_feature (1)..(172): Homolog of NCBI NO: 1076510 NR Description: peptidylprolyl isomerase (EC 5.2.1.8) Cyp -
  misc_feature (1)..(172): Homolog of NCBI NO: 29124975 NR Description: cyclophilin [Populus tremuloides]

SEQ ID NO: 71986 - protein, 163 aa, Arabidopsis thaliana; identical to SEQ ID NO: 25633
  peptide (1)..(163): Ceres Seq. ID no. 4908850
  misc_feature (1)..(163): Homolog of NCBI NO: 15236211 NR Description: peptidylprolyl isomerase (cyclophilin); protein At4g34870.1, supported by cDNA: 37., supported by cDNA: supported by cDNA: gi_460967 [Arabidopsis thaliana]
  misc_feature (1)..(163): Homolog of NCBI NO: 3334157 NR Description: Peptidyl-prolyl cis-trans isomerase (PPIase)
  misc_feature (1)..(162): Homolog of NCBI NO: 11270316 NR Description: peptidylprolyl isomerase (EC 5.2.1.8) - Digitalis lanata >gi|1563719|emb|CAA69622.1| cyclophylin
  misc_feature (1)..(163): Homolog of NCBI NO: 18076088 NR Description: cyclophilin [Ricinus communis]
  misc_feature (1)..(162): Homolog of NCBI NO: 11270322 NR Description: peptidylprolyl isomerase (EC 5.2.1.8) - potato >gi|4559302|gb|AAD22975.1|AF126551_1 cyclophilin
  misc_feature (1)..(163): Homolog of NCBI NO: 21886603 NR Description: peptidylprolyl isomerase (cyclophilin) [Betula
  misc_feature (1)..(163): Homolog of NCBI NO: 18146786 NR Description: CYP1 [Vigna radiata]
  misc_feature (1)..(162): Homolog of NCBI NO: 11270318 NR Description: peptidylprolyl isomerase (EC 5.2.1.8) CYP18 - Digitalis lanata >gi|1561575|emb|CAA69598.1| cyclophilin
  misc_feature (1)..(163): Homolog of NCBI NO: 1076510 NR Description: peptidylprolyl isomerase (EC 5.2.1.8) Cyp -
  misc_feature (1)..(163): Homolog of NCBI NO: 29124975 NR Description: cyclophilin [Populus tremuloides]

SEQ ID NO: 71987 - protein, 151 aa, Arabidopsis thaliana; identical to SEQ ID NO: 25634
  peptide (1)..(151): Ceres Seq. ID no. 4908851
  misc_feature (1)..(151): Homolog of NCBI NO: 15236211 NR Description: peptidylprolyl isomerase (cyclophilin); protein At4g34870.1, supported by cDNA: 37., supported by cDNA: supported by cDNA: gi_460967 [Arabidopsis thaliana]
  misc_feature (1)..(151): Homolog of NCBI NO: 3334157 NR Description: Peptidyl-prolyl cis-trans isomerase (PPIase)
  misc_feature (1)..(150): Homolog of NCBI NO: 11270316 NR Description: peptidylprolyl isomerase (EC 5.2.1.8) - Digitalis lanata >gi|1563719|emb|CAA69622.1| cyclophylin
  misc_feature (1)..(151): Homolog of NCBI NO: 18076088 NR Description: cyclophilin [Ricinus communis]
  misc_feature (1)..(150): Homolog of NCBI NO: 11270322 NR Description: peptidylprolyl isomerase (EC 5.2.1.8) - potato >gi|4559302|gb|AAD22975.1|AF126551_1 cyclophilin
  misc_feature (1)..(151): Homolog of NCBI NO: 21886603 NR Description: peptidylprolyl isomerase (cyclophilin) [Betula
  misc_feature (1)..(151): Homolog of NCBI NO: 18146786 NR Description: CYP1 [Vigna radiata]
  misc_feature (1)..(150): Homolog of NCBI NO: 11270318 NR Description: peptidylprolyl isomerase (EC 5.2.1.8) CYP18 - Digitalis lanata >gi|1561575|emb|CAA69598.1| cyclophilin
  misc_feature (1)..(151): Homolog of NCBI NO: 1076510 NR Description: peptidylprolyl isomerase (EC 5.2.1.8) Cyp -
  misc_feature (1)..(151): Homolog of NCBI NO: 29124975 NR Description: cyclophilin [Populus tremuloides]

SEQ ID NO: 71988 - DNA, 1348 bp, Arabidopsis thaliana
  misc_feature (1)..(1348): Ceres Seq. ID no. 4908863
  misc_feature: MA Experiment ID: 108434 Result: Down-regulated in Transcription
  misc_feature: MA Experiment 108434 PARAMETER Experiment Name: At_Root_Tips_cDNA_P Parameter: Tissue Value: Root Tips
  misc_feature: MA Experiment ID: 108573 Result: Up-regulated in Transcription
  misc_feature: MA Experiment 108573 PARAMETER Experiment Name: At_Drought_cDNA_P Parameter: Timepoint (hr) Value: 6
  misc_feature: MA Experiment 108573 PARAMETER Experiment Name: At_Drought_cDNA_P Parameter: Tissue Value: Aerial
  misc_feature: MA Experiment 108573 PARAMETER Experiment Name: At_Drought_cDNA_P Parameter: Treatment Value: Drought vs. No Drought
  misc_feature: MA Experiment ID: 108585 Result: Up-regulated in Transcription
  misc_feature: MA Experiment 108585 PARAMETER Experiment Name: At_5mM_NaNP_cDNA_P Parameter: Timepoint (hr) Value: 6
  misc_feature: MA Experiment 108585 PARAMETER Experiment Name: At_5mM_NaNP_cDNA_P Parameter: Tissue Value: Aerial
  misc_feature: MA Experiment 108585 PARAMETER Experiment Name: At_5mM_NaNP_cDNA_P Parameter: Treatment Value: null
  misc_feature: MA Experiment ID: 20000069 Result: Up-regulated in Transcription
  misc_feature: MA Experiment 20000069 PARAMETER Experiment Name: At_100uM_ABA_Mutants_cDNA_P Parameter: Plant Line Value: CS23
  misc_feature: MA Experiment 20000069 PARAMETER Experiment Name: At_100uM_ABA_Mutants_cDNA_P Parameter: Timepoint (hr) Value: 6
  misc_feature: MA Experiment 20000069 PARAMETER Experiment Name: At_100uM_ABA_Mutants_cDNA_P Parameter: Tissue Value: Aerial
  misc_feature: MA Experiment 20000069 PARAMETER Experiment Name: At_100uM_ABA_Mutants_cDNA_P Parameter: Treatment Value: 100uM ABA vs. No Treatment
  misc_feature: MA Experiment ID: 20000180 Result: Up-regulated in Transcription
  misc_feature: MA Experiment 20000180 PARAMETER Experiment Name: At_Germinating_Seeds_P Parameter: Age (hr) Value: 24 vs. 0
  misc_feature: MA Experiment 20000180 PARAMETER Experiment Name: At_Germinating_Seeds_P Parameter: Tissue Value: Germinating Seeds
  misc_feature: MA Experiment ID: 20000234 Result: Down-regulated in Transcription
  misc_feature: MA Experiment 20000234 PARAMETER Experiment Name: At_Siliques_P Parameter: Age (day) Value: 21
  misc_feature: MA Experiment 20000234 PARAMETER Experiment Name: At_Siliques_P Parameter: Organism Value: A. thaliana
  misc_feature: MA Experiment 20000234 PARAMETER Experiment Name: At_Siliques_P Parameter: Plant Line Value: WS
  misc_feature: MA Experiment 20000234 PARAMETER Experiment Name: At_Siliques_P Parameter: Tissue Value: Less Than 5mm Siliques vs. Whole Plant
  misc_feature: MA Experiment ID: 20000438 Result: Down-regulated in Transcription
  misc_feature: MA Experiment 20000438 PARAMETER Experiment Name: At_Shoots__P Parameter: Age (day) Value: 14
  misc_feature: MA Experiment 20000438 PARAMETER Experiment Name: At_Shoots__P Parameter: Tissue Value: Shoots vs. Whole Plant
  misc_feature: MA Experiment ID: 20000527 Result: Down-regulated in Transcription
  misc_feature: MA Experiment 20000527 PARAMETER Experiment Name: At_10percent_PEG_P Parameter: Age (day) Value: 20
  misc_feature: MA Experiment 20000527 PARAMETER Experiment Name: At_10percent_PEG_P Parameter: Organism Value: A. thaliana
  misc_feature: MA Experiment 20000527 PARAMETER Experiment Name: At_10percent_PEG_P Parameter: Plant Line Value: WS
  misc_feature: MA Experiment 20000527 PARAMETER Experiment Name: At_10percent_PEG_P Parameter: Timepoint (day) Value: 20
  misc_feature: MA Experiment 20000527 PARAMETER Experiment Name: At_10percent_PEG_P Parameter: Tissue Value: Whole Plant
  misc_feature: MA Experiment 20000527 PARAMETER Experiment Name: At_10percent_PEG_P Parameter: Treatment Value: 10percent PEG vs. No Treatment
  misc_feature: MA Experiment ID: 20001247 Result: Up-regulated in Transcription
  misc_feature: MA Experiment 20001247 PARAMETER Experiment Name: At_Far-red-induction_P Parameter: Age (day) Value: 7
  misc_feature: MA Experiment 20001247 PARAMETER Experiment Name: At_Far-red-induction_P Parameter: Light Value: Far-red vs. White
  misc_feature: MA Experiment 20001247 PARAMETER Experiment Name: At_Far-red-induction_P Parameter: Organism Value: A. thaliana
  misc_feature: MA Experiment 20001247 PARAMETER Experiment Name: At_Far-red-induction_P Parameter: Plant Line Value: Columbia
  misc_feature: MA Experiment 20001247 PARAMETER Experiment Name: At_Far-red-induction_P Parameter: Timepoint (hr) Value: 1
  misc_feature: MA Experiment 20001247 PARAMETER Experiment Name: At_Far-red-induction_P Parameter: Tissue Value: Whole Plant
  misc_feature: MA Experiment ID: 20001905 Result: Up-regulated in Transcription
  misc_feature: MA Experiment 20001905 PARAMETER Experiment Name: At_Drought_Reproduction_P Parameter: Age (day) Value: 40
  misc_feature: MA Experiment 20001905 PARAMETER Experiment Name: At_Drought_Reproduction_P Parameter: Organism Value: A. thaliana
  misc_feature: MA Experiment 20001905 PARAMETER Experiment Name: At_Drought_Reproduction_P Parameter: Plant Line Value: WS
  misc_feature: MA Experiment 20001905 PARAMETER Experiment Name: At_Drought_Reproduction_P Parameter: Timepoint (day) Value: 10
  misc_feature: MA Experiment 20001905 PARAMETER Experiment Name: At_Drought_Reproduction_P Parameter: Tissue Value: Rosettes
  misc_feature: MA Experiment 20001905 PARAMETER Experiment Name: At_Drought_Reproduction_P Parameter: Treatment Value: Drought vs. No Drought
atctatcttctccacgttactaccacctaacctctcatccaccttttctcctttaagcatatttcatttcatctccgaaaggaattgtatcgttcctcacacacgcctctcatctcttatccattcttgtccttttttcagctcaacaagaatggataattgtactggagaaaatcccatggcttctcagttgaacattctccgatgcccgttcttgaggaacatcaatgagcccactaacctctctttctcttcatccttgccttttcccatccctgcaagagctgggaaaggacctatatttgaagatggtcccaattttgatacggcgtttaggcttttccatggccaagatggagttgtccctctctctgacaccgctcgaactgaagcccagaagcctgtgcctgtattccatccacttgctgctaaggcggccactattagtctctcatcctttggatctggagggccttttggatttgatgcattttctgacatgtttaaaaatcaaaagaagaagtcagattcatccaaaaataagggaggaaaccacgaagccatgggcgacgaatggcttaaaacaggaaactgcccaatagcaaaatcatatcgagctgtaagtggtgtggcaccacttgtggcaaagatcctgcaaccccctccaggcatgaaatttaaatgccctcaagcaatagtcacagctcgagcagcgatatcaaaaacacctttcgccaagaacctccgtccacaacctttaccagctaaagtactagtgatcgggatgctgggcatggcgttaaatgtgcctttaggggtctggagagagcacactgaaaagttttcggcatcttggtttatagctcttcacgcagcggttccattcataggaatactgagaaagtcagtgttgatgcctaaaacagctatggtattcaccatagcagcatcagttttgggacaggtgattgggtcaagagcagagaggcggagactcaagtctgtagctgagaagaagttgacattggaggtaccaaatccgtcttctgttgaagcagatcagatgcaatttgccggagtttcatcagatggaagatgcggtgataaagtggtgatgaagtggaatcccatgatgcttgatgttgcaagccctgtgtcttccggagcagctactgttgtctgctaaaaggattttgtaattctcttcgaggatttatatatataattgtttttcttgtatttttttcggctgattgtatttaaaaagtttcttaatgtttgagaaaaacaagaataaagccattttttaaactgttaattgtattttaatgtaaaagacttgtttgat

SEQ ID NO: 71989 - protein, 394 aa, Arabidopsis thaliana; identical to SEQ ID NO: 30061
  peptide (1)..(394): Ceres Seq. ID no. 4908864
  misc_feature (51)..(394): Homolog of NCBI NO: 15234866 NR Description: putative protein; protein id: At4g25030.1, by cDNA: 16463. [Arabidopsis thaliana] >gi|7485448|pir||T05524
  misc_feature (57)..(367): Homolog of NCBI NO: 21595083 NR Description: unknown [Arabidopsis thaliana]
  misc_feature (57)..(367): Homolog of NCBI NO: 30694759 NR Description: expressed protein [Arabidopsis thaliana] gene_id:MFC19.8~pir||T05524~similar to unknown protein thaliana] >gi|27754261|gb|AAO22584.1| unknown protein
  misc_feature (66)..(367): Homolog of NCBI NO: 21954084 NR Description: unknown protein [Arabidopsis thaliana]
  misc_feature (44)..(393): Homolog of NCBI NO: 37537220 NR Description: unknown protein [Oryza sativa (japonica
  misc_feature (175)..(390): Homolog of NCBI NO: 34897958 NR Description: contains ESTs AU068434(C30250)~similar to Oryza sativa chromosome 7,
  misc_feature (65)..(174): Homolog of NCBI NO: 34897958 NR Description: contains ESTs AU068434(C30250)~similar to Oryza sativa chromosome 7,
  misc_feature (133)..(390): Homolog of NCBI NO: 33146734 NR Description: unknown protein [Oryza sativa (japonica

SEQ ID NO: 71990 - protein, 344 aa, Arabidopsis thaliana; identical to SEQ ID NO: 30062
  peptide (1)..(344): Ceres Seq. ID no. 4908865
  misc_feature (1)..(344): Homolog of NCBI NO: 15234866 NR Description: putative protein; protein id: At4g25030.1, by cDNA: 16463. [Arabidopsis thaliana] >gi|7485448|pir||T05524
  misc_feature (7)..(317): Homolog of NCBI NO: 21595083 NR Description: unknown [Arabidopsis thaliana]
  misc_feature (7)..(317): Homolog of NCBI NO: 30694759 NR Description: expressed protein [Arabidopsis thaliana] gene_id:MFC19.8~pir||T05524~similar to unknown protein thaliana] >gi|27754261|gb|AAO22584.1| unknown protein
  misc_feature (16)..(317): Homolog of NCBI NO: 21954084 NR Description: unknown protein [Arabidopsis thaliana]
  misc_feature (1)..(343): Homolog of NCBI NO: 37537220 NR Description: unknown protein [Oryza sativa (japonica
  misc_feature (125)..(340): Homolog of NCBI NO: 34897958 NR Description: contains ESTs AU068434(C30250)~similar to Oryza sativa chromosome 7,
  misc_feature (15)..(124): Homolog of NCBI NO: 34897958 NR Description: contains ESTs AU068434(C30250)~similar to Oryza sativa chromosome 7,
  misc_feature (83)..(340): Homolog of NCBI NO: 33146734 NR Description: unknown protein [Oryza sativa (japonica

SEQ ID NO: 71991 - protein, 335 aa, Arabidopsis thaliana; identical to SEQ ID NO: 30063
  peptide (1)..(335): Ceres Seq. ID no. 4908866
  misc_feature (1)..(335): Homolog of NCBI NO: 15234866 NR Description: putative protein; protein id: At4g25030.1, by cDNA: 16463. [Arabidopsis thaliana] >gi|7485448|pir||T05524
  misc_feature (1)..(308): Homolog of NCBI NO: 21595083 NR Description: unknown [Arabidopsis thaliana]
  misc_feature (1)..(308): Homolog of NCBI NO: 30694759 NR Description: expressed protein [Arabidopsis thaliana] gene_id:MFC19.8~pir||T05524~similar to unknown protein thaliana] >gi|27754261|gb|AAO22584.1| unknown protein
  misc_feature (7)..(308): Homolog of NCBI NO: 21954084 NR Description: unknown protein [Arabidopsis thaliana]
  misc_feature (1)..(334): Homolog of NCBI NO: 37537220 NR Description: unknown protein [Oryza sativa (japonica
  misc_feature (116)..(331): Homolog of NCBI NO: 34897958 NR Description: contains ESTs AU068434(C30250)~similar to Oryza sativa chromosome 7,
  misc_feature (6)..(115): Homolog of NCBI NO: 34897958 NR Description: contains ESTs AU068434(C30250)~similar to Oryza sativa chromosome 7,
  misc_feature (74)..(331): Homolog of NCBI NO: 33146734 NR Description: unknown protein [Oryza sativa (japonica

SEQ ID NO: 71992 - DNA, 843 bp, Arabidopsis thaliana
  misc_feature (1)..(843): Ceres Seq. ID no. 4909009
  misc_feature: MA Experiment ID: 20000306 Result: Down-regulated in Transcription
  misc_feature: MA Experiment 20000306 PARAMETER Experiment Name: At_Germinating_Seeds_Sub_P Parameter: Age (hr) Value: 6 vs. 0
  misc_feature: MA Experiment 20000306 PARAMETER Experiment Name: At_Germinating_Seeds_Sub_P Parameter: Organism Value: A. thaliana
  misc_feature: MA Experiment 20000306 PARAMETER Experiment Name: At_Germinating_Seeds_Sub_P Parameter: Plant Line Value: WS
  misc_feature: MA Experiment 20000306 PARAMETER Experiment Name: At_Germinating_Seeds_Sub_P Parameter: Tissue Value: Germinating Seeds
  misc_feature: MA Experiment ID: 20000307 Result: Down-regulated in Transcription
  misc_feature: MA Experiment 20000307 PARAMETER Experiment Name: At_Germinating_Seeds_Sub_P Parameter: Age (hr) Value: 24 vs. 0
  misc_feature: MA Experiment 20000307 PARAMETER Experiment Name: At_Germinating_Seeds_Sub_P Parameter: Organism Value: A. thaliana
  misc_feature: MA Experiment 20000307 PARAMETER Experiment Name: At_Germinating_Seeds_Sub_P Parameter: Plant Line Value: WS
  misc_feature: MA Experiment 20000307 PARAMETER Experiment Name: At_Germinating_Seeds_Sub_P Parameter: Tissue Value: Germinating Seeds
  misc_feature: MA Experiment ID: 20000314 Result: Down-regulated in Transcription
  misc_feature: MA Experiment 20000314 PARAMETER Experiment Name: At_14day_Shoots-Roots_Sub_P Parameter: Age (day) Value: 14
  misc_feature: MA Experiment 20000314 PARAMETER Experiment Name: At_14day_Shoots-Roots_Sub_P Parameter: Organism Value: A. thaliana
  misc_feature: MA Experiment 20000314 PARAMETER Experiment Name: At_14day_Shoots-Roots_Sub_P Parameter: Plant Line Value: WS
  misc_feature: MA Experiment 20000314 PARAMETER Experiment Name: At_14day_Shoots-Roots_Sub_P Parameter: Tissue Value: Roots vs. Whole Plant
  misc_feature: MA Experiment ID: 20000355 Result: Down-regulated in Transcription
  misc_feature: MA Experiment 20000355 PARAMETER Experiment Name: At_Siliques_Sub_P Parameter: Age (day) Value: 21
  misc_feature: MA Experiment 20000355 PARAMETER Experiment Name: At_Siliques_Sub_P Parameter: Organism Value: A. thaliana
  misc_feature: MA Experiment 20000355 PARAMETER Experiment Name: At_Siliques_Sub_P Parameter: Plant Line Value: WS
  misc_feature: MA Experiment 20000355 PARAMETER Experiment Name: At_Siliques_Sub_P Parameter: Tissue Value: Less Than 5mm Siliques vs. Whole Plant
  misc_feature: MA Experiment ID: 20000440 Result: Up-regulated in Transcription
  misc_feature: MA Experiment 20000440 PARAMETER Experiment Name: At_Closed-Flower__Sub_P Parameter: Tissue Value: Closed Flower vs. Whole Plant
atgaaaaaacacacacaccaaaaatatcagatatctcaaacaatgtcttcagtttttggatctgtccatatcttggccatgatagccatacaactcctccttacacacagtgtttcatctctgaaccttaccaatgcgtatctgcaccacaaatgcagcaacactcaaggaaaatataagcaggggagcgcgttcgagaaaaatctcaacttagtcctcagtaccatcacctcgattggaaattttcgtgacggtttccgctacaccgaagaaggtgaggatcccaataacgtctttgtcatgttccagtgtcgcggcgactcctactggtccaagtgccccccttgcattagcaccgccgtctctgggcttcgtaggagatgtccaagaaataagggagcaataatatggtatgaccaatgtcttttaaagatatcttcagttgcctccttcaataagatagattatgagaacgatttctatttgtccaacccaaacaacatgagtgatcgggggttgttcaacaaggagacgtcggctctcctggagaagctggcatataaagcctccgatagaaacaacttggatggtaaacaattggtgttgtacgcagcaggggagaagagaattgggacaaagaaggtgtatgcaatggtgcagtgtacgaaagacttaatatttacaaagtgctttgagtgtttggaagggattttgaggaagtttccacagtgttgtgacggtaaacgaggagggagagttttcggtacgagctgtaactttaggtatgagttatatccttttcttagaaactacagcaacagtacaatgagagctccatattaa

SEQ ID NO: 71993 - protein, 280 aa, Arabidopsis thaliana
  peptide (1)..(280): Ceres Seq. ID no. 4909010
  misc_feature (215)..(269): Pfam Name: Domain of unknown function DUF26 Pfam Description: Domain of unknown function DUF26
  misc_feature (15)..(280): Homolog of NCBI NO: 15233366 NR Description: pollen coat receptor kinase, putative; protein At4g20670.1 [Arabidopsis thaliana] >gi|7485931|pir||T10609
  misc_feature (15)..(270): Homolog of NCBI NO: 15233235 NR Description: receptor kinase common family, putative; protein At3g21990.1 [Arabidopsis thaliana] >gi|9279756|dbj|BAB01382.1| similarity to receptor kinase~gene_id:MZN24.17 [Arabidopsis
  misc_feature (15)..(261): Homolog of NCBI NO: 15233364 NR Description: receptor kinase common family, 3' partial, protein id: At4g20650.1 [Arabidopsis thaliana]
  misc_feature (15)..(261): Homolog of NCBI NO: 18415518 NR Description: putative protein; protein id: At4g20530.1 thaliana] >gi|18415520|ref|NP_567604.1| putative protein; protein At4g20540.1 [Arabidopsis thaliana] >gi|18415522|ref|NP_567605.1|
  misc_feature (149)..(270): Homolog of NCBI NO: 15233231 NR Description: hypothetical protein; protein id: At3g21980.1
  misc_feature (15)..(124): Homolog of NCBI NO: 15233231 NR Description: hypothetical protein; protein id: At3g21980.1
  misc_feature (15)..(253): Homolog of NCBI NO: 9279755 NR Description: emb|CAB45833.1~gene_id:MZN24.16~similar to
  misc_feature (25)..(276): Homolog of NCBI NO: 15233368 NR Description: putative protein; protein id: At4g20680.1
  misc_feature (25)..(276): Homolog of NCBI NO: 15233236 NR Description: hypothetical protein; protein id: At3g22000.1 thaliana] >gi|9279757|dbj|BAB01383.1| contains similarity to
  misc_feature (6)..(269): Homolog of NCBI NO: 15233238 NR Description: hypothetical protein; protein id: At3g22010.1 thaliana] >gi|9279758|dbj|BAB01384.1| contains similarity to
MKKHTHQKYQISQTMSSVFGSVHILAMIAIQLLLTHSVSSLNLTNAYLHHKCSNTQGKYKQGSAFEKNLNLVLSTITSIGNFRDGFRYTEEGEDPNNVFVMFQCRGDSYWSKCPPCISTAVSGLRRRCPRNKGAIIWYDQCLLKISSVASFNKIDYENDFYLSNPNNMSDRGLFNKETSALLEKLAYKASDRNNLDGKQLVLYAAGEKRIGTKKVYAMVQCTKDLIFTKCFECLEGILRKFPQCCDGKRGGRVFGTSCNFRYELYPFLRNYSNSTMRAPY

SEQ ID NO: 71994 - protein, 266 aa, Arabidopsis thaliana
  peptide (1)..(266): Ceres Seq. ID no. 4909011
  misc_feature (201)..(255): Pfam Name: Domain of unknown function DUF26 Pfam Description: Domain of unknown function DUF26
  misc_feature (1)..(266): Homolog of NCBI NO: 15233366 NR Description: pollen coat receptor kinase, putative; protein At4g20670.1 [Arabidopsis thaliana] >gi|7485931|pir||T10609
  misc_feature (1)..(256): Homolog of NCBI NO: 15233235 NR Description: receptor kinase common family, putative; protein At3g21990.1 [Arabidopsis thaliana] >gi|9279756|dbj|BAB01382.1| similarity to receptor kinase~gene_id:MZN24.17 [Arabidopsis
  misc_feature (1)..(247): Homolog of NCBI NO: 15233364 NR Description: receptor kinase common family, 3' partial, protein id: At4g20650.1 [Arabidopsis thaliana]
  misc_feature (1)..(247): Homolog of NCBI NO: 18415518 NR Description: putative protein; protein id: At4g20530.1 thaliana] >gi|18415520|ref|NP_567604.1| putative protein; protein At4g20540.1 [Arabidopsis thaliana] >gi|18415522|ref|NP_567605.1|
  misc_feature (135)..(256): Homolog of NCBI NO: 15233231 NR Description: hypothetical protein; protein id: At3g21980.1
  misc_feature (1)..(110): Homolog of NCBI NO: 15233231 NR Description: hypothetical protein; protein id: At3g21980.1
  misc_feature (1)..(239): Homolog of NCBI NO: 9279755 NR Description: emb|CAB45833.1~gene_id:MZN24.16~similar to
  misc_feature (11)..(262): Homolog of NCBI NO: 15233368 NR Description: putative protein; protein id: At4g20680.1
  misc_feature (11)..(262): Homolog of NCBI NO: 15233236 NR Description: hypothetical protein; protein id: At3g22000.1 thaliana] >gi|9279757|dbj|BAB01383.1| contains similarity to
  misc_feature (1)..(255): Homolog of NCBI NO: 15233238 NR Description: hypothetical protein; protein id: At3g22010.1 thaliana] >gi|9279758|dbj|BAB01384.1| contains similarity to
MSSVFGSVHILAMIAIQLLLTHSVSSLNLTNAYLHHKCSNTQGKYKQGSAFEKNLNLVLSTITSIGNFRDGFRYTEEGEDPNNVFVMFQCRGDSYWSKCPPCISTAVSGLRRRCPRNKGAIIWYDQCLLKISSVASFNKIDYENDFYLSNPNNMSDRGLFNKETSALLEKLAYKASDRNNLDGKQLVLYAAGEKRIGTKKVYAMVQCTKDLIFTKCFECLEGILRKFPQCCDGKRGGRVFGTSCNFRYELYPFLRNYSNSTMRAPY

SEQ ID NO: 71995 - protein, 254 aa, Arabidopsis thaliana
  peptide (1)..(254): Ceres Seq. ID no. 4909012
  misc_feature (189)..(243): Pfam Name: Domain of unknown function DUF26 Pfam Description: Domain of unknown function DUF26
  misc_feature (1)..(254): Homolog of NCBI NO: 15233366 NR Description: pollen coat receptor kinase, putative; protein At4g20670.1 [Arabidopsis thaliana] >gi|7485931|pir||T10609
  misc_feature (1)..(244): Homolog of NCBI NO: 15233235 NR Description: receptor kinase common family, putative; protein At3g21990.1 [Arabidopsis thaliana] >gi|9279756|dbj|BAB01382.1| similarity to receptor kinase~gene_id:MZN24.17 [Arabidopsis
  misc_feature (1)..(235): Homolog of NCBI NO: 15233364 NR Description: receptor kinase common family, 3' partial, protein id: At4g20650.1 [Arabidopsis thaliana]
  misc_feature (1)..(235): Homolog of NCBI NO: 18415518 NR Description: putative protein; protein id: At4g20530.1 thaliana] >gi|18415520|ref|NP_567604.1| putative protein; protein At4g20540.1 [Arabidopsis thaliana] >gi|18415522|ref|NP_567605.1|
  misc_feature (123)..(244): Homolog of NCBI NO: 15233231 NR Description: hypothetical protein; protein id: At3g21980.1
  misc_feature (1)..(98): Homolog of NCBI NO: 15233231 NR Description: hypothetical protein; protein id: At3g21980.1
  misc_feature (1)..(227): Homolog of NCBI NO: 9279755 NR Description: emb|CAB45833.1~gene_id:MZN24.16~similar to
  misc_feature (1)..(250): Homolog of NCBI NO: 15233368 NR Description: putative protein; protein id: At4g20680.1
  misc_feature (1)..(250): Homolog of NCBI NO: 15233236 NR Description: hypothetical protein; protein id: At3g22000.1 thaliana] >gi|9279757|dbj|BAB01383.1| contains similarity to
  misc_feature (1)..(243): Homolog of NCBI NO: 15233238 NR Description: hypothetical protein; protein id: At3g22010.1 thaliana] >gi|9279758|dbj|BAB01384.1| contains similarity to
MIAIQLLLTHSVSSLNLTNAYLHHKCSNTQGKYKQGSAFEKNLNLVLSTITSIGNFRDGFRYTEEGEDPNNVFVMFQCRGDSYWSKCPPCISTAVSGLRRRCPRNKGAIIWYDQCLLKISSVASFNKIDYENDFYLSNPNNMSDRGLFNKETSALLEKLAYKASDRNNLDGKQLVLYAAGEKRIGTKKVYAMVQCTKDLIFTKCFECLEGILRKFPQCCDGKRGGRVFGTSCNFRYELYPFLRNYSNSTMRAPY

SEQ ID NO: 71996 - DNA, 1107 bp, Arabidopsis thaliana
  misc_feature (1)..(1107): Ceres Seq. ID no. 4909150
  misc_feature: MA Experiment ID: 108434 Result: Down-regulated in Transcription
  misc_feature: MA Experiment 108434 PARAMETER Experiment Name: At_Root_Tips_cDNA_P Parameter: Tissue Value: Root Tips
  misc_feature: MA Experiment ID: 108576 Result: Up-regulated in Transcription
  misc_feature: MA Experiment 108576 PARAMETER Experiment Name: At_42deg_Heat_cDNA_P Parameter: Temperature (deg C) Value: 42 vs. 22
  misc_feature: MA Experiment 108576 PARAMETER Experiment Name: At_42deg_Heat_cDNA_P Parameter: Timepoint (hr) Value: 1
  misc_feature: MA Experiment 108576 PARAMETER Experiment Name: At_42deg_Heat_cDNA_P Parameter: Tissue Value: Aerial
  misc_feature: MA Experiment ID: 108577 Result: Up-regulated in Transcription
  misc_feature: MA Experiment 108577 PARAMETER Experiment Name: At_42deg_Heat_cDNA_P Parameter: Temperature (deg C) Value: 42 vs. 22
  misc_feature: MA Experiment 108577 PARAMETER Experiment Name: At_42deg_Heat_cDNA_P Parameter: Timepoint (hr) Value: 6
  misc_feature: MA Experiment 108577 PARAMETER Experiment Name: At_42deg_Heat_cDNA_P Parameter: Tissue Value: Aerial
  misc_feature: MA Experiment ID: 20000111 Result: Up-regulated in Transcription
  misc_feature: MA Experiment 20000111 PARAMETER Experiment Name: At_42deg_Heat_cDNA_P Parameter: Temperature (deg C) Value: 42 vs. 22
  misc_feature: MA Experiment 20000111 PARAMETER Experiment Name: At_42deg_Heat_cDNA_P Parameter: Timepoint (hr) Value: 6
  misc_feature: MA Experiment 20000111 PARAMETER Experiment Name: At_42deg_Heat_cDNA_P Parameter: Tissue Value: Aerial
  misc_feature: MA Experiment ID: 20000113 Result: Up-regulated in Transcription
  misc_feature: MA Experiment 20000113 PARAMETER Experiment Name: At_42deg_Heat_cDNA_P Parameter: Temperature (deg C) Value: 42 vs. 22
  misc_feature: MA Experiment 20000113 PARAMETER Experiment Name: At_42deg_Heat_cDNA_P Parameter: Timepoint (hr) Value: 8
  misc_feature: MA Experiment 20000113 PARAMETER Experiment Name: At_42deg_Heat_cDNA_P Parameter: Tissue Value: Aerial
  misc_feature: MA Experiment ID: 20000144 Result: Up-regulated in Transcription
  misc_feature: MA Experiment 20000144 PARAMETER Experiment Name: At_42deg_Heat_cDNA_P Parameter: Temperature (deg C) Value: 42 vs. 22
  misc_feature: MA Experiment 20000144 PARAMETER Experiment Name: At_42deg_Heat_cDNA_P Parameter: Timepoint (hr) Value: 1
  misc_feature: MA Experiment 20000144 PARAMETER Experiment Name: At_42deg_Heat_cDNA_P Parameter: Tissue Value: Aerial
  misc_feature: MA Experiment ID: 20000171 Result: Up-regulated in Transcription
  misc_feature: MA Experiment 20000171 PARAMETER Experiment Name: At_42deg_Heat_P Parameter: Age (day) Value: 14
  misc_feature: MA Experiment 20000171 PARAMETER Experiment Name: At_42deg_Heat_P Parameter: Organism Value: A. thaliana
  misc_feature: MA Experiment 20000171 PARAMETER Experiment Name: At_42deg_Heat_P Parameter: Plant Line Value: WS
  misc_feature: MA Experiment 20000171 PARAMETER Experiment Name: At_42deg_Heat_P Parameter: Temperature (deg C) Value: 42 vs. 22
  misc_feature: MA Experiment 20000171 PARAMETER Experiment Name: At_42deg_Heat_P Parameter: Timepoint (hr) Value: 1
  misc_feature: MA Experiment 20000171 PARAMETER Experiment Name: At_42deg_Heat_P Parameter: Tissue Value: Aerial
  misc_feature: MA Experiment ID: 20000173 Result: Up-regulated in Transcription
  misc_feature: MA Experiment 20000173 PARAMETER Experiment Name: At_42deg_Heat_P Parameter: Age (day) Value: 14
  misc_feature: MA Experiment 20000173 PARAMETER Experiment Name: At_42deg_Heat_P Parameter: Organism Value: A. thaliana
  misc_feature: MA Experiment 20000173 PARAMETER Experiment Name: At_42deg_Heat_P Parameter: Plant Line Value: WS
  misc_feature: MA Experiment 20000173 PARAMETER Experiment Name: At_42deg_Heat_P Parameter: Temperature (deg C) Value: 42 vs. 22
  misc_feature: MA Experiment 20000173 PARAMETER Experiment Name: At_42deg_Heat_P Parameter: Timepoint (hr) Value: 6
  misc_feature: MA Experiment 20000173 PARAMETER Experiment Name: At_42deg_Heat_P Parameter: Tissue Value: Aerial
  misc_feature: MA Experiment ID: 20000184 Result: Down-regulated in Transcription
  misc_feature: MA Experiment 20000184 PARAMETER Experiment Name: At_Shoots__P Parameter: Age (day) Value: 7
  misc_feature: MA Experiment 20000184 PARAMETER Experiment Name: At_Shoots__P Parameter: Tissue Value: Shoots vs. Whole Plant
  misc_feature: MA Experiment ID: 20000265 Result: Down-regulated in Transcription
  misc_feature: MA Experiment 20000265 PARAMETER Experiment Name: At_Open_Flower_P Parameter: Age (day) Value: 21
  misc_feature: MA Experiment 20000265 PARAMETER Experiment Name: At_Open_Flower_P Parameter: Plant Line Value: WS
  misc_feature: MA Experiment 20000265 PARAMETER Experiment Name: At_Open_Flower_P Parameter: Tissue Value: Closed Flower vs. Whole Plant
  misc_feature: MA Experiment ID: 20000286 Result: Down-regulated in Transcription
  misc_feature: MA Experiment 20000286 PARAMETER Experiment Name: At_Open_Flower_P Parameter: Age (day) Value: 21
  misc_feature: MA Experiment 20000286 PARAMETER Experiment Name: At_Open_Flower_P Parameter: Plant Line Value: WS
  misc_feature: MA Experiment 20000286 PARAMETER Experiment Name: At_Open_Flower_P Parameter: Tissue Value: Half Open vs. Whole Plant
aaaacactagagataaccctagaaagatctctctcgatctctggttcgaagaaaatccaccatttccgattgttctttctctttgacaaaacccagatagataaaaattcgttccaattccagtgagctccggaaatggcgtccttcaagttgatgtcttcttccaattccgacttgtctcgccgtaattcttcttctgcttcatcttccccttctataagatcatcgcaccatctccgaccaaatcctcacgccgatcactccagaatcagtttcgcttacggcggaggagtcaacgattacactttcgcgtctgattcaaagcccttcgagatggcgattgatgttgatcggagtatcggagatcggaacagcgttaacaacggaaagagtgttgacgatgtttggaaagagattgtatctggagagcaaaagacgatcatgatgaaggaagaagaaccagaagatataatgacacttgaggatttcttagcgaaagcagaaatggacgagggagcttcagatgaaatcgatgtgaagattccaacggagagactcaacaacgacggtagctatacatttgattttccgatgcagcgacacagttcgttccagatggttgaaggatcaatgggtggaggagtaacgagaggaaagagagggagagtgatgatggaggcaatggataaagctgcagctcagagacagaagaggatgatcaagaaccgtgaatccgctgctaggtctcgagagaggaaacaggcttatcaggttgagttagagactttggctgccaagttagaggaggagaatgagcagcttttgaaggagattgaagagagcactaaagagagatacaagaagctcatggaggttctgattccggtcgatgagaaaccaaggccaccgtcgaggcccttaagcaggagccattccttggaatggtgaagtgtggtaaaaaaaacttttgtatgtaaaaaaaataaaaacatatgggcttgattactatattataatctatatagtaaagtgatggtgatatggttagtacttagttacctgtaatgtatctaagggatgtaatggataatacatagctttttgctg

SEQ ID NO: 71997 - protein, 270 aa, Arabidopsis thaliana; identical to SEQ ID NO: 23727
  peptide (1)..(270): Ceres Seq. ID no. 4909151
  misc_feature (185)..(249): Pfam Name: bZIP transcription factor Pfam Description: bZIP transcription factor
  misc_feature (1)..(270): Homolog of NCBI NO: 15219608 NR Description: G-box binding factor 4, GBF4; protein id:
  misc_feature (68)..(270): Homolog of NCBI NO: 21554353 NR Description: unknown [Arabidopsis thaliana]
  misc_feature (68)..(270): Homolog of NCBI NO: 15240086 NR Description: bZIP transcription factor, G-box binding factor protein id: At5g44080.1, supported by cDNA: 25211., supported by gi_18175621, supported by cDNA: gi_20465650 [Arabidopsis binding
  misc_feature (113)..(270): Homolog of NCBI NO: 7489466 NR Description: DNA binding protein - rice
  misc_feature (113)..(270): Homolog of NCBI NO: 7638404 NR Description: OSE2 [Oryza sativa]
  misc_feature (109)..(270): Homolog of NCBI NO: 29367541 NR Description: OSE2-like protein [Oryza sativa (japonica
  misc_feature (113)..(270): Homolog of NCBI NO: 34908608 NR Description: putative DNA binding protein [Oryza sativa
  misc_feature (85)..(235): Homolog of NCBI NO: 26451276 NR Description: putative bZIP transcription factor AtbZIP12 /
  misc_feature (85)..(235): Homolog of NCBI NO: 7487620 NR Description: probable bZIP transcription factor [imported] -
  misc_feature (85)..(235): Homolog of NCBI NO: 18405590 NR Description: bZIP family transcription factor; protein id: supported by cDNA: 114632., supported by cDNA: gi_13346156 thaliana] >gi|13346157|gb|AAK19602.1|AF334209_1 bZIP putative

SEQ ID NO: 71998 - protein, 264 aa, Arabidopsis thaliana; identical to SEQ ID NO: 23728
  peptide (1)..(264): Ceres Seq. ID no. 4909152
  misc_feature (179)..(243): Pfam Name: bZIP transcription factor Pfam Description: bZIP transcription factor
  misc_feature (1)..(264): Homolog of NCBI NO: 15219608 NR Description: G-box binding factor 4, GBF4; protein id:
  misc_feature (62)..(264): Homolog of NCBI NO: 21554353 NR Description: unknown [Arabidopsis thaliana]
  misc_feature (62)..(264): Homolog of NCBI NO: 15240086 NR Description: bZIP transcription factor, G-box binding factor protein id: At5g44080.1, supported by cDNA: 25211., supported by gi_18175621, supported by cDNA: gi_20465650 [Arabidopsis binding
  misc_feature (107)..(264): Homolog of NCBI NO: 7489466 NR Description: DNA binding protein - rice
  misc_feature (107)..(264): Homolog of NCBI NO: 7638404 NR Description: OSE2 [Oryza sativa]
  misc_feature (103)..(264): Homolog of NCBI NO: 29367541 NR Description: OSE2-like protein [Oryza sativa (japonica
  misc_feature (107)..(264): Homolog of NCBI NO: 34908608 NR Description: putative DNA binding protein [Oryza sativa
  misc_feature (79)..(229): Homolog of NCBI NO: 26451276 NR Description: putative bZIP transcription factor AtbZIP12 /
  misc_feature (79)..(229): Homolog of NCBI NO: 7487620 NR Description: probable bZIP transcription factor [imported] -
  misc_feature (79)..(229): Homolog of NCBI NO: 18405590 NR Description: bZIP family transcription factor; protein id: supported by cDNA: 114632., supported by cDNA: gi_13346156 thaliana] >gi|13346157|gb|AAK19602.1|AF334209_1 bZIP putative

SEQ ID NO: 71999 - protein, 204 aa, Arabidopsis thaliana; identical to SEQ ID NO: 23729
  peptide (1)..(204): Ceres Seq. ID no. 4909153
  misc_feature (119)..(183): Pfam Name: bZIP transcription factor Pfam Description: bZIP transcription factor
  misc_feature (1)..(204): Homolog of NCBI NO: 15219608 NR Description: G-box binding factor 4, GBF4; protein id:
  misc_feature (2)..(204): Homolog of NCBI NO: 21554353 NR Description: unknown [Arabidopsis thaliana]
  misc_feature (2)..(204): Homolog of NCBI NO: 15240086 NR Description: bZIP transcription factor, G-box binding factor protein id: At5g44080.1, supported by cDNA: 25211., supported by gi_18175621, supported by cDNA: gi_20465650 [Arabidopsis binding
  misc_feature (47)..(204): Homolog of NCBI NO: 7489466 NR Description: DNA binding protein - rice
  misc_feature (47)..(204): Homolog of NCBI NO: 7638404 NR Description: OSE2 [Oryza sativa]
  misc_feature (43)..(204): Homolog of NCBI NO: 29367541 NR Description: OSE2-like protein [Oryza sativa (japonica
  misc_feature (47)..(204): Homolog of NCBI NO: 34908608 NR Description: putative DNA binding protein [Oryza sativa
  misc_feature (19)..(169): Homolog of NCBI NO: 26451276 NR Description: putative bZIP transcription factor AtbZIP12 /
  misc_feature (19)..(169): Homolog of NCBI NO: 7487620 NR Description: probable bZIP transcription factor [imported] -
  misc_feature (19)..(169): Homolog of NCBI NO: 18405590 NR Description: bZIP family transcription factor; protein id: supported by cDNA: 114632., supported by cDNA: gi_13346156 thaliana] >gi|13346157|gb|AAK19602.1|AF334209_1 bZIP putative

SEQ ID NO: 72000 - DNA, 815 bp, Arabidopsis thaliana
  misc_feature (1)..(815): Ceres Seq. ID no. 4909291
  misc_feature: MA Experiment ID: 108434 Result: Up-regulated in Transcription
  misc_feature: MA Experiment 108434 PARAMETER Experiment Name: At_Root_Tips_cDNA_P Parameter: Tissue Value: Root Tips
  misc_feature: MA Experiment ID: 108464 Result: Up-regulated in Transcription
  misc_feature: MA Experiment 108464 PARAMETER Experiment Name: At_Germinating_Seeds_cDNA_P Parameter: Age (day) Value: 4 vs. 0
  misc_feature: MA Experiment 108464 PARAMETER Experiment Name: At_Germinating_Seeds_cDNA_P Parameter: Tissue Value: Germinating Seeds
  misc_feature: MA Experiment ID: 108488 Result: Down-regulated in Transcription
  misc_feature: MA Experiment ID: 108576 Result: Up-regulated in Transcription
  misc_feature: MA Experiment 108576 PARAMETER Experiment Name: At_42deg_Heat_cDNA_P Parameter: Temperature (deg C) Value: 42 vs. 22
  misc_feature: MA Experiment 108576 PARAMETER Experiment Name: At_42deg_Heat_cDNA_P Parameter: Timepoint (hr) Value: 1
  misc_feature: MA Experiment 108576 PARAMETER Experiment Name: At_42deg_Heat_cDNA_P Parameter: Tissue Value: Aerial
  misc_feature: MA Experiment ID: 108577 Result: Up-regulated in Transcription
  misc_feature: MA Experiment 108577 PARAMETER Experiment Name: At_42deg_Heat_cDNA_P Parameter: Temperature (deg C) Value: 42 vs. 22
  misc_feature: MA Experiment 108577 PARAMETER Experiment Name: At_42deg_Heat_cDNA_P Parameter: Timepoint (hr) Value: 6
  misc_feature: MA Experiment 108577 PARAMETER Experiment Name: At_42deg_Heat_cDNA_P Parameter: Tissue Value: Aerial
  misc_feature: MA Experiment ID: 108579 Result: Down-regulated in Transcription
  misc_feature: MA Experiment 108579 PARAMETER Experiment Name: At_4deg_Cold_cDNA_P Parameter: Temperature (deg C) Value: 4 vs. 22
  misc_feature: MA Experiment 108579 PARAMETER Experiment Name: At_4deg_Cold_cDNA_P Parameter: Timepoint (hr) Value: 6
  misc_feature: MA Experiment 108579 PARAMETER Experiment Name: At_4deg_Cold_cDNA_P Parameter: Tissue Value: Aerial
  misc_feature: MA Experiment ID: 108585 Result: Up-regulated in Transcription
  misc_feature: MA Experiment 108585 PARAMETER Experiment Name: At_5mM_NaNP_cDNA_P Parameter: Timepoint (hr) Value: 6
  misc_feature: MA Experiment 108585 PARAMETER Experiment Name: At_5mM_NaNP_cDNA_P Parameter: Tissue Value: Aerial
  misc_feature: MA Experiment 108585 PARAMETER Experiment Name: At_5mM_NaNP_cDNA_P Parameter: Treatment Value: null
  misc_feature: MA Experiment ID: 108595 Result: Up-regulated in Transcription
  misc_feature: MA Experiment 108595 PARAMETER Experiment Name: At_Ler-pi_Ovule_cDNA_P Parameter: Plant Line Value: null
  misc_feature: MA Experiment ID: 20000093 Result: Up-regulated in Transcription
  misc_feature: MA Experiment 20000093 PARAMETER Experiment Name: At_42deg_Heat_cDNA_P Parameter: Temperature (deg C) Value: 42 vs. 22
  misc_feature: MA Experiment 20000093 PARAMETER Experiment Name: At_42deg_Heat_cDNA_P Parameter: Timepoint (hr) Value: 0.5
  misc_feature: MA Experiment 20000093 PARAMETER Experiment Name: At_42deg_Heat_cDNA_P Parameter: Tissue Value: Aerial
  misc_feature: MA Experiment ID: 20000111 Result: Up-regulated in Transcription
  misc_feature: MA Experiment 20000111 PARAMETER Experiment Name: At_42deg_Heat_cDNA_P Parameter: Temperature (deg C) Value: 42 vs. 22
  misc_feature: MA Experiment 20000111 PARAMETER Experiment Name: At_42deg_Heat_cDNA_P Parameter: Timepoint (hr) Value: 6
  misc_feature: MA Experiment 20000111 PARAMETER Experiment Name: At_42deg_Heat_cDNA_P Parameter: Tissue Value: Aerial
  misc_feature: MA Experiment ID: 20000112 Result: Up-regulated in Transcription
  misc_feature: MA Experiment 20000112 PARAMETER Experiment Name: At_42deg_Heat_cDNA_P Parameter: Temperature (deg C) Value: 42 vs. 22
  misc_feature: MA Experiment 20000112 PARAMETER Experiment Name: At_42deg_Heat_cDNA_P Parameter: Timepoint (hr) Value: 2
  misc_feature: MA Experiment 20000112 PARAMETER Experiment Name: At_42deg_Heat_cDNA_P Parameter: Tissue Value: Aerial
  misc_feature: MA Experiment ID: 20000113 Result: Up-regulated in Transcription
  misc_feature: MA Experiment 20000113 PARAMETER Experiment Name: At_42deg_Heat_cDNA_P Parameter: Temperature (deg C) Value: 42 vs. 22
  misc_feature: MA Experiment 20000113 PARAMETER Experiment Name: At_42deg_Heat_cDNA_P Parameter: Timepoint (hr) Value: 8
  misc_feature: MA Experiment 20000113 PARAMETER Experiment Name: At_42deg_Heat_cDNA_P Parameter: Tissue Value: Aerial
  misc_feature: MA Experiment ID: 20000144 Result: Up-regulated in Transcription
  misc_feature: MA Experiment 20000144 PARAMETER Experiment Name: At_42deg_Heat_cDNA_P Parameter: Temperature (deg C) Value: 42 vs. 22
  misc_feature: MA Experiment 20000144 PARAMETER Experiment Name: At_42deg_Heat_cDNA_P Parameter: Timepoint (hr) Value: 1
  misc_feature: MA Experiment 20000144 PARAMETER Experiment Name: At_42deg_Heat_cDNA_P Parameter: Tissue Value: Aerial
  misc_feature: MA Experiment ID: 20000171 Result: Up-regulated in Transcription
  misc_feature: MA Experiment 20000171 PARAMETER Experiment Name: At_42deg_Heat_P Parameter: Age (day) Value: 14
  misc_feature: MA Experiment 20000171 PARAMETER Experiment Name: At_42deg_Heat_P Parameter: Organism Value: A. thaliana
  misc_feature: MA Experiment 20000171 PARAMETER Experiment Name: At_42deg_Heat_P Parameter: Plant Line Value: WS
  misc_feature: MA Experiment 20000171 PARAMETER Experiment Name: At_42deg_Heat_P Parameter: Temperature (deg C) Value: 42 vs. 22
  misc_feature: MA Experiment 20000171 PARAMETER Experiment Name: At_42deg_Heat_P Parameter: Timepoint (hr) Value: 1
  misc_feature: MA Experiment 20000171 PARAMETER Experiment Name: At_42deg_Heat_P Parameter: Tissue Value: Aerial
  misc_feature: MA Experiment ID: 20000173 Result: Up-regulated in Transcription
  misc_feature: MA Experiment 20000173 PARAMETER Experiment Name: At_42deg_Heat_P Parameter: Age (day) Value: 14
  misc_feature: MA Experiment 20000173 PARAMETER Experiment Name: At_42deg_Heat_P Parameter: Organism Value: A. thaliana
  misc_feature: MA Experiment 20000173 PARAMETER Experiment Name: At_42deg_Heat_P Parameter: Plant Line Value: WS
  misc_feature: MA Experiment 20000173 PARAMETER Experiment Name: At_42deg_Heat_P Parameter: Temperature (deg C) Value: 42 vs. 22
  misc_feature: MA Experiment 20000173 PARAMETER Experiment Name: At_42deg_Heat_P Parameter: Timepoint (hr) Value: 6
  misc_feature: MA Experiment 20000173 PARAMETER Experiment Name: At_42deg_Heat_P Parameter: Tissue Value: Aerial
  misc_feature: MA Experiment ID: 20000213 Result: Down-regulated in Transcription
  misc_feature: MA Experiment 20000213 PARAMETER Experiment Name: At_4deg_Cold_P Parameter: Timepoint (hr) Value: 2
  misc_feature: MA Experiment ID: 20000214 Result: Down-regulated in Transcription
  misc_feature: MA Experiment 20000214 PARAMETER Experiment Name: At_4deg_Cold_P Parameter: Timepoint (hr) Value: 6
  misc_feature: MA Experiment ID: 20000234 Result: Down-regulated in Transcription
  misc_feature: MA Experiment 20000234 PARAMETER Experiment Name: At_Siliques_P Parameter: Age (day) Value: 21
  misc_feature: MA Experiment 20000234 PARAMETER Experiment Name: At_Siliques_P Parameter: Organism Value: A. thaliana
  misc_feature: MA Experiment 20000234 PARAMETER Experiment Name: At_Siliques_P Parameter: Plant Line Value: WS
  misc_feature: MA Experiment 20000234 PARAMETER Experiment Name: At_Siliques_P Parameter: Tissue Value: Less Than 5mm Siliques vs. Whole Plant
  misc_feature: MA Experiment ID: 20000235 Result: Down-regulated in Transcription
  misc_feature: MA Experiment 20000235 PARAMETER Experiment Name: At_Siliques_P Parameter: Age (day) Value: 21
  misc_feature: MA Experiment 20000235 PARAMETER Experiment Name: At_Siliques_P Parameter: Organism Value: A. thaliana
  misc_feature: MA Experiment 20000235 PARAMETER Experiment Name: At_Siliques_P Parameter: Plant Line Value: WS
  misc_feature: MA Experiment 20000235 PARAMETER Experiment Name: At_Siliques_P Parameter: Tissue Value: 5-10mm Siliques vs. Whole Plant
  misc_feature: MA Experiment ID: 20000264 Result: Down-regulated in Transcription
  misc_feature: MA Experiment 20000264 PARAMETER Experiment Name: At_Open_Flower_P Parameter: Age (day) Value: 21
  misc_feature: MA Experiment 20000264 PARAMETER Experiment Name: At_Open_Flower_P Parameter: Plant Line Value: WS
  misc_feature: MA Experiment 20000264 PARAMETER Experiment Name: At_Open_Flower_P Parameter: Tissue Value: Open Flower vs. Whole Plant
  misc_feature: MA Experiment ID: 20000265 Result: Down-regulated in Transcription
  misc_feature: MA Experiment 20000265 PARAMETER Experiment Name: At_Open_Flower_P Parameter: Age (day) Value: 21
  misc_feature: MA Experiment 20000265 PARAMETER Experiment Name: At_Open_Flower_P Parameter: Plant Line Value: WS
  misc_feature: MA Experiment 20000265 PARAMETER Experiment Name: At_Open_Flower_P Parameter: Tissue Value: Closed Flower vs. Whole Plant
  misc_feature: MA Experiment ID: 20000286 Result: Down-regulated in Transcription
  misc_feature: MA Experiment 20000286 PARAMETER Experiment Name: At_Open_Flower_P Parameter: Age (day) Value: 21
  misc_feature: MA Experiment 20000286 PARAMETER Experiment Name: At_Open_Flower_P Parameter: Plant Line Value: WS
  misc_feature: MA Experiment 20000286 PARAMETER Experiment Name: At_Open_Flower_P Parameter: Tissue Value: Half Open vs. Whole Plant
  misc_feature: MA Experiment ID: 20000496 Result: Up-regulated in Transcription
  misc_feature: MA Experiment 20000496 PARAMETER Experiment Name: At_Guard_Cells_P Parameter: Harvest Date Value: 7/19/2002
  misc_feature: MA Experiment 20000496 PARAMETER Experiment Name: At_Guard_Cells_P Parameter: Organism Value: Canola
  misc_feature: MA Experiment 20000496 PARAMETER Experiment Name: At_Guard_Cells_P Parameter: Tissue Value: Guard Cells vs. Leaves
  misc_feature: MA Experiment ID: 20001558 Result: Down-regulated in Transcription
  misc_feature: MA Experiment 20001558 PARAMETER Experiment Name: At_Drought_Soil_Dry_P Parameter: Age (day) Value: 27
  misc_feature: MA Experiment 20001558 PARAMETER Experiment Name: At_Drought_Soil_Dry_P Parameter: Organism Value: A. thaliana
  misc_feature: MA Experiment 20001558 PARAMETER Experiment Name: At_Drought_Soil_Dry_P Parameter: Plant Line Value: WS
  misc_feature: MA Experiment 20001558 PARAMETER Experiment Name: At_Drought_Soil_Dry_P Parameter: Post Timepoint (hr) Value: 6
  misc_feature: MA Experiment 20001558 PARAMETER Experiment Name: At_Drought_Soil_Dry_P Parameter: Post-Treatment Value: Re-Water vs. No Drought
  misc_feature: MA Experiment 20001558 PARAMETER Experiment Name: At_Drought_Soil_Dry_P Parameter: Timepoint (day) Value: 13
  misc_feature: MA Experiment 20001558 PARAMETER Experiment Name: At_Drought_Soil_Dry_P Parameter: Treatment Value: Drought vs. No Drought
  misc_feature: MA Experiment ID: 20001772 Result: Down-regulated in Transcription
  misc_feature: MA Experiment 20001772 PARAMETER Experiment Name: At_Far-red-enriched-adult_P Parameter: Age (day) Value: 29
  misc_feature: MA Experiment 20001772 PARAMETER Experiment Name: At_Far-red-enriched-adult_P Parameter: Light Value: Far-red enriched vs. White
  misc_feature: MA Experiment 20001772 PARAMETER Experiment Name: At_Far-red-enriched-adult_P Parameter: Organism Value: A. thaliana
  misc_feature: MA Experiment 20001772 PARAMETER Experiment Name: At_Far-red-enriched-adult_P Parameter: Plant Line Value: Columbia
  misc_feature: MA Experiment 20001772 PARAMETER Experiment Name: At_Far-red-enriched-adult_P Parameter: Timepoint (hr) Value: 24
  misc_feature: MA Experiment 20001772 PARAMETER Experiment Name: At_Far-red-enriched-adult_P Parameter: Tissue Value: Aerial
  misc_feature: MA Experiment ID: 20001911 Result: Up-regulated in Transcription
  misc_feature: MA Experiment 20001911 PARAMETER Experiment Name: At_Drought_Reproduction_P Parameter: Age (day) Value: 40
  misc_feature: MA Experiment 20001911 PARAMETER Experiment Name: At_Drought_Reproduction_P Parameter: Organism Value: A. thaliana
  misc_feature: MA Experiment 20001911 PARAMETER Experiment Name: At_Drought_Reproduction_P Parameter: Plant Line Value: WS
  misc_feature: MA Experiment 20001911 PARAMETER Experiment Name: At_Drought_Reproduction_P Parameter: Timepoint (day) Value: 10
  misc_feature: MA Experiment 20001911 PARAMETER Experiment Name: At_Drought_Reproduction_P Parameter: Tissue Value: Flowers
  misc_feature: MA Experiment 20001911 PARAMETER Experiment Name: At_Drought_Reproduction_P Parameter: Treatment Value: Drought vs. No Drought
aattgtcttatctttcgacttttcttcttcttcttcttaagagatttttctccaagaaagttcgctccttttctctgttcttaacaaaaaagtctcggtttttttctctttgttttgggtactagcgtgatgtcttctgagaatgatttcgttgagttttcttctatgttcgagagaattatacaaggaagaggtgatggtctctctcgatttttgccggtgattgtagctttagccgccagagaagacgatgatgaccaaggatctaccgatcaaacaacgagacggggagatccgttgagtccaaggttcgtgatgatcggatcgcgatcgggactcgacgatttctttagcgacggtggaaaacaagggaggtcgccggcgttgaagtcagaagtggagaatatgccacgtgtcgtgatcggagaagataaggagaaatatggtggttcttgcgcgatttgtttggatgagtggtctaaaggtgacgtggcggcggagatgccttgtaaacataagtttcactcaaagtgtgtggaggagtggttagggaggcacgccacgtgtcctatgtgtaggtatgagatgcctgttgaagaagttgaagaagagaagaagattgggatttggattggtttctccattaacgccggcgacagaagaaactaagaagacggaggaagaagaagttaaaagtgactcgaaccctcaagatgcaacatggggctaggtttaggtttaggtttgctagaatgttttgtatagtttcgttttcgtttactgaaatcaatttcgaattcaataaaattggttgc

SEQ ID NO: 72001 - protein, 179 aa, Arabidopsis thaliana
  peptide (1)..(179): Ceres Seq. ID no. 4909292
  misc_feature (109)..(149): Pfam Name: Zinc finger, C3HC4 type (RING finger) Pfam Description: Zinc finger, C3HC4 type (RING finger)
  misc_feature (1)..(179): Homolog of NCBI NO: 15223679 NR Description: unknown protein; protein id: At1g14200.1
  misc_feature (9)..(179): Homolog of NCBI NO: 18396059 NR Description: expressed protein; protein id: At1g26800.1, by cDNA: 250127., supported by cDNA: gi_13605624, supported by gi_15450674, supported by cDNA: gi_15777872 [Arabidopsis
  misc_feature (1)..(179): Homolog of NCBI NO: 21554312 NR Description: unknown [Arabidopsis thaliana]
  misc_feature (76)..(178): Homolog of NCBI NO: 34903272 NR Description: unnamed protein product [Oryza sativa (japonica group)] >gi|6539567|dbj|BAA88184.1| unnamed protein product
  misc_feature (62)..(178): Homolog of NCBI NO: 34913258 NR Description: P0519E12.4 [Oryza sativa (japonica
  misc_feature (75)..(179): Homolog of NCBI NO: 7486783 NR Description: hypothetical protein M3E9.170 - Arabidopsis >gi|2982466|emb|CAA18230.1| putative protein [Arabidopsis >gi|7269492|emb|CAB79495.1| putative protein [Arabidopsis
  misc_feature (75)..(179): Homolog of NCBI NO: 22328949 NR Description: putative protein; protein id: At4g26400.1, by cDNA: gi_20466681 [Arabidopsis thaliana] putative protein [Arabidopsis thaliana]
  misc_feature (75)..(162): Homolog of NCBI NO: 15241188 NR Description: putative protein; protein id: At5g56340.1, by cDNA: gi_17380897, supported by cDNA: gi_20259580 [Arabidopsis >gi|10177832|dbj|BAB11261.1| gene_id:MCD7.7~pir||T05064~similar
  misc_feature (41)..(157): Homolog of NCBI NO: 32129334 NR Description: unknown protein [Oryza sativa (japonica
  misc_feature (78)..(177): Homolog of NCBI NO: 15232595 NR Description: putative protein; protein id: At3g46620.1, by cDNA: gi_20260607 [Arabidopsis thaliana]
MSSENDFVEFSSMFERIIQGRGDGLSRFLPVIVALAAREDDDDQGSTDQTTRRGDPLSPRFVMIGSRSGLDDFFSDGGKQGRSPALKSEVENMPRVVIGEDKEKYGGSCAICLDEWSKGDVAAEMPCKHKFHSKCVEEWLGRHATCPMCRYEMPVEEVEEEKKIGIWIGFSINAGDRRN

SEQ ID NO: 72002 - protein, 167 aa, Arabidopsis thaliana
  peptide (1)..(167): Ceres Seq. ID no. 4909293
  misc_feature (97)..(137): Pfam Name: Zinc finger, C3HC4 type (RING finger) Pfam Description: Zinc finger, C3HC4 type (RING finger)
  misc_feature (1)..(167): Homolog of NCBI NO: 15223679 NR Description: unknown protein; protein id: At1g14200.1
  misc_feature (1)..(167): Homolog of NCBI NO: 18396059 NR Description: expressed protein; protein id: At1g26800.1, by cDNA: 250127., supported by cDNA: gi_13605624, supported by gi_15450674, supported by cDNA: gi_15777872 [Arabidopsis
  misc_feature (1)..(167): Homolog of NCBI NO: 21554312 NR Description: unknown [Arabidopsis thaliana]
  misc_feature (64)..(166): Homolog of NCBI NO: 34903272 NR Description: unnamed protein product [Oryza sativa (japonica group)] >gi|6539567|dbj|BAA88184.1| unnamed protein product
  misc_feature (50)..(166): Homolog of NCBI NO: 34913258 NR Description: P0519E12.4 [Oryza sativa (japonica
  misc_feature (63)..(167): Homolog of NCBI NO: 7486783 NR Description: hypothetical protein M3E9.170 - Arabidopsis >gi|2982466|emb|CAA18230.1| putative protein [Arabidopsis >gi|7269492|emb|CAB79495.1| putative protein [Arabidopsis
  misc_feature (63)..(167): Homolog of NCBI NO: 22328949 NR Description: putative protein; protein id: At4g26400.1, by cDNA: gi_20466681 [Arabidopsis thaliana] putative protein [Arabidopsis thaliana]
  misc_feature (63)..(150): Homolog of NCBI NO: 15241188 NR Description: putative protein; protein id: At5g56340.1, by cDNA: gi_17380897, supported by cDNA: gi_20259580 [Arabidopsis >gi|10177832|dbj|BAB11261.1| gene_id:MCD7.7~pir||T05064~similar
  misc_feature (29)..(145): Homolog of NCBI NO: 32129334 NR Description: unknown protein [Oryza sativa (japonica
  misc_feature (66)..(165): Homolog of NCBI NO: 15232595 NR Description: putative protein; protein id: At3g46620.1, by cDNA: gi_20260607 [Arabidopsis thaliana]
MFERIIQGRGDGLSRFLPVIVALAAREDDDDQGSTDQTTRRGDPLSPRFVMIGSRSGLDDFFSDGGKQGRSPALKSEVENMPRVVIGEDKEKYGGSCAICLDEWSKGDVAAEMPCKHKFHSKCVEEWLGRHATCPMCRYEMPVEEVEEEKKIGIWIGFSINAGDRRN

SEQ ID NO: 72003 - protein, 117 aa, Arabidopsis thaliana
  peptide (1)..(117): Ceres Seq. ID no. 4909294
  misc_feature (47)..(87): Pfam Name: Zinc finger, C3HC4 type (RING finger) Pfam Description: Zinc finger, C3HC4 type (RING finger)
  misc_feature (1)..(117): Homolog of NCBI NO: 15223679 NR Description: unknown protein; protein id: At1g14200.1
  misc_feature (1)..(117): Homolog of NCBI NO: 18396059 NR Description: expressed protein; protein id: At1g26800.1, by cDNA: 250127., supported by cDNA: gi_13605624, supported by gi_15450674, supported by cDNA: gi_15777872 [Arabidopsis
  misc_feature (1)..(117): Homolog of NCBI NO: 21554312 NR Description: unknown [Arabidopsis thaliana]
  misc_feature (14)..(116): Homolog of NCBI NO: 34903272 NR Description: unnamed protein product [Oryza sativa (japonica group)] >gi|6539567|dbj|BAA88184.1| unnamed protein product
  misc_feature (1)..(116): Homolog of NCBI NO: 34913258 NR Description: P0519E12.4 [Oryza sativa (japonica
  misc_feature (13)..(117): Homolog of NCBI NO: 7486783 NR Description: hypothetical protein M3E9.170 - Arabidopsis >gi|2982466|emb|CAA18230.1| putative protein [Arabidopsis >gi|7269492|emb|CAB79495.1| putative protein [Arabidopsis
  misc_feature (13)..(117): Homolog of NCBI NO: 22328949 NR Description: putative protein; protein id: At4g26400.1, by cDNA: gi_20466681 [Arabidopsis thaliana] putative protein [Arabidopsis thaliana]
  misc_feature (13)..(100): Homolog of NCBI NO: 15241188 NR Description: putative protein; protein id: At5g56340.1, by cDNA: gi_17380897, supported by cDNA: gi_20259580 [Arabidopsis >gi|10177832|dbj|BAB11261.1| gene_id:MCD7.7~pir||T05064~similar
  misc_feature (1)..(95): Homolog of NCBI NO: 32129334 NR Description: unknown protein [Oryza sativa (japonica
  misc_feature (16)..(115): Homolog of NCBI NO: 15232595 NR Description: putative protein; protein id: At3g46620.1, by cDNA: gi_20260607 [Arabidopsis thaliana]
MIGSRSGLDDFFSDGGKQGRSPALKSEVENMPRVVIGEDKEKYGGSCAICLDEWSKGDVAAEMPCKHKFHSKCVEEWLGRHATCPMCRYEMPVEEVEEEKKIGIWIGFSINAGDRRN

SEQ ID NO: 72004 - DNA, 1312 bp, Arabidopsis thaliana
  misc_feature (1)..(1312): Ceres Seq. ID no. 4909460
  misc_feature: MA Experiment ID: 108435 Result: Down-regulated in Transcription
  misc_feature: MA Experiment 108435 PARAMETER Experiment Name: At_stm_Mutants_cDNA_P Parameter: Plant Line Value: wt Landsburg vs stm
  misc_feature: MA Experiment 108435 PARAMETER Experiment Name: At_stm_Mutants_cDNA_P Parameter: Tissue Value: Shoot Apical Meristem Region
  misc_feature: MA Experiment ID: 108462 Result: Down-regulated in Transcription
  misc_feature: MA Experiment 108462 PARAMETER Experiment Name: At_Germinating_Seeds_cDNA_P Parameter: Age (day) Value: 2 vs. 0
  misc_feature: MA Experiment 108462 PARAMETER Experiment Name: At_Germinating_Seeds_cDNA_P Parameter: Tissue Value: Germinating Seeds
  misc_feature: MA Experiment ID: 108463 Result: Down-regulated in Transcription
  misc_feature: MA Experiment 108463 PARAMETER Experiment Name: At_Germinating_Seeds_cDNA_P Parameter: Age (day) Value: 3 vs. 0
  misc_feature: MA Experiment 108463 PARAMETER Experiment Name: At_Germinating_Seeds_cDNA_P Parameter: Tissue Value: Germinating Seeds
  misc_feature: MA Experiment ID: 108576 Result: Up-regulated in Transcription
  misc_feature: MA Experiment 108576 PARAMETER Experiment Name: At_42deg_Heat_cDNA_P Parameter: Temperature (deg C) Value: 42 vs. 22
  misc_feature: MA Experiment 108576 PARAMETER Experiment Name: At_42deg_Heat_cDNA_P Parameter: Timepoint (hr) Value: 1
  misc_feature: MA Experiment 108576 PARAMETER Experiment Name: At_42deg_Heat_cDNA_P Parameter: Tissue Value: Aerial
  misc_feature: MA Experiment ID: 108668 Result: Down-regulated in Transcription
  misc_feature: MA Experiment 108668 PARAMETER Experiment Name: At_2mM_SA_cDNA_P Parameter: Plant Line Value: WS
  misc_feature: MA Experiment 108668 PARAMETER Experiment Name: At_2mM_SA_cDNA_P Parameter: Timepoint (hr) Value: 6
  misc_feature: MA Experiment 108668 PARAMETER Experiment Name: At_2mM_SA_cDNA_P Parameter: Treatment Value: 2mM SA vs. No Treatment
  misc_feature: MA Experiment ID: 20000069 Result: Up-regulated in Transcription
  misc_feature: MA Experiment 20000069 PARAMETER Experiment Name: At_100uM_ABA_Mutants_cDNA_P Parameter: Plant Line Value: CS23
  misc_feature: MA Experiment 20000069 PARAMETER Experiment Name: At_100uM_ABA_Mutants_cDNA_P Parameter: Timepoint (hr) Value: 6
  misc_feature: MA Experiment 20000069 PARAMETER Experiment Name: At_100uM_ABA_Mutants_cDNA_P Parameter: Tissue Value: Aerial
  misc_feature: MA Experiment 20000069 PARAMETER Experiment Name: At_100uM_ABA_Mutants_cDNA_P Parameter: Treatment Value: 100uM ABA vs. No Treatment
  misc_feature: MA Experiment ID: 20000070 Result: Up-regulated in Transcription
  misc_feature: MA Experiment 20000070 PARAMETER Experiment Name: At_100uM_ABA_Mutants_cDNA_P Parameter: Plant Line Value: CS24
  misc_feature: MA Experiment 20000070 PARAMETER Experiment Name: At_100uM_ABA_Mutants_cDNA_P Parameter: Timepoint (hr) Value: 6
  misc_feature: MA Experiment 20000070 PARAMETER Experiment Name: At_100uM_ABA_Mutants_cDNA_P Parameter: Tissue Value: Aerial
  misc_feature: MA Experiment 20000070 PARAMETER Experiment Name: At_100uM_ABA_Mutants_cDNA_P Parameter: Treatment Value: 100uM ABA vs. No Treatment
  misc_feature: MA Experiment ID: 20000071 Result: Up-regulated in Transcription
  misc_feature: MA Experiment 20000071 PARAMETER Experiment Name: At_100uM_ABA_Mutants_cDNA_P Parameter: Plant Line Value: CS8104
  misc_feature: MA Experiment 20000071 PARAMETER Experiment Name: At_100uM_ABA_Mutants_cDNA_P Parameter: Timepoint (hr) Value: 6
  misc_feature: MA Experiment 20000071 PARAMETER Experiment Name: At_100uM_ABA_Mutants_cDNA_P Parameter: Tissue Value: Aerial
  misc_feature: MA Experiment 20000071 PARAMETER Experiment Name: At_100uM_ABA_Mutants_cDNA_P Parameter: Treatment Value: 100uM ABA vs. No Treatment
  misc_feature: MA Experiment ID: 20000072 Result: Up-regulated in Transcription
  misc_feature: MA Experiment 20000072 PARAMETER Experiment Name: At_100uM_ABA_Mutants_cDNA_P Parameter: Plant Line Value: CS8105
  misc_feature: MA Experiment 20000072 PARAMETER Experiment Name: At_100uM_ABA_Mutants_cDNA_P Parameter: Timepoint (hr) Value: 6
  misc_feature: MA Experiment 20000072 PARAMETER Experiment Name: At_100uM_ABA_Mutants_cDNA_P Parameter: Tissue Value: Aerial
  misc_feature: MA Experiment 20000072 PARAMETER Experiment Name: At_100uM_ABA_Mutants_cDNA_P Parameter: Treatment Value: 100uM ABA vs. No Treatment
  misc_feature: MA Experiment ID: 20000086 Result: Up-regulated in Transcription
  misc_feature: MA Experiment 20000086 PARAMETER Experiment Name: At_100uM_ABA_Mutants_cDNA_P Parameter: Plant Line Value: CS22
  misc_feature: MA Experiment 20000086 PARAMETER Experiment Name: At_100uM_ABA_Mutants_cDNA_P Parameter: Timepoint (hr) Value: 6
  misc_feature: MA Experiment 20000086 PARAMETER Experiment Name: At_100uM_ABA_Mutants_cDNA_P Parameter: Tissue Value: Aerial
  misc_feature: MA Experiment 20000086 PARAMETER Experiment Name: At_100uM_ABA_Mutants_cDNA_P Parameter: Treatment Value: 100uM ABA vs. No Treatment
  misc_feature: MA Experiment ID: 20000087 Result: Up-regulated in Transcription
  misc_feature: MA Experiment 20000087 PARAMETER Experiment Name: At_100uM_ABA_Mutants_cDNA_P Parameter: Plant Line Value: WS
  misc_feature: MA Experiment 20000087 PARAMETER Experiment Name: At_100uM_ABA_Mutants_cDNA_P Parameter: Timepoint (hr) Value: 6
  misc_feature: MA Experiment 20000087 PARAMETER Experiment Name: At_100uM_ABA_Mutants_cDNA_P Parameter: Tissue Value: Aerial
  misc_feature: MA Experiment 20000087 PARAMETER Experiment Name: At_100uM_ABA_Mutants_cDNA_P Parameter: Treatment Value: 100uM ABA vs. No Treatment
  misc_feature: MA Experiment ID: 20000088 Result: Up-regulated in Transcription
  misc_feature: MA Experiment 20000088 PARAMETER Experiment Name: At_100uM_ABA_Mutants_cDNA_P Parameter: Plant Line Value: Landsberg
  misc_feature: MA Experiment 20000088 PARAMETER Experiment Name: At_100uM_ABA_Mutants_cDNA_P Parameter: Timepoint (hr) Value: 6
  misc_feature: MA Experiment 20000088 PARAMETER Experiment Name: At_100uM_ABA_Mutants_cDNA_P Parameter: Tissue Value: Aerial
  misc_feature: MA Experiment 20000088 PARAMETER Experiment Name: At_100uM_ABA_Mutants_cDNA_P Parameter: Treatment Value: 100uM ABA vs. No Treatment
  misc_feature: MA Experiment ID: 20000089 Result: Up-regulated in Transcription
  misc_feature: MA Experiment ID: 20000173 Result: Down-regulated in Transcription
  misc_feature: MA Experiment 20000173 PARAMETER Experiment Name: At_42deg_Heat_P Parameter: Age (day) Value: 14
  misc_feature: MA Experiment 20000173 PARAMETER Experiment Name: At_42deg_Heat_P Parameter: Organism Value: A. thaliana
  misc_feature: MA Experiment 20000173 PARAMETER Experiment Name: At_42deg_Heat_P Parameter: Plant Line Value: WS
  misc_feature: MA Experiment 20000173 PARAMETER Experiment Name: At_42deg_Heat_P Parameter: Temperature (deg C) Value: 42 vs. 22
  misc_feature: MA Experiment 20000173 PARAMETER Experiment Name: At_42deg_Heat_P Parameter: Timepoint (hr) Value: 6
  misc_feature: MA Experiment 20000173 PARAMETER Experiment Name: At_42deg_Heat_P Parameter: Tissue Value: Aerial
  misc_feature: MA Experiment ID: 20000182 Result: Down-regulated in Transcription
  misc_feature: MA Experiment 20000182 PARAMETER Experiment Name: At_2mM_SA_P Parameter: Age (day) Value: 14
  misc_feature: MA Experiment 20000182 PARAMETER Experiment Name: At_2mM_SA_P Parameter: Organism Value: A. thaliana
  misc_feature: MA Experiment 20000182 PARAMETER Experiment Name: At_2mM_SA_P Parameter: Plant Line Value: WS
  misc_feature: MA Experiment 20000182 PARAMETER Experiment Name: At_2mM_SA_P Parameter: Timepoint (hr) Value: 6
  misc_feature: MA Experiment 20000182 PARAMETER Experiment Name: At_2mM_SA_P Parameter: Tissue Value: Aerial
  misc_feature: MA Experiment 20000182 PARAMETER Experiment Name: At_2mM_SA_P Parameter: Treatment Value: 2mM SA vs. No Treatment
  misc_feature: MA Experiment ID: 20000185 Result: Down-regulated in Transcription
  misc_feature: MA Experiment 20000185 PARAMETER Experiment Name: At_Roots__P Parameter: Age (day) Value: 7 vs. 21
  misc_feature: MA Experiment 20000185 PARAMETER Experiment Name: At_Roots__P Parameter: Organism Value: A. thaliana
  misc_feature: MA Experiment 20000185 PARAMETER Experiment Name: At_Roots__P Parameter: Tissue Value: Roots vs. Whole Plant
  misc_feature: MA Experiment ID: 20000437 Result: Up-regulated in Transcription
  misc_feature: MA Experiment 20000437 PARAMETER Experiment Name: At_Drought_P Parameter: Age (day) Value: 8
  misc_feature: MA Experiment 20000437 PARAMETER Experiment Name: At_Drought_P Parameter: Organism Value: A. thaliana
  misc_feature: MA Experiment 20000437 PARAMETER Experiment Name: At_Drought_P Parameter: Plant Line Value: WS
  misc_feature: MA Experiment 20000437 PARAMETER Experiment Name: At_Drought_P Parameter: Timepoint (hr) Value: 24
  misc_feature: MA Experiment 20000437 PARAMETER Experiment Name: At_Drought_P Parameter: Tissue Value: Whole Plant
  misc_feature: MA Experiment 20000437 PARAMETER Experiment Name: At_Drought_P Parameter: Treatment Value: Drought vs. No Drought
  misc_feature: MA Experiment ID: 20000439 Result: Down-regulated in Transcription
  misc_feature: MA Experiment 20000439 PARAMETER Experiment Name: At_Roots__P Parameter: Age (day) Value: 14 vs. 21
  misc_feature: MA Experiment 20000439 PARAMETER Experiment Name: At_Roots__P Parameter: Organism Value: A. thaliana
  misc_feature: MA Experiment 20000439 PARAMETER Experiment Name: At_Roots__P Parameter: Tissue Value: Roots vs. Whole Plant
  misc_feature: MA Experiment ID: 20001451 Result: Down-regulated in Transcription
  misc_feature: MA Experiment 20001451 PARAMETER Experiment Name: At_Far-red-induction_P Parameter: Age (day) Value: 7
  misc_feature: MA Experiment 20001451 PARAMETER Experiment Name: At_Far-red-induction_P Parameter: Light Value: Far-red vs. White
  misc_feature: MA Experiment 20001451 PARAMETER Experiment Name: At_Far-red-induction_P Parameter: Organism Value: A. thaliana
  misc_feature: MA Experiment 20001451 PARAMETER Experiment Name: At_Far-red-induction_P Parameter: Plant Line Value: Columbia
  misc_feature: MA Experiment 20001451 PARAMETER Experiment Name: At_Far-red-induction_P Parameter: Timepoint (hr) Value: 24
  misc_feature: MA Experiment 20001451 PARAMETER Experiment Name: At_Far-red-induction_P Parameter: Tissue Value: Whole Plant
  misc_feature: MA Experiment ID: 20001458 Result: Up-regulated in Transcription
  misc_feature: MA Experiment 20001458 PARAMETER Experiment Name: At_50mM_NH4NO3_L-to-H_P Parameter: Age (day) Value: Undefined
  misc_feature: MA Experiment 20001458 PARAMETER Experiment Name: At_50mM_NH4NO3_L-to-H_P Parameter: Organism Value: Undefined
  misc_feature: MA Experiment 20001458 PARAMETER Experiment Name: At_50mM_NH4NO3_L-to-H_P Parameter: Plant Line Value: Undefined
  misc_feature: MA Experiment 20001458 PARAMETER Experiment Name: At_50mM_NH4NO3_L-to-H_P Parameter: Timepoint (hr) Value: 2
  misc_feature: MA Experiment 20001458 PARAMETER Experiment Name: At_50mM_NH4NO3_L-to-H_P Parameter: Tissue Value: Siliques
  misc_feature: MA Experiment 20001458 PARAMETER Experiment Name: At_50mM_NH4NO3_L-to-H_P Parameter: Treatment Value: 50mM NH4NO3 vs. 100mM Manitol
  misc_feature: MA Experiment ID: 20001757 Result: Up-regulated in Transcription
  misc_feature: MA Experiment 20001757 PARAMETER Experiment Name: At_50mM_NH4NO3_L-to-H_P Parameter: Timepoint (hr) Value: 6
  misc_feature: MA Experiment 20001757 PARAMETER Experiment Name: At_50mM_NH4NO3_L-to-H_P Parameter: Tissue Value: Leaf
  misc_feature: MA Experiment 20001757 PARAMETER Experiment Name: At_50mM_NH4NO3_L-to-H_P Parameter: Treatment Value: 50mM NH4NO3 vs 100mM Mannitol
  misc_feature: MA Experiment ID: 20001906 Result: Down-regulated in Transcription
  misc_feature: MA Experiment 20001906 PARAMETER Experiment Name: At_Drought_Reproduction_P Parameter: Age (day) Value: 35
  misc_feature: MA Experiment 20001906 PARAMETER Experiment Name: At_Drought_Reproduction_P Parameter: Organism Value: A. thaliana
  misc_feature: MA Experiment 20001906 PARAMETER Experiment Name: At_Drought_Reproduction_P Parameter: Plant Line Value: WS
  misc_feature: MA Experiment 20001906 PARAMETER Experiment Name: At_Drought_Reproduction_P Parameter: Timepoint (day) Value: 5
  misc_feature: MA Experiment 20001906 PARAMETER Experiment Name: At_Drought_Reproduction_P Parameter: Tissue Value: Siliques
  misc_feature: MA Experiment 20001906 PARAMETER Experiment Name: At_Drought_Reproduction_P Parameter: Treatment Value: Drought vs. No Drought
tcgatcttactcaattttgcgtttctgcttttcattttctctcaagaagcgtaaatggcgaacaatggacctaactgggacggattactcaaatggagcctctcacattccgatggagcttcctcttctagccgtataagtgaggaagatcgacaatggtttgtggaagctatgcaagcacatacaatcgattcaatctctcgtatgaaagtaatatctcaaatcatgaagatgcctgaacaagtcttggaggctcaaggagttacacctgatgatcttgaaggaatgttggctgagctgcaggaacacgtcgagtcgatagatttggccaatgatcttcactccattggaggtttggttcctctccttagctatctcaagaactctaatgcgaaaattcgagcaaagtctgccgatgttttgactacggttgtccaaaacaatccaagaagccagcaacttgttatggaagcaaatgggttcgaaccattattaactaactttattgctgatcctgacattagagtccggaccaaggcactcggggctatatcttctcttatccgtaacaaccaacccgggattacagcattccgtctggcaaatggttatgctggcctgcgagacgctttggtctctgataccgttagattccaaagaaaagcgttgaacttgcttcactatcttctccaagaaagcaactcagactgtaaaatcgttagagatcttggattccctcgcataatgatccacctagcatccaaccaagattttgaagttcgggaattcgctcttcgtggtctcctagagcttgcccgtgaagaatctgtgagaaaccttgatagaggggatgtgaatctaagacagcttcttgaggagagaacaagacgaataattgtgatgtcggacgaagatctttgtgcagctagagaagaaagacagctagtggatagtctttggaccgtgtgttatgatgaaccgtcccttctaagagaaagaggtctggtctacctcccttctgacgacgagctggctcctgatgtggttagggaccgctttgaacctcctctaagggcttgggctgcaagacgacatgatgaaacgagtgaatccccggttccacttcttcttggtcctgcaccgtgatctcgttcaaccaaattattagattttgcagttatcaacaaatcagctttgctttagaatttctctagctcttgtttatgtatatctgagcgacaacaagacgctattaaagagattatctgtgttctgtttctgtaatacaaatctacactcatggacttcaagt

SEQ ID NO: 72005 - protein, 324 aa, Arabidopsis thaliana; identical to SEQ ID NO: 24190
  peptide (1)..(324): Ceres Seq. ID no. 4909461
  misc_feature (91)..(132): Pfam Name: Armadillo/beta-catenin-like repeat Pfam Description: Armadillo/beta-catenin-like repeat
  misc_feature (1)..(324): Homolog of NCBI NO: 15232329 NR Description: putative protein; protein id: At3g53800.1, by cDNA: 37834. [Arabidopsis thaliana] >gi|11292176|pir||T45920
  misc_feature (1)..(324): Homolog of NCBI NO: 26449490 NR Description: unknown protein [Arabidopsis thaliana]
  misc_feature (1)..(322): Homolog of NCBI NO: 18398480 NR Description: expressed protein; protein id: At3g09350.1, by cDNA: 19154. [Arabidopsis thaliana] unknown protein [Arabidopsis thaliana]
  misc_feature (1)..(322): Homolog of NCBI NO: 21553998 NR Description: unknown [Arabidopsis thaliana]
  misc_feature (1)..(322): Homolog of NCBI NO: 6478927 NR Description: hypothetical protein [Arabidopsis thaliana]
  misc_feature (1)..(324): Homolog of NCBI NO: 34897412 NR Description: putative Hsp70 binding protein [Oryza sativa
  misc_feature (1)..(273): Homolog of NCBI NO: 15241689 NR Description: putative protein; protein id: At5g02150.1
  misc_feature (1)..(247): Homolog of NCBI NO: 15231095 NR Description: hypothetical protein; protein id: At3g51980.1, by cDNA: gi_20268763 [Arabidopsis thaliana]
  misc_feature (1)..(235): Homolog of NCBI NO: 31221541 NR Description: ENSANGP00000019732 [Anopheles gambiae]
  misc_feature (1)..(221): Homolog of NCBI NO: 16769376 NR Description: LD28549p [Drosophila melanogaster]

SEQ ID NO: 72006 - protein, 313 aa, Arabidopsis thaliana; identical to SEQ ID NO: 24191
  peptide (1)..(313): Ceres Seq. ID no. 4909462
  misc_feature (80)..(121): Pfam Name: Armadillo/beta-catenin-like repeat Pfam Description: Armadillo/beta-catenin-like repeat
  misc_feature (1)..(313): Homolog of NCBI NO: 15232329 NR Description: putative protein; protein id: At3g53800.1, by cDNA: 37834. [Arabidopsis thaliana] >gi|11292176|pir||T45920
  misc_feature (1)..(313): Homolog of NCBI NO: 26449490 NR Description: unknown protein [Arabidopsis thaliana]
  misc_feature (1)..(311): Homolog of NCBI NO: 18398480 NR Description: expressed protein; protein id: At3g09350.1, by cDNA: 19154. [Arabidopsis thaliana] unknown protein [Arabidopsis thaliana]
  misc_feature (1)..(311): Homolog of NCBI NO: 21553998 NR Description: unknown [Arabidopsis thaliana]
  misc_feature (1)..(311): Homolog of NCBI NO: 6478927 NR Description: hypothetical protein [Arabidopsis thaliana]
  misc_feature (1)..(313): Homolog of NCBI NO: 34897412 NR Description: putative Hsp70 binding protein [Oryza sativa
  misc_feature (1)..(262): Homolog of NCBI NO: 15241689 NR Description: putative protein; protein id: At5g02150.1
  misc_feature (1)..(236): Homolog of NCBI NO: 15231095 NR Description: hypothetical protein; protein id: At3g51980.1, by cDNA: gi_20268763 [Arabidopsis thaliana]
  misc_feature (1)..(224): Homolog of NCBI NO: 31221541 NR Description: ENSANGP00000019732 [Anopheles gambiae]
  misc_feature (1)..(210): Homolog of NCBI NO: 16769376 NR Description: LD28549p [Drosophila melanogaster]

SEQ ID NO: 72007 - protein, 363 aa, Arabidopsis thaliana; identical to SEQ ID NO: 24189
  peptide (1)..(363): Ceres Seq. ID no. 4909463
  misc_feature (130)..(171): Pfam Name: Armadillo/beta-catenin-like repeat Pfam Description: Armadillo/beta-catenin-like repeat
  misc_feature (1)..(363): Homolog of NCBI NO: 15232329 NR Description: putative protein; protein id: At3g53800.1, by cDNA: 37834. [Arabidopsis thaliana] >gi|11292176|pir||T45920
  misc_feature (1)..(363): Homolog of NCBI NO: 26449490 NR Description: unknown protein [Arabidopsis thaliana]
  misc_feature (1)..(361): Homolog of NCBI NO: 18398480 NR Description: expressed protein; protein id: At3g09350.1, by cDNA: 19154. [Arabidopsis thaliana] unknown protein [Arabidopsis thaliana]
  misc_feature (1)..(361): Homolog of NCBI NO: 21553998 NR Description: unknown [Arabidopsis thaliana]
  misc_feature (30)..(361): Homolog of NCBI NO: 6478927 NR Description: hypothetical protein [Arabidopsis thaliana]
  misc_feature (1)..(29): Homolog of NCBI NO: 6478927 NR Description: hypothetical protein [Arabidopsis thaliana]
  misc_feature (5)..(363): Homolog of NCBI NO: 34897412 NR Description: putative Hsp70 binding protein [Oryza sativa
  misc_feature (1)..(312): Homolog of NCBI NO: 15241689 NR Description: putative protein; protein id: At5g02150.1
  misc_feature (9)..(286): Homolog of NCBI NO: 15231095 NR Description: hypothetical protein; protein id: At3g51980.1, by cDNA: gi_20268763 [Arabidopsis thaliana]
  misc_feature (10)..(274): Homolog of NCBI NO: 31221541 NR Description: ENSANGP00000019732 [Anopheles gambiae]

SEQ ID NO: 72008 - DNA, 604 bp, Arabidopsis thaliana
  misc_feature (1)..(604): Ceres Seq. ID no. 4909588
  misc_feature: MA Experiment ID: 108573 Result: Down-regulated in Transcription
  misc_feature: MA Experiment 108573 PARAMETER Experiment Name: At_Drought_cDNA_P Parameter: Timepoint (hr) Value: 6
  misc_feature: MA Experiment 108573 PARAMETER Experiment Name: At_Drought_cDNA_P Parameter: Tissue Value: Aerial
  misc_feature: MA Experiment 108573 PARAMETER Experiment Name: At_Drought_cDNA_P Parameter: Treatment Value: Drought vs. No Drought
  misc_feature: MA Experiment ID: 108576 Result: Down-regulated in Transcription
  misc_feature: MA Experiment 108576 PARAMETER Experiment Name: At_42deg_Heat_cDNA_P Parameter: Temperature (deg C) Value: 42 vs. 22
  misc_feature: MA Experiment 108576 PARAMETER Experiment Name: At_42deg_Heat_cDNA_P Parameter: Timepoint (hr) Value: 1
  misc_feature: MA Experiment 108576 PARAMETER Experiment Name: At_42deg_Heat_cDNA_P Parameter: Tissue Value: Aerial
  misc_feature: MA Experiment ID: 108577 Result: Down-regulated in Transcription
  misc_feature: MA Experiment 108577 PARAMETER Experiment Name: At_42deg_Heat_cDNA_P Parameter: Temperature (deg C) Value: 42 vs. 22
  misc_feature: MA Experiment 108577 PARAMETER Experiment Name: At_42deg_Heat_cDNA_P Parameter: Timepoint (hr) Value: 6
  misc_feature: MA Experiment 108577 PARAMETER Experiment Name: At_42deg_Heat_cDNA_P Parameter: Tissue Value: Aerial
  misc_feature: MA Experiment ID: 20000093 Result: Down-regulated in Transcription
  misc_feature: MA Experiment 20000093 PARAMETER Experiment Name: At_42deg_Heat_cDNA_P Parameter: Temperature (deg C) Value: 42 vs. 22
  misc_feature: MA Experiment 20000093 PARAMETER Experiment Name: At_42deg_Heat_cDNA_P Parameter: Timepoint (hr) Value: 0.5
  misc_feature: MA Experiment 20000093 PARAMETER Experiment Name: At_42deg_Heat_cDNA_P Parameter: Tissue Value: Aerial
  misc_feature: MA Experiment ID: 20000111 Result: Down-regulated in Transcription
  misc_feature: MA Experiment 20000111 PARAMETER Experiment Name: At_42deg_Heat_cDNA_P Parameter: Temperature (deg C) Value: 42 vs. 22
  misc_feature: MA Experiment 20000111 PARAMETER Experiment Name: At_42deg_Heat_cDNA_P Parameter: Timepoint (hr) Value: 6
  misc_feature: MA Experiment 20000111 PARAMETER Experiment Name: At_42deg_Heat_cDNA_P Parameter: Tissue Value: Aerial
  misc_feature: MA Experiment ID: 20000113 Result: Down-regulated in Transcription
  misc_feature: MA Experiment 20000113 PARAMETER Experiment Name: At_42deg_Heat_cDNA_P Parameter: Temperature (deg C) Value: 42 vs. 22
  misc_feature: MA Experiment 20000113 PARAMETER Experiment Name: At_42deg_Heat_cDNA_P Parameter: Timepoint (hr) Value: 8
  misc_feature: MA Experiment 20000113 PARAMETER Experiment Name: At_42deg_Heat_cDNA_P Parameter: Tissue Value: Aerial
  misc_feature: MA Experiment ID: 20000144 Result: Down-regulated in Transcription
  misc_feature: MA Experiment 20000144 PARAMETER Experiment Name: At_42deg_Heat_cDNA_P Parameter: Temperature (deg C) Value: 42 vs. 22
  misc_feature: MA Experiment 20000144 PARAMETER Experiment Name: At_42deg_Heat_cDNA_P Parameter: Timepoint (hr) Value: 1
  misc_feature: MA Experiment 20000144 PARAMETER Experiment Name: At_42deg_Heat_cDNA_P Parameter: Tissue Value: Aerial
  misc_feature: MA Experiment ID: 20000224 Result: Down-regulated in Transcription
  misc_feature: MA Experiment ID: 20000495 Result: Down-regulated in Transcription
  misc_feature: MA Experiment 20000495 PARAMETER Experiment Name: At_Guard_Cells_P Parameter: Harvest Date Value: 8/2/2002
  misc_feature: MA Experiment 20000495 PARAMETER Experiment Name: At_Guard_Cells_P Parameter: Organism Value: A. thaliana
  misc_feature: MA Experiment 20000495 PARAMETER Experiment Name: At_Guard_Cells_P Parameter: Tissue Value: Guard Cells vs. Leaves
  misc_feature: MA Experiment ID: 20001451 Result: Down-regulated in Transcription
  misc_feature: MA Experiment 20001451 PARAMETER Experiment Name: At_Far-red-induction_P Parameter: Age (day) Value: 7
  misc_feature: MA Experiment 20001451 PARAMETER Experiment Name: At_Far-red-induction_P Parameter: Light Value: Far-red vs. White
  misc_feature: MA Experiment 20001451 PARAMETER Experiment Name: At_Far-red-induction_P Parameter: Organism Value: A. thaliana
  misc_feature: MA Experiment 20001451 PARAMETER Experiment Name: At_Far-red-induction_P Parameter: Plant Line Value: Columbia
  misc_feature: MA Experiment 20001451 PARAMETER Experiment Name: At_Far-red-induction_P Parameter: Timepoint (hr) Value: 24
  misc_feature: MA Experiment 20001451 PARAMETER Experiment Name: At_Far-red-induction_P Parameter: Tissue Value: Whole Plant
  misc_feature: Pfam Name: Histone Pfam Description: Core histone H2A/H2B/H3/H4
gaagtaacatactttttacaatcacatttttgaagaactttcattccataaatctacagatctttgtgtatcaagtaaagagatgtcaggaagaggaaagggaggaaaaggattgggaaagggaggagcgaagaggcacaggaaggttctgagggataacattcaaggaatcaccaagcctgctattcgtcgtcttgctcgtagaggtggtgtcaagcgtatcagtggtctcatctacgaagagaccagaggtgtcctcaagatcttcctcgagaatgttatccgtgacgccgttacctacactgagcacgccaggaggaagacggtgaccgccatggatgttgtctacgctttgaagaggcaaggtcgtactctctacggtttcggaggttaatccgatttgggggattagggtttatgcaagtttggggatttcttcttgtttctgagatccgtgttaaatggtttgaattagtcaaaagtaaattcaggagttagtttttgtttctcgtttttcgttgttattagccaatgtgatgtagtagttaattatcttttgcaagctttgtgctaagaaaatctaatgagaattatccatttgctt

SEQ ID NO: 72009 - protein, 103 aa, Arabidopsis thaliana; identical to SEQ ID NO: 7737
  peptide (1)..(103): Ceres Seq. ID no. 4909589
  misc_feature: Pfam Name: Histone Pfam Description: Core histone H2A/H2B/H3/H4
  misc_feature (1)..(103): Homolog of NCBI NO: 34876368 NR Description: similar to germinal histone H4 gene [Rattus
  misc_feature (1)..(103): Homolog of NCBI NO: 15226944 NR Description: histone H4; protein id: At2g28740.1, supported by
  misc_feature (1)..(103): Homolog of NCBI NO: 17540668 NR Description: Histone H4 family member [Caenorhabditis elegans]
  misc_feature (1)..(103): Homolog of NCBI NO: 31197305 NR Description: ENSANGP00000016197 [Anopheles gambiae]
  misc_feature (1)..(103): Homolog of NCBI NO: 27692960 NR Description: Similar to germinal histone H4 gene [Mus musculus]
  misc_feature (1)..(103): Homolog of NCBI NO: 462243 NR Description: Histone H4 >gi|421921|pir||S32769 histone H4 - >gi|297150|emb|CAA48923.1| histone H4 [Lycopersicon esculentum] histone H4 [Lycopersicon esculentum] >gi|2746721|gb|AAB94924.1|
  misc_feature (1)..(103): Homolog of NCBI NO: 1806283 NR Description: Histone H4 homologue [Sesbania rostrata]
  misc_feature (1)..(103): Homolog of NCBI NO: 4504301 NR Description: H4 histone family, member A [Homo sapiens] H4 histone family, member B [Homo sapiens] H4 histone family, member C [Homo sapiens]
  misc_feature (1)..(103): Homolog of NCBI NO: 27692935 NR Description: Similar to germinal histone H4 gene [Mus musculus]
  misc_feature (1)..(103): Homolog of NCBI NO: 34858262 NR Description: similar to germinal histone H4 gene [Rattus

SEQ ID NO: 72010 - DNA, 712 bp, Arabidopsis thaliana
  misc_feature (1)..(712): Ceres Seq. ID no. 4909590
  misc_feature: MA Experiment ID: 108433 Result: Down-regulated in Transcription
  misc_feature: MA Experiment 108433 PARAMETER Experiment Name: At_rhl_Mutant2_cDNA_P Parameter: Age (day) Value: 7
  misc_feature: MA Experiment 108433 PARAMETER Experiment Name: At_rhl_Mutant2_cDNA_P Parameter: Organism Value: A. thaliana
  misc_feature: MA Experiment 108433 PARAMETER Experiment Name: At_rhl_Mutant2_cDNA_P Parameter: Plant Line Value: rhl Mutant vs. wt landsburg
  misc_feature: MA Experiment 108433 PARAMETER Experiment Name: At_rhl_Mutant2_cDNA_P Parameter: Tissue Value: Roots
  misc_feature: MA Experiment ID: 108434 Result: Up-regulated in Transcription
  misc_feature: MA Experiment 108434 PARAMETER Experiment Name: At_Root_Tips_cDNA_P Parameter: Tissue Value: Root Tips
  misc_feature: MA Experiment ID: 108488 Result: Down-regulated in Transcription
  misc_feature: MA Experiment ID: 108573 Result: Down-regulated in Transcription
  misc_feature: MA Experiment 108573 PARAMETER Experiment Name: At_Drought_cDNA_P Parameter: Timepoint (hr) Value: 6
  misc_feature: MA Experiment 108573 PARAMETER Experiment Name: At_Drought_cDNA_P Parameter: Tissue Value: Aerial
  misc_feature: MA Experiment 108573 PARAMETER Experiment Name: At_Drought_cDNA_P Parameter: Treatment Value: Drought vs. No Drought
  misc_feature: MA Experiment ID: 108576 Result: Down-regulated in Transcription
  misc_feature: MA Experiment 108576 PARAMETER Experiment Name: At_42deg_Heat_cDNA_P Parameter: Temperature (deg C) Value: 42 vs. 22
  misc_feature: MA Experiment 108576 PARAMETER Experiment Name: At_42deg_Heat_cDNA_P Parameter: Timepoint (hr) Value: 1
  misc_feature: MA Experiment 108576 PARAMETER Experiment Name: At_42deg_Heat_cDNA_P Parameter: Tissue Value: Aerial
  misc_feature: MA Experiment ID: 108577 Result: Down-regulated in Transcription
  misc_feature: MA Experiment 108577 PARAMETER Experiment Name: At_42deg_Heat_cDNA_P Parameter: Temperature (deg C) Value: 42 vs. 22
  misc_feature: MA Experiment 108577 PARAMETER Experiment Name: At_42deg_Heat_cDNA_P Parameter: Timepoint (hr) Value: 6
  misc_feature: MA Experiment 108577 PARAMETER Experiment Name: At_42deg_Heat_cDNA_P Parameter: Tissue Value: Aerial
  misc_feature: MA Experiment ID: 20000093 Result: Down-regulated in Transcription
  misc_feature: MA Experiment 20000093 PARAMETER Experiment Name: At_42deg_Heat_cDNA_P Parameter: Temperature (deg C) Value: 42 vs. 22
  misc_feature: MA Experiment 20000093 PARAMETER Experiment Name: At_42deg_Heat_cDNA_P Parameter: Timepoint (hr) Value: 0.5
  misc_feature: MA Experiment 20000093 PARAMETER Experiment Name: At_42deg_Heat_cDNA_P Parameter: Tissue Value: Aerial
  misc_feature: MA Experiment ID: 20000111 Result: Down-regulated in Transcription
  misc_feature: MA Experiment 20000111 PARAMETER Experiment Name: At_42deg_Heat_cDNA_P Parameter: Temperature (deg C) Value: 42 vs. 22
  misc_feature: MA Experiment 20000111 PARAMETER Experiment Name: At_42deg_Heat_cDNA_P Parameter: Timepoint (hr) Value: 6
  misc_feature: MA Experiment 20000111 PARAMETER Experiment Name: At_42deg_Heat_cDNA_P Parameter: Tissue Value: Aerial
  misc_feature: MA Experiment ID: 20000112 Result: Down-regulated in Transcription
  misc_feature: MA Experiment 20000112 PARAMETER Experiment Name: At_42deg_Heat_cDNA_P Parameter: Temperature (deg C) Value: 42 vs. 22
  misc_feature: MA Experiment 20000112 PARAMETER Experiment Name: At_42deg_Heat_cDNA_P Parameter: Timepoint (hr) Value: 2
  misc_feature: MA Experiment 20000112 PARAMETER Experiment Name: At_42deg_Heat_cDNA_P Parameter: Tissue Value: Aerial
  misc_feature: MA Experiment ID: 20000144 Result: Down-regulated in Transcription
  misc_feature: MA Experiment 20000144 PARAMETER Experiment Name: At_42deg_Heat_cDNA_P Parameter: Temperature (deg C) Value: 42 vs. 22
  misc_feature: MA Experiment 20000144 PARAMETER Experiment Name: At_42deg_Heat_cDNA_P Parameter: Timepoint (hr) Value: 1
  misc_feature: MA Experiment 20000144 PARAMETER Experiment Name: At_42deg_Heat_cDNA_P Parameter: Tissue Value: Aerial
  misc_feature: MA Experiment ID: 20000306 Result: Up-regulated in Transcription
  misc_feature: MA Experiment 20000306 PARAMETER Experiment Name: At_Germinating_Seeds_Sub_P Parameter: Age (hr) Value: 6 vs. 0
  misc_feature: MA Experiment 20000306 PARAMETER Experiment Name: At_Germinating_Seeds_Sub_P Parameter: Organism Value: A. thaliana
  misc_feature: MA Experiment 20000306 PARAMETER Experiment Name: At_Germinating_Seeds_Sub_P Parameter: Plant Line Value: WS
  misc_feature: MA Experiment 20000306 PARAMETER Experiment Name: At_Germinating_Seeds_Sub_P Parameter: Tissue Value: Germinating Seeds
  misc_feature: MA Experiment ID: 20000307 Result: Up-regulated in Transcription
  misc_feature: MA Experiment 20000307 PARAMETER Experiment Name: At_Germinating_Seeds_Sub_P Parameter: Age (hr) Value: 24 vs. 0
  misc_feature: MA Experiment 20000307 PARAMETER Experiment Name: At_Germinating_Seeds_Sub_P Parameter: Organism Value: A. thaliana
  misc_feature: MA Experiment 20000307 PARAMETER Experiment Name: At_Germinating_Seeds_Sub_P Parameter: Plant Line Value: WS
  misc_feature: MA Experiment 20000307 PARAMETER Experiment Name: At_Germinating_Seeds_Sub_P Parameter: Tissue Value: Germinating Seeds
  misc_feature: MA Experiment ID: 20000327 Result: Down-regulated in Transcription
  misc_feature: MA Experiment 20000327 PARAMETER Experiment Name: At_42deg_Heat_Sub_P Parameter: Age (day) Value: 14
  misc_feature: MA Experiment 20000327 PARAMETER Experiment Name: At_42deg_Heat_Sub_P Parameter: Organism Value: A. thaliana
  misc_feature: MA Experiment 20000327 PARAMETER Experiment Name: At_42deg_Heat_Sub_P Parameter: Plant Line Value: WS
  misc_feature: MA Experiment 20000327 PARAMETER Experiment Name: At_42deg_Heat_Sub_P Parameter: Temperature (deg C) Value: 42 vs. 22
  misc_feature: MA Experiment 20000327 PARAMETER Experiment Name: At_42deg_Heat_Sub_P Parameter: Timepoint (hr) Value: 1
  misc_feature: MA Experiment 20000327 PARAMETER Experiment Name: At_42deg_Heat_Sub_P Parameter: Tissue Value: Aerial
  misc_feature: Pfam Name: Histone Pfam Description: Core histone H2A/H2B/H3/H4
ccgtcaaattcaattgatcctctctccaaatcatcttaaaagtatcttcttcttctccatctggtttattgttcgatcgtcaattcaattgattgatttggaaatctagcgtttctgttcgttaccattcactgaataatttttcttctgttcttcacagtcacagatctttgggtatcaagtaaaactgtgaagtgatgtcgggaagaggaaagggaggaaaaggattgggaaagggaggagcgaagaggcacaggaaggttctgagggataacattcaaggaatcaccaagcctgccattcgtcgtcttgctcgtagaggtggtgtcaagcgtatcagtggtctcatctacgaagagaccagaggtgtcctcaagatcttcctcgagaatgtcatccgtgacgccgttacttacactgagcacgctagaaggaagacggtgaccgccatggatgttgtctacgctttgaagaggcaaggtcgtactctctacggtttcggaggttaatccgatttgggggattagggtttatgcaagtttggggatttcttcttgtttctgagatctgtgttaaatggtttgaattagtctaaagtaaatctaggagtgttagctactgcttttgttttctattgtgatgtcgttgttagccaatgcggtgtagttgaaaatctttgcaaacttaaagctaagaaaatctaatgaggatg

SEQ ID NO: 72011 - protein, 103 aa, Arabidopsis thaliana; identical to SEQ ID NO: 7737
  peptide (1)..(103): Ceres Seq. ID no. 4909591
  misc_feature: Pfam Name: Histone Pfam Description: Core histone H2A/H2B/H3/H4
  misc_feature (1)..(103): Homolog of NCBI NO: 15226944 NR Description: histone H4; protein id: At2g28740.1, supported by
  misc_feature (1)..(103): Homolog of NCBI NO: 27692935 NR Description: Similar to germinal histone H4 gene [Mus musculus]
  misc_feature (1)..(103): Homolog of NCBI NO: 462243 NR Description: Histone H4 >gi|421921|pir||S32769 histone H4 - >gi|297150|emb|CAA48923.1| histone H4 [Lycopersicon esculentum] histone H4 [Lycopersicon esculentum] >gi|2746721|gb|AAB94924.1|
  misc_feature (1)..(103): Homolog of NCBI NO: 1806283 NR Description: Histone H4 homologue [Sesbania rostrata]
  misc_feature (1)..(103): Homolog of NCBI NO: 4504301 NR Description: H4 histone family, member A [Homo sapiens] H4 histone family, member B [Homo sapiens] H4 histone family, member C [Homo sapiens]
  misc_feature (1)..(103): Homolog of NCBI NO: 27692960 NR Description: Similar to germinal histone H4 gene [Mus musculus]
  misc_feature (1)..(103): Homolog of NCBI NO: 31197305 NR Description: ENSANGP00000016197 [Anopheles gambiae]
  misc_feature (1)..(103): Homolog of NCBI NO: 31212289 NR Description: ENSANGP00000015255 [Anopheles gambiae]
  misc_feature (1)..(103): Homolog of NCBI NO: 34858262 NR Description: similar to germinal histone H4 gene [Rattus
  misc_feature (1)..(103): Homolog of NCBI NO: 34876368 NR Description: similar to germinal histone H4 gene [Rattus

SEQ ID NO: 72012 - DNA, 805 bp, Arabidopsis thaliana
  misc_feature (1)..(805): Ceres Seq. ID no. 4909688
  misc_feature: MA Experiment ID: 108434 Result: Up-regulated in Transcription
  misc_feature: MA Experiment 108434 PARAMETER Experiment Name: At_Root_Tips_cDNA_P Parameter: Tissue Value: Root Tips
  misc_feature: MA Experiment ID: 108435 Result: Down-regulated in Transcription
  misc_feature: MA Experiment 108435 PARAMETER Experiment Name: At_stm_Mutants_cDNA_P Parameter: Plant Line Value: wt Landsburg vs stm
  misc_feature: MA Experiment 108435 PARAMETER Experiment Name: At_stm_Mutants_cDNA_P Parameter: Tissue Value: Shoot Apical Meristem Region
  misc_feature: MA Experiment ID: 108463 Result: Up-regulated in Transcription
  misc_feature: MA Experiment 108463 PARAMETER Experiment Name: At_Germinating_Seeds_cDNA_P Parameter: Age (day) Value: 3 vs. 0
  misc_feature: MA Experiment 108463 PARAMETER Experiment Name: At_Germinating_Seeds_cDNA_P Parameter: Tissue Value: Germinating Seeds
  misc_feature: MA Experiment ID: 108473 Result: Up-regulated in Transcription
  misc_feature: MA Experiment 108473 PARAMETER Experiment Name: At_Drought_Flowers_cDNA_P Parameter: Timepoint (hr) Value: 7 d
  misc_feature: MA Experiment 108473 PARAMETER Experiment Name: At_Drought_Flowers_cDNA_P Parameter: Tissue Value: Flower
  misc_feature: MA Experiment 108473 PARAMETER Experiment Name: At_Drought_Flowers_cDNA_P Parameter: Treatment Value: Drought vs. No Drought
  misc_feature: MA Experiment ID: 108561 Result: Up-regulated in Transcription
  misc_feature: MA Experiment 108561 PARAMETER Experiment Name: At_100uM_ABA_cDNA_P Parameter: Timepoint (hr) Value: 6
  misc_feature: MA Experiment 108561 PARAMETER Experiment Name: At_100uM_ABA_cDNA_P Parameter: Tissue Value: Aerial
  misc_feature: MA Experiment 108561 PARAMETER Experiment Name: At_100uM_ABA_cDNA_P Parameter: Treatment Value: 100uM ABA vs. No Treatment
  misc_feature: MA Experiment ID: 108574 Result: Down-regulated in Transcription
  misc_feature: MA Experiment 108574 PARAMETER Experiment Name: At_Wounding__cDNA_P Parameter: Timepoint (hr) Value: 1
  misc_feature: MA Experiment 108574 PARAMETER Experiment Name: At_Wounding__cDNA_P Parameter: Tissue Value: Aerial
  misc_feature: MA Experiment 108574 PARAMETER Experiment Name: At_Wounding__cDNA_P Parameter: Treatment Value: Wounding vs. No Wounding
  misc_feature: MA Experiment ID: 108576 Result: Up-regulated in Transcription
  misc_feature: MA Experiment 108576 PARAMETER Experiment Name: At_42deg_Heat_cDNA_P Parameter: Temperature (deg C) Value: 42 vs. 22
  misc_feature: MA Experiment 108576 PARAMETER Experiment Name: At_42deg_Heat_cDNA_P Parameter: Timepoint (hr) Value: 1
  misc_feature: MA Experiment 108576 PARAMETER Experiment Name: At_42deg_Heat_cDNA_P Parameter: Tissue Value: Aerial
  misc_feature: MA Experiment ID: 108579 Result: Down-regulated in Transcription
  misc_feature: MA Experiment 108579 PARAMETER Experiment Name: At_4deg_Cold_cDNA_P Parameter: Temperature (deg C) Value: 4 vs. 22
  misc_feature: MA Experiment 108579 PARAMETER Experiment Name: At_4deg_Cold_cDNA_P Parameter: Timepoint (hr) Value: 6
  misc_feature: MA Experiment 108579 PARAMETER Experiment Name: At_4deg_Cold_cDNA_P Parameter: Tissue Value: Aerial
  misc_feature: MA Experiment ID: 108595 Result: Up-regulated in Transcription
  misc_feature: MA Experiment 108595 PARAMETER Experiment Name: At_Ler-pi_Ovule_cDNA_P Parameter: Plant Line Value: null
  misc_feature: MA Experiment ID: 108605 Result: Up-regulated in Transcription
  misc_feature: MA Experiment 108605 PARAMETER Experiment Name: At_100uM_ABA_cDNA_P Parameter: Timepoint (hr) Value: 6
  misc_feature: MA Experiment 108605 PARAMETER Experiment Name: At_100uM_ABA_cDNA_P Parameter: Tissue Value: Aerial
  misc_feature: MA Experiment 108605 PARAMETER Experiment Name: At_100uM_ABA_cDNA_P Parameter: Treatment Value: 100uM ABA vs. No Treatment
  misc_feature: MA Experiment ID: 108607 Result: Up-regulated in Transcription
  misc_feature: MA Experiment 108607 PARAMETER Experiment Name: At_100uM_ABA_cDNA_P Parameter: Timepoint (hr) Value: 4
  misc_feature: MA Experiment 108607 PARAMETER Experiment Name: At_100uM_ABA_cDNA_P Parameter: Tissue Value: Aerial
  misc_feature: MA Experiment 108607 PARAMETER Experiment Name: At_100uM_ABA_cDNA_P Parameter: Treatment Value: 100uM ABA vs. No Treatment
  misc_feature: MA Experiment ID: 108608 Result: Up-regulated in Transcription
  misc_feature: MA Experiment 108608 PARAMETER Experiment Name: At_100uM_ABA_cDNA_P Parameter: Timepoint (hr) Value: 1
  misc_feature: MA Experiment 108608 PARAMETER Experiment Name: At_100uM_ABA_cDNA_P Parameter: Tissue Value: Aerial
  misc_feature: MA Experiment 108608 PARAMETER Experiment Name: At_100uM_ABA_cDNA_P Parameter: Treatment Value: 100uM ABA vs. No Treatment
  misc_feature: MA Experiment ID: 108609 Result: Up-regulated in Transcription
  misc_feature: MA Experiment 108609 PARAMETER Experiment Name: At_100uM_ABA_cDNA_P Parameter: Timepoint (hr) Value: 24
  misc_feature: MA Experiment 108609 PARAMETER Experiment Name: At_100uM_ABA_cDNA_P Parameter: Tissue Value: Aerial
  misc_feature: MA Experiment 108609 PARAMETER Experiment Name: At_100uM_ABA_cDNA_P Parameter: Treatment Value: 100uM ABA vs. No Treatment
  misc_feature: MA Experiment ID: 20000069 Result: Up-regulated in Transcription
  misc_feature: MA Experiment 20000069 PARAMETER Experiment Name: At_100uM_ABA_Mutants_cDNA_P Parameter: Plant Line Value: CS23
  misc_feature: MA Experiment 20000069 PARAMETER Experiment Name: At_100uM_ABA_Mutants_cDNA_P Parameter: Timepoint (hr) Value: 6
  misc_feature: MA Experiment 20000069 PARAMETER Experiment Name: At_100uM_ABA_Mutants_cDNA_P Parameter: Tissue Value: Aerial
  misc_feature: MA Experiment 20000069 PARAMETER Experiment Name: At_100uM_ABA_Mutants_cDNA_P Parameter: Treatment Value: 100uM ABA vs. No Treatment
  misc_feature: MA Experiment ID: 20000070 Result: Up-regulated in Transcription
  misc_feature: MA Experiment 20000070 PARAMETER Experiment Name: At_100uM_ABA_Mutants_cDNA_P Parameter: Plant Line Value: CS24
  misc_feature: MA Experiment 20000070 PARAMETER Experiment Name: At_100uM_ABA_Mutants_cDNA_P Parameter: Timepoint (hr) Value: 6
  misc_feature: MA Experiment 20000070 PARAMETER Experiment Name: At_100uM_ABA_Mutants_cDNA_P Parameter: Tissue Value: Aerial
  misc_feature: MA Experiment 20000070 PARAMETER Experiment Name: At_100uM_ABA_Mutants_cDNA_P Parameter: Treatment Value: 100uM ABA vs. No Treatment
  misc_feature: MA Experiment ID: 20000071 Result: Up-regulated in Transcription
  misc_feature: MA Experiment 20000071 PARAMETER Experiment Name: At_100uM_ABA_Mutants_cDNA_P Parameter: Plant Line Value: CS8104
  misc_feature: MA Experiment 20000071 PARAMETER Experiment Name: At_100uM_ABA_Mutants_cDNA_P Parameter: Timepoint (hr) Value: 6
  misc_feature: MA Experiment 20000071 PARAMETER Experiment Name: At_100uM_ABA_Mutants_cDNA_P Parameter: Tissue Value: Aerial
  misc_feature: MA Experiment 20000071 PARAMETER Experiment Name: At_100uM_ABA_Mutants_cDNA_P Parameter: Treatment Value: 100uM ABA vs. No Treatment
  misc_feature: MA Experiment ID: 20000072 Result: Up-regulated in Transcription
  misc_feature: MA Experiment 20000072 PARAMETER Experiment Name: At_100uM_ABA_Mutants_cDNA_P Parameter: Plant Line Value: CS8105
  misc_feature: MA Experiment 20000072 PARAMETER Experiment Name: At_100uM_ABA_Mutants_cDNA_P Parameter: Timepoint (hr) Value: 6
  misc_feature: MA Experiment 20000072 PARAMETER Experiment Name: At_100uM_ABA_Mutants_cDNA_P Parameter: Tissue Value: Aerial
  misc_feature: MA Experiment 20000072 PARAMETER Experiment Name: At_100uM_ABA_Mutants_cDNA_P Parameter: Treatment Value: 100uM ABA vs. No Treatment
  misc_feature: MA Experiment ID: 20000086 Result: Up-regulated in Transcription
  misc_feature: MA Experiment 20000086 PARAMETER Experiment Name: At_100uM_ABA_Mutants_cDNA_P Parameter: Plant Line Value: CS22
  misc_feature: MA Experiment 20000086 PARAMETER Experiment Name: At_100uM_ABA_Mutants_cDNA_P Parameter: Timepoint (hr) Value: 6
  misc_feature: MA Experiment 20000086 PARAMETER Experiment Name: At_100uM_ABA_Mutants_cDNA_P Parameter: Tissue Value: Aerial
  misc_feature: MA Experiment 20000086 PARAMETER Experiment Name: At_100uM_ABA_Mutants_cDNA_P Parameter: Treatment Value: 100uM ABA vs. No Treatment
  misc_feature: MA Experiment ID: 20000087 Result: Up-regulated in Transcription
  misc_feature: MA Experiment 20000087 PARAMETER Experiment Name: At_100uM_ABA_Mutants_cDNA_P Parameter: Plant Line Value: WS
  misc_feature: MA Experiment 20000087 PARAMETER Experiment Name: At_100uM_ABA_Mutants_cDNA_P Parameter: Timepoint (hr) Value: 6
  misc_feature: MA Experiment 20000087 PARAMETER Experiment Name: At_100uM_ABA_Mutants_cDNA_P Parameter: Tissue Value: Aerial
  misc_feature: MA Experiment 20000087 PARAMETER Experiment Name: At_100uM_ABA_Mutants_cDNA_P Parameter: Treatment Value: 100uM ABA vs. No Treatment
  misc_feature: MA Experiment ID: 20000088 Result: Up-regulated in Transcription
  misc_feature: MA Experiment 20000088 PARAMETER Experiment Name: At_100uM_ABA_Mutants_cDNA_P Parameter: Plant Line Value: Landsberg
  misc_feature: MA Experiment 20000088 PARAMETER Experiment Name: At_100uM_ABA_Mutants_cDNA_P Parameter: Timepoint (hr) Value: 6
  misc_feature: MA Experiment 20000088 PARAMETER Experiment Name: At_100uM_ABA_Mutants_cDNA_P Parameter: Tissue Value: Aerial
  misc_feature: MA Experiment 20000088 PARAMETER Experiment Name: At_100uM_ABA_Mutants_cDNA_P Parameter: Treatment Value: 100uM ABA vs. No Treatment
  misc_feature: MA Experiment ID: 20000089 Result: Up-regulated in Transcription
  misc_feature: MA Experiment ID: 20000090 Result: Up-regulated in Transcription
  misc_feature: MA Experiment ID: 20000093 Result: Up-regulated in Transcription
  misc_feature: MA Experiment 20000093 PARAMETER Experiment Name: At_42deg_Heat_cDNA_P Parameter: Temperature (deg C) Value: 42 vs. 22
  misc_feature: MA Experiment 20000093 PARAMETER Experiment Name: At_42deg_Heat_cDNA_P Parameter: Timepoint (hr) Value: 0.5
  misc_feature: MA Experiment 20000093 PARAMETER Experiment Name: At_42deg_Heat_cDNA_P Parameter: Tissue Value: Aerial
  misc_feature: MA Experiment ID: 20000112 Result: Up-regulated in Transcription
  misc_feature: MA Experiment 20000112 PARAMETER Experiment Name: At_42deg_Heat_cDNA_P Parameter: Temperature (deg C) Value: 42 vs. 22
  misc_feature: MA Experiment 20000112 PARAMETER Experiment Name: At_42deg_Heat_cDNA_P Parameter: Timepoint (hr) Value: 2
  misc_feature: MA Experiment 20000112 PARAMETER Experiment Name: At_42deg_Heat_cDNA_P Parameter: Tissue Value: Aerial
  misc_feature: MA Experiment ID: 20000117 Result: Up-regulated in Transcription
  misc_feature: MA Experiment 20000117 PARAMETER Experiment Name: At_100uM_ABA_Mutants_cDNA_P Parameter: Plant Line Value: Columbia
  misc_feature: MA Experiment 20000117 PARAMETER Experiment Name: At_100uM_ABA_Mutants_cDNA_P Parameter: Timepoint (hr) Value: 6
  misc_feature: MA Experiment 20000117 PARAMETER Experiment Name: At_100uM_ABA_Mutants_cDNA_P Parameter: Tissue Value: Aerial
  misc_feature: MA Experiment 20000117 PARAMETER Experiment Name: At_100uM_ABA_Mutants_cDNA_P Parameter: Treatment Value: 100uM ABA vs. No Treatment
  misc_feature: MA Experiment ID: 20000144 Result: Up-regulated in Transcription
  misc_feature: MA Experiment 20000144 PARAMETER Experiment Name: At_42deg_Heat_cDNA_P Parameter: Temperature (deg C) Value: 42 vs. 22
  misc_feature: MA Experiment 20000144 PARAMETER Experiment Name: At_42deg_Heat_cDNA_P Parameter: Timepoint (hr) Value: 1
  misc_feature: MA Experiment 20000144 PARAMETER Experiment Name: At_42deg_Heat_cDNA_P Parameter: Tissue Value: Aerial
  misc_feature: MA Experiment ID: 20000169 Result: Up-regulated in Transcription
  misc_feature: MA Experiment 20000169 PARAMETER Experiment Name: At_100uM_ABA_P Parameter: Age (day) Value: 14
  misc_feature: MA Experiment 20000169 PARAMETER Experiment Name: At_100uM_ABA_P Parameter: Organism Value: A. thaliana
  misc_feature: MA Experiment 20000169 PARAMETER Experiment Name: At_100uM_ABA_P Parameter: Plant Line Value: WS
  misc_feature: MA Experiment 20000169 PARAMETER Experiment Name: At_100uM_ABA_P Parameter: Timepoint (hr) Value: 6
  misc_feature: MA Experiment 20000169 PARAMETER Experiment Name: At_100uM_ABA_P Parameter: Tissue Value: Aerial
  misc_feature: MA Experiment 20000169 PARAMETER Experiment Name: At_100uM_ABA_P Parameter: Treatment Value: 100uM ABA vs. No Treatment
  misc_feature: MA Experiment ID: 20000171 Result: Up-regulated in Transcription
  misc_feature: MA Experiment 20000171 PARAMETER Experiment Name: At_42deg_Heat_P Parameter: Age (day) Value: 14
  misc_feature: MA Experiment 20000171 PARAMETER Experiment Name: At_42deg_Heat_P Parameter: Organism Value: A. thaliana
  misc_feature: MA Experiment 20000171 PARAMETER Experiment Name: At_42deg_Heat_P Parameter: Plant Line Value: WS
  misc_feature: MA Experiment 20000171 PARAMETER Experiment Name: At_42deg_Heat_P Parameter: Temperature (deg C) Value: 42 vs. 22
  misc_feature: MA Experiment 20000171 PARAMETER Experiment Name: At_42deg_Heat_P Parameter: Timepoint (hr) Value: 1
  misc_feature: MA Experiment 20000171 PARAMETER Experiment Name: At_42deg_Heat_P Parameter: Tissue Value: Aerial
  misc_feature: MA Experiment ID: 20000179 Result: Up-regulated in Transcription
  misc_feature: MA Experiment 20000179 PARAMETER Experiment Name: At_Germinating_Seeds_P Parameter: Age (hr) Value: 6 vs. 0
  misc_feature: MA Experiment 20000179 PARAMETER Experiment Name: At_Germinating_Seeds_P Parameter: Tissue Value: Germinating Seeds
  misc_feature: MA Experiment ID: 20000214 Result: Down-regulated in Transcription
  misc_feature: MA Experiment 20000214 PARAMETER Experiment Name: At_4deg_Cold_P Parameter: Timepoint (hr) Value: 6
  misc_feature: MA Experiment ID: 20000224 Result: Down-regulated in Transcription
  misc_feature: MA Experiment ID: 20000227 Result: Down-regulated in Transcription
  misc_feature: MA Experiment 20000227 PARAMETER Experiment Name: At_Root-Tips-vs-Tops_P Parameter: Tissue Value: Root Tips vs. Root Tops
  misc_feature: MA Experiment ID: 20000234 Result: Down-regulated in Transcription
  misc_feature: MA Experiment 20000234 PARAMETER Experiment Name: At_Siliques_P Parameter: Age (day) Value: 21
  misc_feature: MA Experiment 20000234 PARAMETER Experiment Name: At_Siliques_P Parameter: Organism Value: A. thaliana
  misc_feature: MA Experiment 20000234 PARAMETER Experiment Name: At_Siliques_P Parameter: Plant Line Value: WS
  misc_feature: MA Experiment 20000234 PARAMETER Experiment Name: At_Siliques_P Parameter: Tissue Value: Less Than 5mm Siliques vs. Whole Plant
  misc_feature: MA Experiment ID: 20000267 Result: Up-regulated in Transcription
  misc_feature: MA Experiment 20000267 PARAMETER Experiment Name: At_Drought_P Parameter: Age (day) Value: 7
  misc_feature: MA Experiment 20000267 PARAMETER Experiment Name: At_Drought_P Parameter: Organism Value: A. thaliana
  misc_feature: MA Experiment 20000267 PARAMETER Experiment Name: At_Drought_P Parameter: Plant Line Value: WS
  misc_feature: MA Experiment 20000267 PARAMETER Experiment Name: At_Drought_P Parameter: Timepoint (hr) Value: 6
  misc_feature: MA Experiment 20000267 PARAMETER Experiment Name: At_Drought_P Parameter: Tissue Value: Whole Plant
  misc_feature: MA Experiment 20000267 PARAMETER Experiment Name: At_Drought_P Parameter: Treatment Value: Drought vs. No Drought
  misc_feature: MA Experiment ID: 20000286 Result: Down-regulated in Transcription
  misc_feature: MA Experiment 20000286 PARAMETER Experiment Name: At_Open_Flower_P Parameter: Age (day) Value: 21
  misc_feature: MA Experiment 20000286 PARAMETER Experiment Name: At_Open_Flower_P Parameter: Plant Line Value: WS
  misc_feature: MA Experiment 20000286 PARAMETER Experiment Name: At_Open_Flower_P Parameter: Tissue Value: Half Open vs. Whole Plant
  misc_feature: MA Experiment ID: 20000437 Result: Up-regulated in Transcription
  misc_feature: MA Experiment 20000437 PARAMETER Experiment Name: At_Drought_P Parameter: Age (day) Value: 8
  misc_feature: MA Experiment 20000437 PARAMETER Experiment Name: At_Drought_P Parameter: Organism Value: A. thaliana
  misc_feature: MA Experiment 20000437 PARAMETER Experiment Name: At_Drought_P Parameter: Plant Line Value: WS
  misc_feature: MA Experiment 20000437 PARAMETER Experiment Name: At_Drought_P Parameter: Timepoint (hr) Value: 24
  misc_feature: MA Experiment 20000437 PARAMETER Experiment Name: At_Drought_P Parameter: Tissue Value: Whole Plant
  misc_feature: MA Experiment 20000437 PARAMETER Experiment Name: At_Drought_P Parameter: Treatment Value: Drought vs. No Drought
  misc_feature: MA Experiment ID: 20000453 Result: Up-regulated in Transcription
  misc_feature: MA Experiment 20000453 PARAMETER Experiment Name: At_100uM_ABA_P Parameter: Age (day) Value: 15
  misc_feature: MA Experiment 20000453 PARAMETER Experiment Name: At_100uM_ABA_P Parameter: Organism Value: A. thaliana
  misc_feature: MA Experiment 20000453 PARAMETER Experiment Name: At_100uM_ABA_P Parameter: Plant Line Value: WS
  misc_feature: MA Experiment 20000453 PARAMETER Experiment Name: At_100uM_ABA_P Parameter: Timepoint (hr) Value: 24
  misc_feature: MA Experiment 20000453 PARAMETER Experiment Name: At_100uM_ABA_P Parameter: Tissue Value: Aerial
  misc_feature: MA Experiment 20000453 PARAMETER Experiment Name: At_100uM_ABA_P Parameter: Treatment Value: 100uM ABA vs. No Treatment
  misc_feature: MA Experiment ID: 20000794 Result: Down-regulated in Transcription
  misc_feature: MA Experiment 20000794 PARAMETER Experiment Name: At_Petals_P Parameter: Age (day) Value: 23-25 days
  misc_feature: MA Experiment 20000794 PARAMETER Experiment Name: At_Petals_P Parameter: Plant Line Value: WS
  misc_feature: MA Experiment 20000794 PARAMETER Experiment Name: At_Petals_P Parameter: Tissue Value: Petals vs. Whole plant
  misc_feature: MA Experiment ID: 20001459 Result: Down-regulated in Transcription
  misc_feature: MA Experiment 20001459 PARAMETER Experiment Name: At_50mM_NH4NO3_L-to-H_P Parameter: Age (day) Value: Undefined
  misc_feature: MA Experiment 20001459 PARAMETER Experiment Name: At_50mM_NH4NO3_L-to-H_P Parameter: Organism Value: Undefined
  misc_feature: MA Experiment 20001459 PARAMETER Experiment Name: At_50mM_NH4NO3_L-to-H_P Parameter: Plant Line Value: Undefined
  misc_feature: MA Experiment 20001459 PARAMETER Experiment Name: At_50mM_NH4NO3_L-to-H_P Parameter: Timepoint (hr) Value: 4
  misc_feature: MA Experiment 20001459 PARAMETER Experiment Name: At_50mM_NH4NO3_L-to-H_P Parameter: Tissue Value: Siliques
  misc_feature: MA Experiment 20001459 PARAMETER Experiment Name: At_50mM_NH4NO3_L-to-H_P Parameter: Treatment Value: 50mM NH4NO3 vs. 100mM Manitol
  misc_feature: MA Experiment ID: 20001554 Result: Up-regulated in Transcription
  misc_feature: MA Experiment 20001554 PARAMETER Experiment Name: At_Drought_Soil_Dry_P Parameter: Age (day) Value: 21
  misc_feature: MA Experiment 20001554 PARAMETER Experiment Name: At_Drought_Soil_Dry_P Parameter: Organism Value: A. thaliana
  misc_feature: MA Experiment 20001554 PARAMETER Experiment Name: At_Drought_Soil_Dry_P Parameter: Plant Line Value: WS
  misc_feature: MA Experiment 20001554 PARAMETER Experiment Name: At_Drought_Soil_Dry_P Parameter: Post Timepoint (hr) Value: None
  misc_feature: MA Experiment 20001554 PARAMETER Experiment Name: At_Drought_Soil_Dry_P Parameter: Post-Treatment Value: None
  misc_feature: MA Experiment 20001554 PARAMETER Experiment Name: At_Drought_Soil_Dry_P Parameter: Timepoint (day) Value: 7
  misc_feature: MA Experiment 20001554 PARAMETER Experiment Name: At_Drought_Soil_Dry_P Parameter: Treatment Value: Drought vs. No Drought
  misc_feature: MA Experiment ID: 20001555 Result: Up-regulated in Transcription
  misc_feature: MA Experiment 20001555 PARAMETER Experiment Name: At_Drought_Soil_Dry_P Parameter: Age (day) Value: 24
  misc_feature: MA Experiment 20001555 PARAMETER Experiment Name: At_Drought_Soil_Dry_P Parameter: Organism Value: A. thaliana
  misc_feature: MA Experiment 20001555 PARAMETER Experiment Name: At_Drought_Soil_Dry_P Parameter: Plant Line Value: WS
  misc_feature: MA Experiment 20001555 PARAMETER Experiment Name: At_Drought_Soil_Dry_P Parameter: Post Timepoint (hr) Value: None
  misc_feature: MA Experiment 20001555 PARAMETER Experiment Name: At_Drought_Soil_Dry_P Parameter: Post-Treatment Value: None
  misc_feature: MA Experiment 20001555 PARAMETER Experiment Name: At_Drought_Soil_Dry_P Parameter: Timepoint (day) Value: 10
  misc_feature: MA Experiment 20001555 PARAMETER Experiment Name: At_Drought_Soil_Dry_P Parameter: Treatment Value: Drought vs. No Drought
  misc_feature: MA Experiment ID: 20001556 Result: Up-regulated in Transcription
  misc_feature: MA Experiment 20001556 PARAMETER Experiment Name: At_Drought_Soil_Dry_P Parameter: Age (day) Value: 26
  misc_feature: MA Experiment 20001556 PARAMETER Experiment Name: At_Drought_Soil_Dry_P Parameter: Organism Value: A. thaliana
  misc_feature: MA Experiment 20001556 PARAMETER Experiment Name: At_Drought_Soil_Dry_P Parameter: Plant Line Value: WS
  misc_feature: MA Experiment 20001556 PARAMETER Experiment Name: At_Drought_Soil_Dry_P Parameter: Post Timepoint (hr) Value: None
  misc_feature: MA Experiment 20001556 PARAMETER Experiment Name: At_Drought_Soil_Dry_P Parameter: Post-Treatment Value: None
  misc_feature: MA Experiment 20001556 PARAMETER Experiment Name: At_Drought_Soil_Dry_P Parameter: Timepoint (day) Value: 12
  misc_feature: MA Experiment 20001556 PARAMETER Experiment Name: At_Drought_Soil_Dry_P Parameter: Treatment Value: Drought vs. No Drought
  misc_feature: MA Experiment ID: 20001557 Result: Down-regulated in Transcription
  misc_feature: MA Experiment 20001557 PARAMETER Experiment Name: At_Drought_Soil_Dry_P Parameter: Age (day) Value: 27
  misc_feature: MA Experiment 20001557 PARAMETER Experiment Name: At_Drought_Soil_Dry_P Parameter: Organism Value: A. thaliana
  misc_feature: MA Experiment 20001557 PARAMETER Experiment Name: At_Drought_Soil_Dry_P Parameter: Plant Line Value: WS
  misc_feature: MA Experiment 20001557 PARAMETER Experiment Name: At_Drought_Soil_Dry_P Parameter: Post Timepoint (hr) Value: 3
  misc_feature: MA Experiment 20001557 PARAMETER Experiment Name: At_Drought_Soil_Dry_P Parameter: Post-Treatment Value: Re-Water vs. No Drought
  misc_feature: MA Experiment 20001557 PARAMETER Experiment Name: At_Drought_Soil_Dry_P Parameter: Timepoint (day) Value: 13
  misc_feature: MA Experiment 20001557 PARAMETER Experiment Name: At_Drought_Soil_Dry_P Parameter: Treatment Value: Drought vs. No Drought
  misc_feature: MA Experiment ID: 20001558 Result: Down-regulated in Transcription
  misc_feature: MA Experiment 20001558 PARAMETER Experiment Name: At_Drought_Soil_Dry_P Parameter: Age (day) Value: 27
  misc_feature: MA Experiment 20001558 PARAMETER Experiment Name: At_Drought_Soil_Dry_P Parameter: Organism Value: A. thaliana
  misc_feature: MA Experiment 20001558 PARAMETER Experiment Name: At_Drought_Soil_Dry_P Parameter: Plant Line Value: WS
  misc_feature: MA Experiment 20001558 PARAMETER Experiment Name: At_Drought_Soil_Dry_P Parameter: Post Timepoint (hr) Value: 6
  misc_feature: MA Experiment 20001558 PARAMETER Experiment Name: At_Drought_Soil_Dry_P Parameter: Post-Treatment Value: Re-Water vs. No Drought
  misc_feature: MA Experiment 20001558 PARAMETER Experiment Name: At_Drought_Soil_Dry_P Parameter: Timepoint (day) Value: 13
  misc_feature: MA Experiment 20001558 PARAMETER Experiment Name: At_Drought_Soil_Dry_P Parameter: Treatment Value: Drought vs. No Drought
  misc_feature: MA Experiment ID: 20001560 Result: Down-regulated in Transcription
  misc_feature: MA Experiment 20001560 PARAMETER Experiment Name: At_Drought_Soil_Dry_P Parameter: Age (day) Value: 28
  misc_feature: MA Experiment 20001560 PARAMETER Experiment Name: At_Drought_Soil_Dry_P Parameter: Organism Value: A. thaliana
  misc_feature: MA Experiment 20001560 PARAMETER Experiment Name: At_Drought_Soil_Dry_P Parameter: Plant Line Value: WS
  misc_feature: MA Experiment 20001560 PARAMETER Experiment Name: At_Drought_Soil_Dry_P Parameter: Post Timepoint (hr) Value: None
  misc_feature: MA Experiment 20001560 PARAMETER Experiment Name: At_Drought_Soil_Dry_P Parameter: Post-Treatment Value: None
  misc_feature: MA Experiment 20001560 PARAMETER Experiment Name: At_Drought_Soil_Dry_P Parameter: Timepoint (day) Value: 14
  misc_feature: MA Experiment 20001560 PARAMETER Experiment Name: At_Drought_Soil_Dry_P Parameter: Treatment Value: Drought vs. No Drought
gctctaagacccagtttgactcgttgatcaacgaaaggtaacgacaaaactctgatttccgatttcattactatgaatcgattcgaatttctgagtttctgactttgtttcagtgtgagtttgaggtgaaagatgacggcgacgatagatcggaggttatcaacgctgaatccaaacgcgccggtgtttgatccggtggaatttcgtgaggtggaggatttttcaccgaaatggtgggatctagtaacgacttcgaaatggttccgtgacttttggctcagtgctaactctgagaatgagttcctcggcggcgacgatttctcagttatggaagaagagttcgaggagatgatcgcatcgtctgatggtggatccatggctgatacagttacaggtaacgatttgtttactgttttgaaattagttgagatttagggattcgaaacattcagatctgaggatttttgtgtgttttaatggcagaagcagatgtggctagttatttgaagatgcttttgaacatagcggagtctacgaaagagaagatttatagatcgaaggtttcgtcttgttcaccaaagtataatcagaagaagtacatgaatccgaactttaattgtcgccggaatcatcatatctatcagccacggtgaagcttctagaaggaacaaagctcttcttcttcttctttcgagatgataatcagagtcgtgtctgtgtttatggctgaatctgatcttttctgctttcttgttttttgtaattctgtgaatattcctactttctataataacatcactttatg

SEQ ID NO: 72013 - protein, 100 aa, Arabidopsis thaliana
  peptide (1)..(100): Ceres Seq. ID no. 4909689
  misc_feature (1)..(98): Homolog of NCBI NO: 18414176 NR Description: Expressed protein; protein id: At4g14270.1, by cDNA: 30129., supported by cDNA: gi_15028002, supported by gi_20259214 [Arabidopsis thaliana] >gi|15028003|gb|AAK76532.1|
  misc_feature (1)..(98): Homolog of NCBI NO: 21592596 NR Description: unknown [Arabidopsis thaliana]
  misc_feature (1)..(98): Homolog of NCBI NO: 7485087 NR Description: hypothetical protein - Arabidopsis thaliana hypothetical protein [Arabidopsis thaliana]
  misc_feature (10)..(78): Homolog of NCBI NO: 8489786 NR Description: dehydration-induced protein ERD15 [Lycopersicon
  misc_feature (3)..(71): Homolog of NCBI NO: 15227351 NR Description: ERD15 protein; protein id: At2g41430.1, supported cDNA: 31388., supported by cDNA: gi_13926319, supported by cDNA: supported by cDNA: gi_17473678, supported by cDNA:
  misc_feature (3)..(63): Homolog of NCBI NO: 21592689 NR Description: ERD15 protein [Arabidopsis thaliana]
  misc_feature (1)..(54): Homolog of NCBI NO: 32352142 NR Description: hypothetical protein [Oryza sativa (japonica
  misc_feature (9)..(92): Homolog of NCBI NO: 34395186 NR Description: unknown protein [Oryza sativa (japonica
  misc_feature (9)..(92): Homolog of NCBI NO: 34899128 NR Description: P0496C02.30 [Oryza sativa (japonica
MTATIDRRLSTLNPNAPVFDPVEFREVEDFSPKWWDLVTTSKWFRDFWLSANSENEFLGGDDFSVMEEEFEEMIASSDGGSMADTVTGNDLFTVLKLVEI

SEQ ID NO: 72014 - protein, 58 aa, Arabidopsis thaliana; identical to SEQ ID NO: 25656
  peptide (1)..(58): Ceres Seq. ID no. 4909690
  misc_feature (1)..(58): Homolog of NCBI NO: 18414176 NR Description: Expressed protein; protein id: At4g14270.1, by cDNA: 30129., supported by cDNA: gi_15028002, supported by gi_20259214 [Arabidopsis thaliana] >gi|15028003|gb|AAK76532.1|
  misc_feature (1)..(58): Homolog of NCBI NO: 21592596 NR Description: unknown [Arabidopsis thaliana]
  misc_feature (1)..(39): Homolog of NCBI NO: 7485087 NR Description: hypothetical protein - Arabidopsis thaliana hypothetical protein [Arabidopsis thaliana]

SEQ ID NO: 72015 - DNA, 1096 bp, Arabidopsis thaliana
  misc_feature (1)..(1096): Ceres Seq. ID no. 4909790
  misc_feature: MA Experiment ID: 108434 Result: Down-regulated in Transcription
  misc_feature: MA Experiment 108434 PARAMETER Experiment Name: At_Root_Tips_cDNA_P Parameter: Tissue Value: Root Tips
  misc_feature: MA Experiment ID: 108595 Result: Down-regulated in Transcription
  misc_feature: MA Experiment 108595 PARAMETER Experiment Name: At_Ler-pi_Ovule_cDNA_P Parameter: Plant Line Value: null
  misc_feature: MA Experiment ID: 20000234 Result: Down-regulated in Transcription
  misc_feature: MA Experiment 20000234 PARAMETER Experiment Name: At_Siliques_P Parameter: Age (day) Value: 21
  misc_feature: MA Experiment 20000234 PARAMETER Experiment Name: At_Siliques_P Parameter: Organism Value: A. thaliana
  misc_feature: MA Experiment 20000234 PARAMETER Experiment Name: At_Siliques_P Parameter: Plant Line Value: WS
  misc_feature: MA Experiment 20000234 PARAMETER Experiment Name: At_Siliques_P Parameter: Tissue Value: Less Than 5mm Siliques vs. Whole Plant
ttcggtttcatttccacgagatctctttggctttcttgttgagatctttccacaagaaagtttagttgttttcttcttcctgtgatttcttcgcctaattttttctggatttaaaaacacgagaagtcaaggtgaaatattatcgaagtctctgaatctgtttttgaatggaaccatcatctggaaccggtcctgagaagagaccaaccgttgacttggtcaaggatagaaatggaacggatcagattcttcttcagaatcctagaggcgcctctgtaaagattagtttacatggaggacaagttctttcatggaagactgacaagggtgatgaattgttattcaacagcaccaaggccaacttgaagcctccccatccggtacgaggaggaatccctatatgctttcctcagtttggaactcggggatcacttgagcaacacgggtttgcaagaaacaagatgtggcttgtagaaaacaatccacctgctttaccttcatttgactcaactggaaaagcctatgttgatttggtgcttaagtcatctgatgaagatacgatgaggatctggccttacagctttgagtttcatctgagagtctcattggcattagatgggaacctaacactgatatcacgagtcagaaacatcaattcaaagccttttagcttttccattgcttaccacacttacttctccatttccgatattagtgaagttagacttgaagggctggaaactcttgactatcttgataatatgcatgatagagagcggttcacagagcaaggcgatgcattaacctttgaatcagagatcgatagagtgtacctaaattctaaagacgtggttgccattttcgaccatgagagaaaacgcacattcctcatcaagaaagaaggtctacctgatgtcgtggtatggaatccatgggagaagaaagcgagagcattgacggatttgggagatgatgagtatagacacatgttgtgtgtggatggagcagccattgagaaacccatcaccttgaaaccgggtgaagaatggaccgggaaattacatctctcgcttgttctttccacctaaaacccggt

SEQ ID NO: 72016 - protein, 306 aa, Arabidopsis thaliana; identical to SEQ ID NO: 35231
  peptide (1)..(306): Ceres Seq. ID no. 4909791
  misc_feature (25)..(301): Pfam Name: Aldose 1-epimerase Pfam Description: Aldose 1-epimerase
  misc_feature (1)..(306): Homolog of NCBI NO: 15236591 NR Description: putative protein; protein id: At4g23730.1, by cDNA: 21949. [Arabidopsis thaliana] >gi|7486738|pir||T05605
  misc_feature (10)..(306): Homolog of NCBI NO: 15233165 NR Description: putative protein; protein id: At3g61610.1
  misc_feature (7)..(306): Homolog of NCBI NO: 40253263 NR Description: putative Aldose 1-epimerase [Oryza sativa
  misc_feature (3)..(306): Homolog of NCBI NO: 38344152 NR Description: OSJNBa0041A02.19 [Oryza sativa (japonica
  misc_feature (11)..(306): Homolog of NCBI NO: 15242099 NR Description: apospory-associated protein C; protein id:
  misc_feature (9)..(306): Homolog of NCBI NO: 19387263 NR Description: putative apospory-associated protein C [Oryza
  misc_feature (13)..(306): Homolog of NCBI NO: 2501555 NR Description: POSSIBLE APOSPORY-ASSOCIATED PROTEIN C
  misc_feature (15)..(306): Homolog of NCBI NO: 18417396 NR Description: putative protein; protein id: At5g14500.1,
  misc_feature (15)..(306): Homolog of NCBI NO: 28393808 NR Description: unknown protein [Arabidopsis thaliana]
  misc_feature (9)..(306): Homolog of NCBI NO: 11281678 NR Description: hypothetical protein F18O22.290 - Arabidopsis >gi|7573475|emb|CAB87789.1| putative protein [Arabidopsis

SEQ ID NO: 72017 - protein, 208 aa, Arabidopsis thaliana; identical to SEQ ID NO: 35232
  peptide (1)..(208): Ceres Seq. ID no. 4909792
  misc_feature (1)..(203): Pfam Name: Aldose 1-epimerase Pfam Description: Aldose 1-epimerase
  misc_feature (1)..(208): Homolog of NCBI NO: 15236591 NR Description: putative protein; protein id: At4g23730.1, by cDNA: 21949. [Arabidopsis thaliana] >gi|7486738|pir||T05605
  misc_feature (1)..(208): Homolog of NCBI NO: 15233165 NR Description: putative protein; protein id: At3g61610.1
  misc_feature (1)..(208): Homolog of NCBI NO: 40253263 NR Description: putative Aldose 1-epimerase [Oryza sativa
  misc_feature (1)..(208): Homolog of NCBI NO: 38344152 NR Description: OSJNBa0041A02.19 [Oryza sativa (japonica
  misc_feature (1)..(208): Homolog of NCBI NO: 15242099 NR Description: apospory-associated protein C; protein id:
  misc_feature (1)..(208): Homolog of NCBI NO: 19387263 NR Description: putative apospory-associated protein C [Oryza
  misc_feature (1)..(208): Homolog of NCBI NO: 2501555 NR Description: POSSIBLE APOSPORY-ASSOCIATED PROTEIN C
  misc_feature (1)..(208): Homolog of NCBI NO: 18417396 NR Description: putative protein; protein id: At5g14500.1,
  misc_feature (1)..(208): Homolog of NCBI NO: 28393808 NR Description: unknown protein [Arabidopsis thaliana]
  misc_feature (1)..(208): Homolog of NCBI NO: 11281678 NR Description: hypothetical protein F18O22.290 - Arabidopsis >gi|7573475|emb|CAB87789.1| putative protein [Arabidopsis

SEQ ID NO: 72018 - protein, 175 aa, Arabidopsis thaliana; identical to SEQ ID NO: 35233
  peptide (1)..(175): Ceres Seq. ID no. 4909793
  misc_feature (1)..(170): Pfam Name: Aldose 1-epimerase Pfam Description: Aldose 1-epimerase
  misc_feature (1)..(175): Homolog of NCBI NO: 15236591 NR Description: putative protein; protein id: At4g23730.1, by cDNA: 21949. [Arabidopsis thaliana] >gi|7486738|pir||T05605
  misc_feature (1)..(175): Homolog of NCBI NO: 15233165 NR Description: putative protein; protein id: At3g61610.1
  misc_feature (1)..(175): Homolog of NCBI NO: 40253263 NR Description: putative Aldose 1-epimerase [Oryza sativa
  misc_feature (1)..(175): Homolog of NCBI NO: 38344152 NR Description: OSJNBa0041A02.19 [Oryza sativa (japonica
  misc_feature (1)..(175): Homolog of NCBI NO: 15242099 NR Description: apospory-associated protein C; protein id:
  misc_feature (1)..(175): Homolog of NCBI NO: 19387263 NR Description: putative apospory-associated protein C [Oryza
  misc_feature (1)..(175): Homolog of NCBI NO: 2501555 NR Description: POSSIBLE APOSPORY-ASSOCIATED PROTEIN C
  misc_feature (1)..(175): Homolog of NCBI NO: 18417396 NR Description: putative protein; protein id: At5g14500.1,
  misc_feature (1)..(175): Homolog of NCBI NO: 28393808 NR Description: unknown protein [Arabidopsis thaliana]
  misc_feature (1)..(175): Homolog of NCBI NO: 11281678 NR Description: hypothetical protein F18O22.290 - Arabidopsis >gi|7573475|emb|CAB87789.1| putative protein [Arabidopsis

SEQ ID NO: 72019 - DNA, 428 bp, Arabidopsis thaliana
  misc_feature (1)..(428): Ceres Seq. ID no. 4909822
  misc_feature: MA Experiment ID: 20001905 Result: Up-regulated in Transcription
  misc_feature: MA Experiment 20001905 PARAMETER Experiment Name: At_Drought_Reproduction_P Parameter: Age (day) Value: 40
  misc_feature: MA Experiment 20001905 PARAMETER Experiment Name: At_Drought_Reproduction_P Parameter: Organism Value: A. thaliana
  misc_feature: MA Experiment 20001905 PARAMETER Experiment Name: At_Drought_Reproduction_P Parameter: Plant Line Value: WS
  misc_feature: MA Experiment 20001905 PARAMETER Experiment Name: At_Drought_Reproduction_P Parameter: Timepoint (day) Value: 10
  misc_feature: MA Experiment 20001905 PARAMETER Experiment Name: At_Drought_Reproduction_P Parameter: Tissue Value: Rosettes
  misc_feature: MA Experiment 20001905 PARAMETER Experiment Name: At_Drought_Reproduction_P Parameter: Treatment Value: Drought vs. No Drought
aagcaaaacgcaaaaaccaaagatgggtgagatgatcaaagccagacgcatactcctcttctccatcgtattcctcttcttcttctctcaggcctttcttttgtgttcagctgagggtgagcatggctcaagaaatctcgcagtggtgatgaagaaaagggtgaaatacagaggacctcgcaacacaacaacatcctctgcagcctcaactattatgttcccaggctccttccatattggtgctgcttcctctttactccttgctcttcttttataagctcccttgtagtgatcattattgtactgtttgacaatgattcatgtaatttgcttttctcgattgattttgtagaaatttctcaaatggtctaaaattctgtttgtaaattatttgctctgtttcaaaagtatatggtcacttgtcccac

SEQ ID NO: 72020 - protein, 91 aa, Arabidopsis thaliana; identical to SEQ ID NO: 27915
  peptide (1)..(91): Ceres Seq. ID no. 4909823
  misc_feature (8)..(91): Homolog of NCBI NO: 18417123 NR Description: Expressed protein; protein id: At4g28085.1, by cDNA: gi_15028040, supported by cDNA: gi_21281256 [Arabidopsis >gi|15028041|gb|AAK76551.1| unknown protein [Arabidopsis

SEQ ID NO: 72021 - protein, 84 aa, Arabidopsis thaliana; identical to SEQ ID NO: 27916
  peptide (1)..(84): Ceres Seq. ID no. 4909824
  misc_feature (1)..(84): Homolog of NCBI NO: 18417123 NR Description: Expressed protein; protein id: At4g28085.1, by cDNA: gi_15028040, supported by cDNA: gi_21281256 [Arabidopsis >gi|15028041|gb|AAK76551.1| unknown protein [Arabidopsis

SEQ ID NO: 72022 - protein, 81 aa, Arabidopsis thaliana; identical to SEQ ID NO: 27917
  peptide (1)..(81): Ceres Seq. ID no. 4909825
  misc_feature (1)..(81): Homolog of NCBI NO: 18417123 NR Description: Expressed protein; protein id: At4g28085.1, by cDNA: gi_15028040, supported by cDNA: gi_21281256 [Arabidopsis >gi|15028041|gb|AAK76551.1| unknown protein [Arabidopsis

SEQ ID NO: 72023 - DNA, 1247 bp, Arabidopsis thaliana
  misc_feature (1)..(1247): Ceres Seq. ID no. 4909884
  misc_feature: MA Experiment ID: 108461 Result: Up-regulated in Transcription
  misc_feature: MA Experiment 108461 PARAMETER Experiment Name: At_Germinating_Seeds_cDNA_P Parameter: Age (day) Value: 1 vs. 0
  misc_feature: MA Experiment 108461 PARAMETER Experiment Name: At_Germinating_Seeds_cDNA_P Parameter: Tissue Value: Germinating Seeds
  misc_feature: MA Experiment ID: 108462 Result: Up-regulated in Transcription
  misc_feature: MA Experiment 108462 PARAMETER Experiment Name: At_Germinating_Seeds_cDNA_P Parameter: Age (day) Value: 2 vs. 0
  misc_feature: MA Experiment 108462 PARAMETER Experiment Name: At_Germinating_Seeds_cDNA_P Parameter: Tissue Value: Germinating Seeds
  misc_feature: MA Experiment ID: 108464 Result: Up-regulated in Transcription
  misc_feature: MA Experiment 108464 PARAMETER Experiment Name: At_Germinating_Seeds_cDNA_P Parameter: Age (day) Value: 4 vs. 0
  misc_feature: MA Experiment 108464 PARAMETER Experiment Name: At_Germinating_Seeds_cDNA_P Parameter: Tissue Value: Germinating Seeds
ttgaaactcttgactggttctaaacacagctcattatatgtctatttagtattttacacattggtttcagacggctcttaaaggtctctctagcttcatgtcaaccatctaaaccaaccaccattaatgttcctctgcccattttcaagaaattagaaatcatttttctctaagttcttgatcgtcgccatgaacgatcttatctcaagctcattcaagagatacacagacttaaaccaccaggtccaactcgatgacatcgagtctcaaaatgtttctcttgattcaggcaacctcgatgagttctttggatatgtcgagagtgttaaagaagacatgaaagctgtcgacgagattcataagcgtctccaagatgctaatgaagagtccaagaccgtacatgattccaaggccgtgaagaagcttcgtgctcgtatggattcgagtgttacagaggtcttgaaacgtgtcaagatgataaagactaagcttgtagctttggagaaatcaaatgctgcgcagaggaaagtcgctggttgtggtcctggctcgtctgctgatcggaccagaacatcggtcgttagtggattggggaagaagcttaaagacatgatggatgattttcagagactacgaaccaaaatggctactgaatacaaagaaacggtcgagagaaggtacttcactgtaacggggcaaaaagcggacgaagagacggtcgagaagctcatatcgagcggagagagcgaacgttttctccaaaaagcaatacaagagcaaggtcgcggacaggtcatggacacattatcagagattcaagaacgacacgacacggtcaaggagatagaacggagtctgttagagctgcaccaagtgttcctcgacatggctgctcttgtcgaagctcaagggaatatgctcaatgacattgaatcaaatgtctcaaaggcgagctctttcgtcatgagagggactgatcaattgcatggggctaaagtacttcagaggaacaacaggaaatgggcttgtatcgccactatcctcgctattgtagttgttattgtgattcttttcccaatcctctttaacactctacttcgaccttgatttcaaaatgtaacttattgttttctccaaactccttttgttagagccctttcgatttcttgtattgaatccagagctgaagcgagagtttaatttgaagctctctctaaccattcttgctactgtaattgctttatatc

SEQ ID NO: 72024 - protein, 305 aa, Arabidopsis thaliana; identical to SEQ ID NO: 24124
  peptide (1)..(305): Ceres Seq. ID no. 4909885
  misc_feature (211)..(273): Pfam Name: SNARE domain Pfam Description: SNARE domain
  misc_feature (1)..(305): Homolog of NCBI NO: 15236285 NR Description: syntaxin SYP123; protein id: At4g03330.1, by cDNA: 37727. [Arabidopsis thaliana]
  misc_feature (1)..(303): Homolog of NCBI NO: 15219900 NR Description: syntaxin SYP124; protein id: At1g61290.1 thaliana] >gi|28380117|sp|O64791|S124_ARATH Putative syntaxin 124
  misc_feature (1)..(303): Homolog of NCBI NO: 15220328 NR Description: syntaxin SYP125; protein id: At1g11250.1 thaliana] >gi|28380142|sp|Q9SXB0|S125_ARATH Putative syntaxin 125
  misc_feature (1)..(298): Homolog of NCBI NO: 15229865 NR Description: syntaxin SYP121; protein id: At3g11820.1, by cDNA: 38899., supported by cDNA: gi_20260503, supported by gi_4206788 [Arabidopsis thaliana]
  misc_feature (1)..(297): Homolog of NCBI NO: 4206787 NR Description: syntaxin-related protein Nt-syr1 [Nicotiana
  misc_feature (1)..(297): Homolog of NCBI NO: 11358871 NR Description: syntaxin synt4 [imported] - Arabidopsis thaliana
  misc_feature (1)..(297): Homolog of NCBI NO: 15231205 NR Description: syntaxin SYP122; protein id: At3g52400.1, by cDNA: 37248., supported by cDNA: gi_15292946, supported by gi_20259662 [Arabidopsis thaliana]
  misc_feature (1)..(297): Homolog of NCBI NO: 28974542 NR Description: knolle [Antirrhinum majus]
  misc_feature (1)..(297): Homolog of NCBI NO: 5912543 NR Description: Knolle [Capsicum annuum]
  misc_feature (1)..(297): Homolog of NCBI NO: 29788865 NR Description: putative cytokinesis-specific syntaxin-related

SEQ ID NO: 72025 - protein, 256 aa, Arabidopsis thaliana; identical to SEQ ID NO: 24125
  peptide (1)..(256): Ceres Seq. ID no. 4909886
  misc_feature (162)..(224): Pfam Name: SNARE domain Pfam Description: SNARE domain
  misc_feature (1)..(256): Homolog of NCBI NO: 15236285 NR Description: syntaxin SYP123; protein id: At4g03330.1, by cDNA: 37727. [Arabidopsis thaliana]
  misc_feature (1)..(254): Homolog of NCBI NO: 15219900 NR Description: syntaxin SYP124; protein id: At1g61290.1 thaliana] >gi|28380117|sp|O64791|S124_ARATH Putative syntaxin 124
  misc_feature (1)..(254): Homolog of NCBI NO: 15220328 NR Description: syntaxin SYP125; protein id: At1g11250.1 thaliana] >gi|28380142|sp|Q9SXB0|S125_ARATH Putative syntaxin 125
  misc_feature (1)..(249): Homolog of NCBI NO: 15229865 NR Description: syntaxin SYP121; protein id: At3g11820.1, by cDNA: 38899., supported by cDNA: gi_20260503, supported by gi_4206788 [Arabidopsis thaliana]
  misc_feature (1)..(248): Homolog of NCBI NO: 4206787 NR Description: syntaxin-related protein Nt-syr1 [Nicotiana
  misc_feature (1)..(248): Homolog of NCBI NO: 11358871 NR Description: syntaxin synt4 [imported] - Arabidopsis thaliana
  misc_feature (1)..(248): Homolog of NCBI NO: 15231205 NR Description: syntaxin SYP122; protein id: At3g52400.1, by cDNA: 37248., supported by cDNA: gi_15292946, supported by gi_20259662 [Arabidopsis thaliana]
  misc_feature (1)..(248): Homolog of NCBI NO: 28974542 NR Description: knolle [Antirrhinum majus]
  misc_feature (1)..(248): Homolog of NCBI NO: 5912543 NR Description: Knolle [Capsicum annuum]
  misc_feature (1)..(248): Homolog of NCBI NO: 29788865 NR Description: putative cytokinesis-specific syntaxin-related

SEQ ID NO: 72026 - protein, 223 aa, Arabidopsis thaliana; identical to SEQ ID NO: 24126
  peptide (1)..(223): Ceres Seq. ID no. 4909887
  misc_feature (129)..(191): Pfam Name: SNARE domain Pfam Description: SNARE domain
  misc_feature (1)..(223): Homolog of NCBI NO: 15236285 NR Description: syntaxin SYP123; protein id: At4g03330.1, by cDNA: 37727. [Arabidopsis thaliana]
  misc_feature (1)..(221): Homolog of NCBI NO: 15219900 NR Description: syntaxin SYP124; protein id: At1g61290.1 thaliana] >gi|28380117|sp|O64791|S124_ARATH Putative syntaxin 124
  misc_feature (1)..(221): Homolog of NCBI NO: 15220328 NR Description: syntaxin SYP125; protein id: At1g11250.1 thaliana] >gi|28380142|sp|Q9SXB0|S125_ARATH Putative syntaxin 125
  misc_feature (1)..(216): Homolog of NCBI NO: 15229865 NR Description: syntaxin SYP121; protein id: At3g11820.1, by cDNA: 38899., supported by cDNA: gi_20260503, supported by gi_4206788 [Arabidopsis thaliana]
  misc_feature (1)..(215): Homolog of NCBI NO: 4206787 NR Description: syntaxin-related protein Nt-syr1 [Nicotiana
  misc_feature (1)..(215): Homolog of NCBI NO: 11358871 NR Description: syntaxin synt4 [imported] - Arabidopsis thaliana
  misc_feature (1)..(215): Homolog of NCBI NO: 15231205 NR Description: syntaxin SYP122; protein id: At3g52400.1, by cDNA: 37248., supported by cDNA: gi_15292946, supported by gi_20259662 [Arabidopsis thaliana]
  misc_feature (1)..(215): Homolog of NCBI NO: 28974542 NR Description: knolle [Antirrhinum majus]
  misc_feature (1)..(215): Homolog of NCBI NO: 5912543 NR Description: Knolle [Capsicum annuum]
  misc_feature (1)..(215): Homolog of NCBI NO: 29788865 NR Description: putative cytokinesis-specific syntaxin-related

SEQ ID NO: 72027 - DNA, 1304 bp, Arabidopsis thaliana
  misc_feature (1)..(1304): Ceres Seq. ID no. 4909966
  misc_feature: MA Experiment ID: 108594 Result: Down-regulated in Transcription
  misc_feature: MA Experiment 108594 PARAMETER Experiment Name: At_Ler-rhl_Root_cDNA_P Parameter: Plant Line Value: null
  misc_feature: MA Experiment ID: 108595 Result: Up-regulated in Transcription
  misc_feature: MA Experiment 108595 PARAMETER Experiment Name: At_Ler-pi_Ovule_cDNA_P Parameter: Plant Line Value: null
  misc_feature: MA Experiment ID: 20000184 Result: Down-regulated in Transcription
  misc_feature: MA Experiment 20000184 PARAMETER Experiment Name: At_Shoots__P Parameter: Age (day) Value: 7
  misc_feature: MA Experiment 20000184 PARAMETER Experiment Name: At_Shoots__P Parameter: Tissue Value: Shoots vs. Whole Plant
  misc_feature: MA Experiment ID: 20000185 Result: Down-regulated in Transcription
  misc_feature: MA Experiment 20000185 PARAMETER Experiment Name: At_Roots__P Parameter: Age (day) Value: 7 vs. 21
  misc_feature: MA Experiment 20000185 PARAMETER Experiment Name: At_Roots__P Parameter: Organism Value: A. thaliana
  misc_feature: MA Experiment 20000185 PARAMETER Experiment Name: At_Roots__P Parameter: Tissue Value: Roots vs. Whole Plant
  misc_feature: MA Experiment ID: 20000234 Result: Down-regulated in Transcription
  misc_feature: MA Experiment 20000234 PARAMETER Experiment Name: At_Siliques_P Parameter: Age (day) Value: 21
  misc_feature: MA Experiment 20000234 PARAMETER Experiment Name: At_Siliques_P Parameter: Organism Value: A. thaliana
  misc_feature: MA Experiment 20000234 PARAMETER Experiment Name: At_Siliques_P Parameter: Plant Line Value: WS
  misc_feature: MA Experiment 20000234 PARAMETER Experiment Name: At_Siliques_P Parameter: Tissue Value: Less Than 5mm Siliques vs. Whole Plant
  misc_feature: MA Experiment ID: 20000264 Result: Down-regulated in Transcription
  misc_feature: MA Experiment 20000264 PARAMETER Experiment Name: At_Open_Flower_P Parameter: Age (day) Value: 21
  misc_feature: MA Experiment 20000264 PARAMETER Experiment Name: At_Open_Flower_P Parameter: Plant Line Value: WS
  misc_feature: MA Experiment 20000264 PARAMETER Experiment Name: At_Open_Flower_P Parameter: Tissue Value: Open Flower vs. Whole Plant
  misc_feature: MA Experiment ID: 20000265 Result: Down-regulated in Transcription
  misc_feature: MA Experiment 20000265 PARAMETER Experiment Name: At_Open_Flower_P Parameter: Age (day) Value: 21
  misc_feature: MA Experiment 20000265 PARAMETER Experiment Name: At_Open_Flower_P Parameter: Plant Line Value: WS
  misc_feature: MA Experiment 20000265 PARAMETER Experiment Name: At_Open_Flower_P Parameter: Tissue Value: Closed Flower vs. Whole Plant
  misc_feature: MA Experiment ID: 20000286 Result: Down-regulated in Transcription
  misc_feature: MA Experiment 20000286 PARAMETER Experiment Name: At_Open_Flower_P Parameter: Age (day) Value: 21
  misc_feature: MA Experiment 20000286 PARAMETER Experiment Name: At_Open_Flower_P Parameter: Plant Line Value: WS
  misc_feature: MA Experiment 20000286 PARAMETER Experiment Name: At_Open_Flower_P Parameter: Tissue Value: Half Open vs. Whole Plant
  misc_feature: MA Experiment ID: 20000436 Result: Up-regulated in Transcription
  misc_feature: MA Experiment 20000436 PARAMETER Experiment Name: At_Drought_P Parameter: Age (day) Value: 7
  misc_feature: MA Experiment 20000436 PARAMETER Experiment Name: At_Drought_P Parameter: Organism Value: A. thaliana
  misc_feature: MA Experiment 20000436 PARAMETER Experiment Name: At_Drought_P Parameter: Plant Line Value: WS
  misc_feature: MA Experiment 20000436 PARAMETER Experiment Name: At_Drought_P Parameter: Timepoint (hr) Value: 12
  misc_feature: MA Experiment 20000436 PARAMETER Experiment Name: At_Drought_P Parameter: Tissue Value: Whole Plant
  misc_feature: MA Experiment 20000436 PARAMETER Experiment Name: At_Drought_P Parameter: Treatment Value: Drought vs. No Drought
  misc_feature: MA Experiment ID: 20000438 Result: Down-regulated in Transcription
  misc_feature: MA Experiment 20000438 PARAMETER Experiment Name: At_Shoots__P Parameter: Age (day) Value: 14
  misc_feature: MA Experiment 20000438 PARAMETER Experiment Name: At_Shoots__P Parameter: Tissue Value: Shoots vs. Whole Plant
  misc_feature: MA Experiment ID: 20000439 Result: Down-regulated in Transcription
  misc_feature: MA Experiment 20000439 PARAMETER Experiment Name: At_Roots__P Parameter: Age (day) Value: 14 vs. 21
  misc_feature: MA Experiment 20000439 PARAMETER Experiment Name: At_Roots__P Parameter: Organism Value: A. thaliana
  misc_feature: MA Experiment 20000439 PARAMETER Experiment Name: At_Roots__P Parameter: Tissue Value: Roots vs. Whole Plant
  misc_feature: MA Experiment ID: 20001556 Result: Down-regulated in Transcription
  misc_feature: MA Experiment 20001556 PARAMETER Experiment Name: At_Drought_Soil_Dry_P Parameter: Age (day) Value: 26
  misc_feature: MA Experiment 20001556 PARAMETER Experiment Name: At_Drought_Soil_Dry_P Parameter: Organism Value: A. thaliana
  misc_feature: MA Experiment 20001556 PARAMETER Experiment Name: At_Drought_Soil_Dry_P Parameter: Plant Line Value: WS
  misc_feature: MA Experiment 20001556 PARAMETER Experiment Name: At_Drought_Soil_Dry_P Parameter: Post Timepoint (hr) Value: None
  misc_feature: MA Experiment 20001556 PARAMETER Experiment Name: At_Drought_Soil_Dry_P Parameter: Post-Treatment Value: None
  misc_feature: MA Experiment 20001556 PARAMETER Experiment Name: At_Drought_Soil_Dry_P Parameter: Timepoint (day) Value: 12
  misc_feature: MA Experiment 20001556 PARAMETER Experiment Name: At_Drought_Soil_Dry_P Parameter: Treatment Value: Drought vs. No Drought
  misc_feature: MA Experiment ID: 20001557 Result: Down-regulated in Transcription
  misc_feature: MA Experiment 20001557 PARAMETER Experiment Name: At_Drought_Soil_Dry_P Parameter: Age (day) Value: 27
  misc_feature: MA Experiment 20001557 PARAMETER Experiment Name: At_Drought_Soil_Dry_P Parameter: Organism Value: A. thaliana
  misc_feature: MA Experiment 20001557 PARAMETER Experiment Name: At_Drought_Soil_Dry_P Parameter: Plant Line Value: WS
  misc_feature: MA Experiment 20001557 PARAMETER Experiment Name: At_Drought_Soil_Dry_P Parameter: Post Timepoint (hr) Value: 3
  misc_feature: MA Experiment 20001557 PARAMETER Experiment Name: At_Drought_Soil_Dry_P Parameter: Post-Treatment Value: Re-Water vs. No Drought
  misc_feature: MA Experiment 20001557 PARAMETER Experiment Name: At_Drought_Soil_Dry_P Parameter: Timepoint (day) Value: 13
  misc_feature: MA Experiment 20001557 PARAMETER Experiment Name: At_Drought_Soil_Dry_P Parameter: Treatment Value: Drought vs. No Drought
  misc_feature: MA Experiment ID: 20001558 Result: Down-regulated in Transcription
  misc_feature: MA Experiment 20001558 PARAMETER Experiment Name: At_Drought_Soil_Dry_P Parameter: Age (day) Value: 27
  misc_feature: MA Experiment 20001558 PARAMETER Experiment Name: At_Drought_Soil_Dry_P Parameter: Organism Value: A. thaliana
  misc_feature: MA Experiment 20001558 PARAMETER Experiment Name: At_Drought_Soil_Dry_P Parameter: Plant Line Value: WS
  misc_feature: MA Experiment 20001558 PARAMETER Experiment Name: At_Drought_Soil_Dry_P Parameter: Post Timepoint (hr) Value: 6
  misc_feature: MA Experiment 20001558 PARAMETER Experiment Name: At_Drought_Soil_Dry_P Parameter: Post-Treatment Value: Re-Water vs. No Drought
  misc_feature: MA Experiment 20001558 PARAMETER Experiment Name: At_Drought_Soil_Dry_P Parameter: Timepoint (day) Value: 13
  misc_feature: MA Experiment 20001558 PARAMETER Experiment Name: At_Drought_Soil_Dry_P Parameter: Treatment Value: Drought vs. No Drought
  misc_feature: MA Experiment ID: 20001560 Result: Down-regulated in Transcription
  misc_feature: MA Experiment 20001560 PARAMETER Experiment Name: At_Drought_Soil_Dry_P Parameter: Age (day) Value: 28
  misc_feature: MA Experiment 20001560 PARAMETER Experiment Name: At_Drought_Soil_Dry_P Parameter: Organism Value: A. thaliana
  misc_feature: MA Experiment 20001560 PARAMETER Experiment Name: At_Drought_Soil_Dry_P Parameter: Plant Line Value: WS
  misc_feature: MA Experiment 20001560 PARAMETER Experiment Name: At_Drought_Soil_Dry_P Parameter: Post Timepoint (hr) Value: None
  misc_feature: MA Experiment 20001560 PARAMETER Experiment Name: At_Drought_Soil_Dry_P Parameter: Post-Treatment Value: None
  misc_feature: MA Experiment 20001560 PARAMETER Experiment Name: At_Drought_Soil_Dry_P Parameter: Timepoint (day) Value: 14
  misc_feature: MA Experiment 20001560 PARAMETER Experiment Name: At_Drought_Soil_Dry_P Parameter: Treatment Value: Drought vs. No Drought
  misc_feature: MA Experiment ID: 20001768 Result: Up-regulated in Transcription
  misc_feature: MA Experiment 20001768 PARAMETER Experiment Name: At_Far-red-enriched-adult_P Parameter: Age (day) Value: 28
  misc_feature: MA Experiment 20001768 PARAMETER Experiment Name: At_Far-red-enriched-adult_P Parameter: Light Value: Far-red enriched vs. White
  misc_feature: MA Experiment 20001768 PARAMETER Experiment Name: At_Far-red-enriched-adult_P Parameter: Organism Value: A. thaliana
  misc_feature: MA Experiment 20001768 PARAMETER Experiment Name: At_Far-red-enriched-adult_P Parameter: Plant Line Value: Columbia
  misc_feature: MA Experiment 20001768 PARAMETER Experiment Name: At_Far-red-enriched-adult_P Parameter: Timepoint (hr) Value: 1
  misc_feature: MA Experiment 20001768 PARAMETER Experiment Name: At_Far-red-enriched-adult_P Parameter: Tissue Value: Aerial
  misc_feature: MA Experiment ID: 20001773 Result: Up-regulated in Transcription
  misc_feature: MA Experiment 20001773 PARAMETER Experiment Name: At_Far-red-enriched-adult_P Parameter: Age (day) Value: 30
  misc_feature: MA Experiment 20001773 PARAMETER Experiment Name: At_Far-red-enriched-adult_P Parameter: Light Value: Far-red enriched vs. White
  misc_feature: MA Experiment 20001773 PARAMETER Experiment Name: At_Far-red-enriched-adult_P Parameter: Organism Value: A. thaliana
  misc_feature: MA Experiment 20001773 PARAMETER Experiment Name: At_Far-red-enriched-adult_P Parameter: Plant Line Value: Columbia
  misc_feature: MA Experiment 20001773 PARAMETER Experiment Name: At_Far-red-enriched-adult_P Parameter: Timepoint (hr) Value: 48
  misc_feature: MA Experiment 20001773 PARAMETER Experiment Name: At_Far-red-enriched-adult_P Parameter: Tissue Value: Aerial
atcttataaccatccttcaatctccttcttcctctaaaactcttctaaagaagaaaacagaggaacgagaagaagaagaagagtgaacaatgaagaacggatcagggaacacgaacacaaaactaatccttcttcatccttacatccaaaaacaaacgagcacgactcgtttatggcttctcgctttcgtctctttcttcaccatagtttttctcctcactcttctctacactagagacacaatcccttccaaaaacacctccgtcgccgcagccgtagctgcagtcgtcaccggaggatccacaccttcagcatcatctcccatctccaactccaacttaccaactagtgcaatcaacgctttgcttcactacgcgtcaagatccaacgatagtttccacatgtcttacggagagatgaaatcaatctctgacgtcctccgccgctgcgctccaccgtgtaatcttctcgttttcggactcacacacgagactctcctttggaagtcgttaaaccacaacggtagaacagtgttcatcgaggagaatcgttactacgcggcttacttcgaagaaatccacccggagatcgacgttttcgacgttcaatacacgacaaaagctcacgaagctggagagctcgtcaccgcggctaaagaagccgcgggaaacgagtgtcgtcctgtgcaaaatcttctcttctcagattgtaaattaggtctcaatgatttgcctaatcatgtctacgatgttgattgggatgtaatctttgtggacgggccacgtggcgatgctcacgaaggaccggggaggatgtcgtcgattttcacggcggcggttcttgctcggagcaaaaagggcgggactccgaagacgcatgtgtttgtgcatgactattatagagacgttgagaggctttgtggtgatgagttcttgtgccgagagaatcttgttgagtctaatgatttgcttgcacactacgtgttggataagatggataaaaacagcacaaagttttgcaatggtcgtaagaaacgttcggtttcgtctttgtcttaaaagtgatgccagaagacttcatacgtacatttgcttattgtaagaaataaagttttttccttgaagttttgctttttgtgctggtgtaaattttcgatcttggatttattgaagactttaatttaatctcttttttttttttttttttttctcaaaggccaaagcaatcaatttgatgaaacatctagggatatatataaccaaatgtaaactgaacttttgaaccaaaatcaatattttattcat

SEQ ID NO: 72028 - protein, 322 aa, Arabidopsis thaliana
  peptide (1)..(322): Ceres Seq. ID no. 4909967
  misc_feature (66)..(310): Pfam Name: Protein of unknown function (DUF579) Pfam Description: Protein of unknown function (DUF579)
  misc_feature (1)..(322): Homolog of NCBI NO: 15229700 NR Description: putative protein; protein id: At3g50220.1, by cDNA: 35440. [Arabidopsis thaliana] >gi|11282604|pir||T45568
  misc_feature (1)..(322): Homolog of NCBI NO: 21593034 NR Description: unknown [Arabidopsis thaliana]
  misc_feature (1)..(322): Homolog of NCBI NO: 15240242 NR Description: putative protein; protein id: At5g67210.1 thaliana] >gi|10177608|dbj|BAB10955.1| to unknown protein [Arabidopsis thaliana]
  misc_feature (7)..(319): Homolog of NCBI NO: 18397819 NR Description: expressed protein; protein id: At2g15440.1, by cDNA: 32729. [Arabidopsis thaliana] >gi|25354650|pir||A84529
  misc_feature (23)..(322): Homolog of NCBI NO: 32488916 NR Description: OSJNBb0059K02.7 [Oryza sativa (japonica
  misc_feature (23)..(322): Homolog of NCBI NO: 10241434 NR Description: putative protein [Oryza sativa (indica
  misc_feature (25)..(310): Homolog of NCBI NO: 18409879 NR Description: hypothetical protein; protein id: At1g71690.1
  misc_feature (25)..(310): Homolog of NCBI NO: 25354648 NR Description: hypothetical protein F14O23.3 [imported] - thaliana >gi|7239492|gb|AAF43218.1|AC012654_2 EST gb|AI999169
  misc_feature (82)..(310): Homolog of NCBI NO: 18398986 NR Description: expressed protein; protein id: At1g33800.1, by cDNA: 114466., supported by cDNA: gi_17979548, supported by gi_20453344 [Arabidopsis thaliana] >gi|25354651|pir||E86461
  misc_feature (82)..(310): Homolog of NCBI NO: 15217566 NR Description: unknown protein; protein id: At1g09610.1
MKNGSGNTNTKLILLHPYIQKQTSTTRLWLLAFVSFFTIVFLLTLLYTRDTIPSKNTSVAAAVAAVVTGGSTPSASSPISNSNLPTSAINALLHYASRSNDSFHMSYGEMKSISDVLRRCAPPCNLLVFGLTHETLLWKSLNHNGRTVFIEENRYYAAYFEEIHPEIDVFDVQYTTKAHEAGELVTAAKEAAGNECRPVQNLLFSDCKLGLNDLPNHVYDVDWDVIFVDGPRGDAHEGPGRMSSIFTAAVLARSKKGGTPKTHVFVHDYYRDVERLCGDEFLCRENLVESNDLLAHYVLDKMDKNSTKFCNGRKKRSVSSLS

SEQ ID NO: 72029 - protein, 218 aa, Arabidopsis thaliana
  peptide (1)..(218): Ceres Seq. ID no. 4909968
  misc_feature (1)..(206): Pfam Name: Protein of unknown function (DUF579) Pfam Description: Protein of unknown function (DUF579)
  misc_feature (1)..(218): Homolog of NCBI NO: 15229700 NR Description: putative protein; protein id: At3g50220.1, by cDNA: 35440. [Arabidopsis thaliana] >gi|11282604|pir||T45568
  misc_feature (1)..(218): Homolog of NCBI NO: 21593034 NR Description: unknown [Arabidopsis thaliana]
  misc_feature (1)..(218): Homolog of NCBI NO: 15240242 NR Description: putative protein; protein id: At5g67210.1 thaliana] >gi|10177608|dbj|BAB10955.1| to unknown protein [Arabidopsis thaliana]
  misc_feature (1)..(215): Homolog of NCBI NO: 18397819 NR Description: expressed protein; protein id: At2g15440.1, by cDNA: 32729. [Arabidopsis thaliana] >gi|25354650|pir||A84529
  misc_feature (1)..(218): Homolog of NCBI NO: 32488916 NR Description: OSJNBb0059K02.7 [Oryza sativa (japonica
  misc_feature (1)..(218): Homolog of NCBI NO: 10241434 NR Description: putative protein [Oryza sativa (indica
  misc_feature (1)..(206): Homolog of NCBI NO: 18409879 NR Description: hypothetical protein; protein id: At1g71690.1
  misc_feature (1)..(206): Homolog of NCBI NO: 25354648 NR Description: hypothetical protein F14O23.3 [imported] - thaliana >gi|7239492|gb|AAF43218.1|AC012654_2 EST gb|AI999169
  misc_feature (1)..(206): Homolog of NCBI NO: 18398986 NR Description: expressed protein; protein id: At1g33800.1, by cDNA: 114466., supported by cDNA: gi_17979548, supported by gi_20453344 [Arabidopsis thaliana] >gi|25354651|pir||E86461
  misc_feature (1)..(206): Homolog of NCBI NO: 15217566 NR Description: unknown protein; protein id: At1g09610.1
MSYGEMKSISDVLRRCAPPCNLLVFGLTHETLLWKSLNHNGRTVFIEENRYYAAYFEEIHPEIDVFDVQYTTKAHEAGELVTAAKEAAGNECRPVQNLLFSDCKLGLNDLPNHVYDVDWDVIFVDGPRGDAHEGPGRMSSIFTAAVLARSKKGGTPKTHVFVHDYYRDVERLCGDEFLCRENLVESNDLLAHYVLDKMDKNSTKFCNGRKKRSVSSLS

SEQ ID NO: 72030 - protein, 213 aa, Arabidopsis thaliana
  peptide (1)..(213): Ceres Seq. ID no. 4909969
  misc_feature (1)..(201): Pfam Name: Protein of unknown function (DUF579) Pfam Description: Protein of unknown function (DUF579)
  misc_feature (1)..(213): Homolog of NCBI NO: 15229700 NR Description: putative protein; protein id: At3g50220.1, by cDNA: 35440. [Arabidopsis thaliana] >gi|11282604|pir||T45568
  misc_feature (1)..(213): Homolog of NCBI NO: 21593034 NR Description: unknown [Arabidopsis thaliana]
  misc_feature (1)..(213): Homolog of NCBI NO: 15240242 NR Description: putative protein; protein id: At5g67210.1 thaliana] >gi|10177608|dbj|BAB10955.1| to unknown protein [Arabidopsis thaliana]
  misc_feature (1)..(210): Homolog of NCBI NO: 18397819 NR Description: expressed protein; protein id: At2g15440.1, by cDNA: 32729. [Arabidopsis thaliana] >gi|25354650|pir||A84529
  misc_feature (1)..(213): Homolog of NCBI NO: 32488916 NR Description: OSJNBb0059K02.7 [Oryza sativa (japonica
  misc_feature (1)..(213): Homolog of NCBI NO: 10241434 NR Description: putative protein [Oryza sativa (indica
  misc_feature (1)..(201): Homolog of NCBI NO: 18409879 NR Description: hypothetical protein; protein id: At1g71690.1
  misc_feature (1)..(201): Homolog of NCBI NO: 25354648 NR Description: hypothetical protein F14O23.3 [imported] - thaliana >gi|7239492|gb|AAF43218.1|AC012654_2 EST gb|AI999169
  misc_feature (1)..(201): Homolog of NCBI NO: 18398986 NR Description: expressed protein; protein id: At1g33800.1, by cDNA: 114466., supported by cDNA: gi_17979548, supported by gi_20453344 [Arabidopsis thaliana] >gi|25354651|pir||E86461
  misc_feature (1)..(201): Homolog of NCBI NO: 15217566 NR Description: unknown protein; protein id: At1g09610.1
MKSISDVLRRCAPPCNLLVFGLTHETLLWKSLNHNGRTVFIEENRYYAAYFEEIHPEIDVFDVQYTTKAHEAGELVTAAKEAAGNECRPVQNLLFSDCKLGLNDLPNHVYDVDWDVIFVDGPRGDAHEGPGRMSSIFTAAVLARSKKGGTPKTHVFVHDYYRDVERLCGDEFLCRENLVESNDLLAHYVLDKMDKNSTKFCNGRKKRSVSSLS

SEQ ID NO: 72031 - DNA, 1209 bp, Arabidopsis thaliana
  misc_feature (1)..(1209): Ceres Seq. ID no. 4910017
  misc_feature: MA Experiment ID: 108573 Result: Up-regulated in Transcription
  misc_feature: MA Experiment 108573 PARAMETER Experiment Name: At_Drought_cDNA_P Parameter: Timepoint (hr) Value: 6
  misc_feature: MA Experiment 108573 PARAMETER Experiment Name: At_Drought_cDNA_P Parameter: Tissue Value: Aerial
  misc_feature: MA Experiment 108573 PARAMETER Experiment Name: At_Drought_cDNA_P Parameter: Treatment Value: Drought vs. No Drought
  misc_feature: MA Experiment ID: 20000111 Result: Down-regulated in Transcription
  misc_feature: MA Experiment 20000111 PARAMETER Experiment Name: At_42deg_Heat_cDNA_P Parameter: Temperature (deg C) Value: 42 vs. 22
  misc_feature: MA Experiment 20000111 PARAMETER Experiment Name: At_42deg_Heat_cDNA_P Parameter: Timepoint (hr) Value: 6
  misc_feature: MA Experiment 20000111 PARAMETER Experiment Name: At_42deg_Heat_cDNA_P Parameter: Tissue Value: Aerial
  misc_feature: MA Experiment ID: 20000113 Result: Down-regulated in Transcription
  misc_feature: MA Experiment 20000113 PARAMETER Experiment Name: At_42deg_Heat_cDNA_P Parameter: Temperature (deg C) Value: 42 vs. 22
  misc_feature: MA Experiment 20000113 PARAMETER Experiment Name: At_42deg_Heat_cDNA_P Parameter: Timepoint (hr) Value: 8
  misc_feature: MA Experiment 20000113 PARAMETER Experiment Name: At_42deg_Heat_cDNA_P Parameter: Tissue Value: Aerial
  misc_feature: MA Experiment ID: 20000185 Result: Down-regulated in Transcription
  misc_feature: MA Experiment 20000185 PARAMETER Experiment Name: At_Roots__P Parameter: Age (day) Value: 7 vs. 21
  misc_feature: MA Experiment 20000185 PARAMETER Experiment Name: At_Roots__P Parameter: Organism Value: A. thaliana
  misc_feature: MA Experiment 20000185 PARAMETER Experiment Name: At_Roots__P Parameter: Tissue Value: Roots vs. Whole Plant
  misc_feature: MA Experiment ID: 20000439 Result: Down-regulated in Transcription
  misc_feature: MA Experiment 20000439 PARAMETER Experiment Name: At_Roots__P Parameter: Age (day) Value: 14 vs. 21
  misc_feature: MA Experiment 20000439 PARAMETER Experiment Name: At_Roots__P Parameter: Organism Value: A. thaliana
  misc_feature: MA Experiment 20000439 PARAMETER Experiment Name: At_Roots__P Parameter: Tissue Value: Roots vs. Whole Plant
  misc_feature: MA Experiment ID: 20001558 Result: Down-regulated in Transcription
  misc_feature: MA Experiment 20001558 PARAMETER Experiment Name: At_Drought_Soil_Dry_P Parameter: Age (day) Value: 27
  misc_feature: MA Experiment 20001558 PARAMETER Experiment Name: At_Drought_Soil_Dry_P Parameter: Organism Value: A. thaliana
  misc_feature: MA Experiment 20001558 PARAMETER Experiment Name: At_Drought_Soil_Dry_P Parameter: Plant Line Value: WS
  misc_feature: MA Experiment 20001558 PARAMETER Experiment Name: At_Drought_Soil_Dry_P Parameter: Post Timepoint (hr) Value: 6
  misc_feature: MA Experiment 20001558 PARAMETER Experiment Name: At_Drought_Soil_Dry_P Parameter: Post-Treatment Value: Re-Water vs. No Drought
  misc_feature: MA Experiment 20001558 PARAMETER Experiment Name: At_Drought_Soil_Dry_P Parameter: Timepoint (day) Value: 13
  misc_feature: MA Experiment 20001558 PARAMETER Experiment Name: At_Drought_Soil_Dry_P Parameter: Treatment Value: Drought vs. No Drought
  misc_feature: Pfam Name: TauD Pfam Description: Taurine catabolism dioxygenase TauD, TfdA family
agaaaaaaaatggcggaactgttgttggtggaaactccaatcccacagcaaaagcactacgaatccaaaccattcccggcggtgatatcaccaccgtctgcttcgattccaattcctgctctgtctctcccactattcactcaaactatcaaaactcagaaacactatctcgattctctcttgcacgaatccggagcagtgctattcagaggttttccggtgaattccgccgatgatttcaacgacgtcgttgaagctttcggtttcgatgagcttccttacgtcggaggcgctgctcctcgcactagcgtcgtcggtcgtgtcttcactgctaatgaatctcctcctgatcagaagattccttttcaccacgagatggctcaggtattgatcaaaatcagatttgggtttatgtgaatttgattttttacatctaaagttttgagctttattgaatttgattgatggtgtttgttaggttcgtgagtttccatcaaagttgttcttttactgtgagattgagcctaagtgtggtggagagactccaattgtgttgagtcatgttgtgtatgagagaatgaaagataaacatccagagtttgttcagagattagaggaacatggtttgctttatgttagggttttaggtgaagatgatgatccttcatctcccattggacgtggttggaaatctacattcttaacccatgacaagaaccttgctgagcaaagggcggttgatttgggaatgaaactggaatggacagaggatggtggagccaagacggtaatgggtccgattccggctatcaaatatgacgagtcgagaaaccgtaaagtatggtttaacagcatggtagctgcttatacgggatgggaggataagcggaatgatccaagaaaggctgtgacttttggggatggaaagcctttacctgcggatatagtccatgattgtcttaggattcttgaagaggaatgtgttgctgttccgtggcagagaggagatgttttgcttatagataactgggcggttcttcattctcgaagaccgtttgatcctcctcgtcgagttcttgcatcactctgcaaatagattatgttgtctttcatgcataaatcaaagctttggatttcgaatttagaggcaacaacaacactgtacatattttggatacatatatgtgggtacatagtaacccatttcct

SEQ ID NO: 72032 - protein, 172 aa, Arabidopsis thaliana; identical to SEQ ID NO: 43625
  peptide (1)..(172): Ceres Seq. ID no. 4910018
  misc_feature: Pfam Name: TauD Pfam Description: Taurine catabolism dioxygenase TauD, TfdA family
  misc_feature (1)..(172): Homolog of NCBI NO: 15232542 NR Description: unknown protein; protein id: At3g21360.1
  misc_feature (1)..(172): Homolog of NCBI NO: 22985582 NR Description: hypothetical protein [Burkholderia fungorum]
  misc_feature (1)..(172): Homolog of NCBI NO: 23128425 NR Description: hypothetical protein [Nostoc punctiforme]
  misc_feature (1)..(172): Homolog of NCBI NO: 23468981 NR Description: hypothetical protein [Pseudomonas syringae pv.
  misc_feature (1)..(172): Homolog of NCBI NO: 26990914 NR Description: syrP protein, putative [Pseudomonas putida >gi|24985933|gb|AAN69803.1|AE016619_1 syrP protein, putative
  misc_feature (1)..(172): Homolog of NCBI NO: 23106239 NR Description: hypothetical protein [Azotobacter vinelandii]
  misc_feature (1)..(172): Homolog of NCBI NO: 9937235 NR Description: SyrP-like protein [Streptomyces verticillus]
  misc_feature (1)..(170): Homolog of NCBI NO: 29830181 NR Description: putative SyrP-like protein [Streptomyces
  misc_feature (1)..(172): Homolog of NCBI NO: 28869349 NR Description: pyoverdine biosynthesis regulatory gene, putative syringae pv. tomato str. DC3000] >gi|28852590|gb|AAO55663.1| biosynthesis regulatory gene, putative [Pseudomonas syringae pv.
  misc_feature (1)..(172): Homolog of NCBI NO: 23128402 NR Description: hypothetical protein [Nostoc punctiforme]

SEQ ID NO: 72033 - protein, 138 aa, Arabidopsis thaliana
  peptide (1)..(138): Ceres Seq. ID no. 4910019
  misc_feature: Pfam Name: TauD Pfam Description: Taurine catabolism dioxygenase TauD, TfdA family
  misc_feature (4)..(129): Homolog of NCBI NO: 15232542 NR Description: unknown protein; protein id: At3g21360.1
  misc_feature (7)..(127): Homolog of NCBI NO: 22985582 NR Description: hypothetical protein [Burkholderia fungorum]
  misc_feature (51)..(127): Homolog of NCBI NO: 23128425 NR Description: hypothetical protein [Nostoc punctiforme]
  misc_feature (31)..(130): Homolog of NCBI NO: 23468981 NR Description: hypothetical protein [Pseudomonas syringae pv.
  misc_feature (37)..(130): Homolog of NCBI NO: 26990914 NR Description: syrP protein, putative [Pseudomonas putida >gi|24985933|gb|AAN69803.1|AE016619_1 syrP protein, putative
  misc_feature (31)..(135): Homolog of NCBI NO: 23106239 NR Description: hypothetical protein [Azotobacter vinelandii]
  misc_feature (56)..(125): Homolog of NCBI NO: 9937235 NR Description: SyrP-like protein [Streptomyces verticillus]
  misc_feature (60)..(127): Homolog of NCBI NO: 29830181 NR Description: putative SyrP-like protein [Streptomyces
  misc_feature (31)..(130): Homolog of NCBI NO: 28869349 NR Description: pyoverdine biosynthesis regulatory gene, putative syringae pv. tomato str. DC3000] >gi|28852590|gb|AAO55663.1| biosynthesis regulatory gene, putative [Pseudomonas syringae pv.
  misc_feature (54)..(125): Homolog of NCBI NO: 23128402 NR Description: hypothetical protein [Nostoc punctiforme]
RKKMAELLLVETPIPQQKHYESKPFPAVISPPSASIPIPALSLPLFTQTIKTQKHYLDSLLHESGAVLFRGFPVNSADDFNDVVEAFGFDELPYVGGAAPRTSVVGRVFTANESPPDQKIPFHHEMAQVLIKIRFGFM

SEQ ID NO: 72034 - protein, 135 aa, Arabidopsis thaliana
  peptide (1)..(135): Ceres Seq. ID no. 4910020
  misc_feature: Pfam Name: TauD Pfam Description: Taurine catabolism dioxygenase TauD, TfdA family
  misc_feature (1)..(126): Homolog of NCBI NO: 15232542 NR Description: unknown protein; protein id: At3g21360.1
  misc_feature (4)..(124): Homolog of NCBI NO: 22985582 NR Description: hypothetical protein [Burkholderia fungorum]
  misc_feature (48)..(124): Homolog of NCBI NO: 23128425 NR Description: hypothetical protein [Nostoc punctiforme]
  misc_feature (28)..(127): Homolog of NCBI NO: 23468981 NR Description: hypothetical protein [Pseudomonas syringae pv.
  misc_feature (34)..(127): Homolog of NCBI NO: 26990914 NR Description: syrP protein, putative [Pseudomonas putida >gi|24985933|gb|AAN69803.1|AE016619_1 syrP protein, putative
  misc_feature (28)..(132): Homolog of NCBI NO: 23106239 NR Description: hypothetical protein [Azotobacter vinelandii]
  misc_feature (53)..(122): Homolog of NCBI NO: 9937235 NR Description: SyrP-like protein [Streptomyces verticillus]
  misc_feature (57)..(124): Homolog of NCBI NO: 29830181 NR Description: putative SyrP-like protein [Streptomyces
  misc_feature (28)..(127): Homolog of NCBI NO: 28869349 NR Description: pyoverdine biosynthesis regulatory gene, putative syringae pv. tomato str. DC3000] >gi|28852590|gb|AAO55663.1| biosynthesis regulatory gene, putative [Pseudomonas syringae pv.
  misc_feature (51)..(122): Homolog of NCBI NO: 23128402 NR Description: hypothetical protein [Nostoc punctiforme]
MAELLLVETPIPQQKHYESKPFPAVISPPSASIPIPALSLPLFTQTIKTQKHYLDSLLHESGAVLFRGFPVNSADDFNDVVEAFGFDELPYVGGAAPRTSVVGRVFTANESPPDQKIPFHHEMAQVLIKIRFGFM

SEQ ID NO: 72035 - DNA, 1220 bp, Arabidopsis thaliana
  misc_feature (1)..(1220): Ceres Seq. ID no. 4910090
  misc_feature: MA Experiment ID: 108435 Result: Up-regulated in Transcription
  misc_feature: MA Experiment 108435 PARAMETER Experiment Name: At_stm_Mutants_cDNA_P Parameter: Plant Line Value: wt Landsburg vs stm
  misc_feature: MA Experiment 108435 PARAMETER Experiment Name: At_stm_Mutants_cDNA_P Parameter: Tissue Value: Shoot Apical Meristem Region
  misc_feature: MA Experiment ID: 108595 Result: Up-regulated in Transcription
  misc_feature: MA Experiment 108595 PARAMETER Experiment Name: At_Ler-pi_Ovule_cDNA_P Parameter: Plant Line Value: null
  misc_feature: MA Experiment ID: 20000117 Result: Up-regulated in Transcription
  misc_feature: MA Experiment 20000117 PARAMETER Experiment Name: At_100uM_ABA_Mutants_cDNA_P Parameter: Plant Line Value: Columbia
  misc_feature: MA Experiment 20000117 PARAMETER Experiment Name: At_100uM_ABA_Mutants_cDNA_P Parameter: Timepoint (hr) Value: 6
  misc_feature: MA Experiment 20000117 PARAMETER Experiment Name: At_100uM_ABA_Mutants_cDNA_P Parameter: Tissue Value: Aerial
  misc_feature: MA Experiment 20000117 PARAMETER Experiment Name: At_100uM_ABA_Mutants_cDNA_P Parameter: Treatment Value: 100uM ABA vs. No Treatment
  misc_feature: MA Experiment ID: 20000173 Result: Up-regulated in Transcription
  misc_feature: MA Experiment 20000173 PARAMETER Experiment Name: At_42deg_Heat_P Parameter: Age (day) Value: 14
  misc_feature: MA Experiment 20000173 PARAMETER Experiment Name: At_42deg_Heat_P Parameter: Organism Value: A. thaliana
  misc_feature: MA Experiment 20000173 PARAMETER Experiment Name: At_42deg_Heat_P Parameter: Plant Line Value: WS
  misc_feature: MA Experiment 20000173 PARAMETER Experiment Name: At_42deg_Heat_P Parameter: Temperature (deg C) Value: 42 vs. 22
  misc_feature: MA Experiment 20000173 PARAMETER Experiment Name: At_42deg_Heat_P Parameter: Timepoint (hr) Value: 6
  misc_feature: MA Experiment 20000173 PARAMETER Experiment Name: At_42deg_Heat_P Parameter: Tissue Value: Aerial
  misc_feature: MA Experiment ID: 20000184 Result: Down-regulated in Transcription
  misc_feature: MA Experiment 20000184 PARAMETER Experiment Name: At_Shoots__P Parameter: Age (day) Value: 7
  misc_feature: MA Experiment 20000184 PARAMETER Experiment Name: At_Shoots__P Parameter: Tissue Value: Shoots vs. Whole Plant
  misc_feature: MA Experiment ID: 20000234 Result: Up-regulated in Transcription
  misc_feature: MA Experiment 20000234 PARAMETER Experiment Name: At_Siliques_P Parameter: Age (day) Value: 21
  misc_feature: MA Experiment 20000234 PARAMETER Experiment Name: At_Siliques_P Parameter: Organism Value: A. thaliana
  misc_feature: MA Experiment 20000234 PARAMETER Experiment Name: At_Siliques_P Parameter: Plant Line Value: WS
  misc_feature: MA Experiment 20000234 PARAMETER Experiment Name: At_Siliques_P Parameter: Tissue Value: Less Than 5mm Siliques vs. Whole Plant
  misc_feature: MA Experiment ID: 20000264 Result: Up-regulated in Transcription
  misc_feature: MA Experiment 20000264 PARAMETER Experiment Name: At_Open_Flower_P Parameter: Age (day) Value: 21
  misc_feature: MA Experiment 20000264 PARAMETER Experiment Name: At_Open_Flower_P Parameter: Plant Line Value: WS
  misc_feature: MA Experiment 20000264 PARAMETER Experiment Name: At_Open_Flower_P Parameter: Tissue Value: Open Flower vs. Whole Plant
  misc_feature: MA Experiment ID: 20000265 Result: Up-regulated in Transcription
  misc_feature: MA Experiment 20000265 PARAMETER Experiment Name: At_Open_Flower_P Parameter: Age (day) Value: 21
  misc_feature: MA Experiment 20000265 PARAMETER Experiment Name: At_Open_Flower_P Parameter: Plant Line Value: WS
  misc_feature: MA Experiment 20000265 PARAMETER Experiment Name: At_Open_Flower_P Parameter: Tissue Value: Closed Flower vs. Whole Plant
  misc_feature: MA Experiment ID: 20000286 Result: Up-regulated in Transcription
  misc_feature: MA Experiment 20000286 PARAMETER Experiment Name: At_Open_Flower_P Parameter: Age (day) Value: 21
  misc_feature: MA Experiment 20000286 PARAMETER Experiment Name: At_Open_Flower_P Parameter: Plant Line Value: WS
  misc_feature: MA Experiment 20000286 PARAMETER Experiment Name: At_Open_Flower_P Parameter: Tissue Value: Half Open vs. Whole Plant
  misc_feature: MA Experiment ID: 20000438 Result: Down-regulated in Transcription
  misc_feature: MA Experiment 20000438 PARAMETER Experiment Name: At_Shoots__P Parameter: Age (day) Value: 14
  misc_feature: MA Experiment 20000438 PARAMETER Experiment Name: At_Shoots__P Parameter: Tissue Value: Shoots vs. Whole Plant
  misc_feature: MA Experiment ID: 20000453 Result: Up-regulated in Transcription
  misc_feature: MA Experiment 20000453 PARAMETER Experiment Name: At_100uM_ABA_P Parameter: Age (day) Value: 15
  misc_feature: MA Experiment 20000453 PARAMETER Experiment Name: At_100uM_ABA_P Parameter: Organism Value: A. thaliana
  misc_feature: MA Experiment 20000453 PARAMETER Experiment Name: At_100uM_ABA_P Parameter: Plant Line Value: WS
  misc_feature: MA Experiment 20000453 PARAMETER Experiment Name: At_100uM_ABA_P Parameter: Timepoint (hr) Value: 24
  misc_feature: MA Experiment 20000453 PARAMETER Experiment Name: At_100uM_ABA_P Parameter: Tissue Value: Aerial
  misc_feature: MA Experiment 20000453 PARAMETER Experiment Name: At_100uM_ABA_P Parameter: Treatment Value: 100uM ABA vs. No Treatment
  misc_feature: MA Experiment ID: 20000495 Result: Up-regulated in Transcription
  misc_feature: MA Experiment 20000495 PARAMETER Experiment Name: At_Guard_Cells_P Parameter: Harvest Date Value: 8/2/2002
  misc_feature: MA Experiment 20000495 PARAMETER Experiment Name: At_Guard_Cells_P Parameter: Organism Value: A. thaliana
  misc_feature: MA Experiment 20000495 PARAMETER Experiment Name: At_Guard_Cells_P Parameter: Tissue Value: Guard Cells vs. Leaves
  misc_feature: MA Experiment ID: 20000794 Result: Up-regulated in Transcription
  misc_feature: MA Experiment 20000794 PARAMETER Experiment Name: At_Petals_P Parameter: Age (day) Value: 23-25 days
  misc_feature: MA Experiment 20000794 PARAMETER Experiment Name: At_Petals_P Parameter: Plant Line Value: WS
  misc_feature: MA Experiment 20000794 PARAMETER Experiment Name: At_Petals_P Parameter: Tissue Value: Petals vs. Whole plant
  misc_feature: MA Experiment ID: 20001554 Result: Up-regulated in Transcription
  misc_feature: MA Experiment 20001554 PARAMETER Experiment Name: At_Drought_Soil_Dry_P Parameter: Age (day) Value: 21
  misc_feature: MA Experiment 20001554 PARAMETER Experiment Name: At_Drought_Soil_Dry_P Parameter: Organism Value: A. thaliana
  misc_feature: MA Experiment 20001554 PARAMETER Experiment Name: At_Drought_Soil_Dry_P Parameter: Plant Line Value: WS
  misc_feature: MA Experiment 20001554 PARAMETER Experiment Name: At_Drought_Soil_Dry_P Parameter: Post Timepoint (hr) Value: None
  misc_feature: MA Experiment 20001554 PARAMETER Experiment Name: At_Drought_Soil_Dry_P Parameter: Post-Treatment Value: None
  misc_feature: MA Experiment 20001554 PARAMETER Experiment Name: At_Drought_Soil_Dry_P Parameter: Timepoint (day) Value: 7
  misc_feature: MA Experiment 20001554 PARAMETER Experiment Name: At_Drought_Soil_Dry_P Parameter: Treatment Value: Drought vs. No Drought
  misc_feature: MA Experiment ID: 20001555 Result: Up-regulated in Transcription
  misc_feature: MA Experiment 20001555 PARAMETER Experiment Name: At_Drought_Soil_Dry_P Parameter: Age (day) Value: 24
  misc_feature: MA Experiment 20001555 PARAMETER Experiment Name: At_Drought_Soil_Dry_P Parameter: Organism Value: A. thaliana
  misc_feature: MA Experiment 20001555 PARAMETER Experiment Name: At_Drought_Soil_Dry_P Parameter: Plant Line Value: WS
  misc_feature: MA Experiment 20001555 PARAMETER Experiment Name: At_Drought_Soil_Dry_P Parameter: Post Timepoint (hr) Value: None
  misc_feature: MA Experiment 20001555 PARAMETER Experiment Name: At_Drought_Soil_Dry_P Parameter: Post-Treatment Value: None
  misc_feature: MA Experiment 20001555 PARAMETER Experiment Name: At_Drought_Soil_Dry_P Parameter: Timepoint (day) Value: 10
  misc_feature: MA Experiment 20001555 PARAMETER Experiment Name: At_Drought_Soil_Dry_P Parameter: Treatment Value: Drought vs. No Drought
  misc_feature: MA Experiment ID: 20001557 Result: Up-regulated in Transcription
  misc_feature: MA Experiment 20001557 PARAMETER Experiment Name: At_Drought_Soil_Dry_P Parameter: Age (day) Value: 27
  misc_feature: MA Experiment 20001557 PARAMETER Experiment Name: At_Drought_Soil_Dry_P Parameter: Organism Value: A. thaliana
  misc_feature: MA Experiment 20001557 PARAMETER Experiment Name: At_Drought_Soil_Dry_P Parameter: Plant Line Value: WS
  misc_feature: MA Experiment 20001557 PARAMETER Experiment Name: At_Drought_Soil_Dry_P Parameter: Post Timepoint (hr) Value: 3
  misc_feature: MA Experiment 20001557 PARAMETER Experiment Name: At_Drought_Soil_Dry_P Parameter: Post-Treatment Value: Re-Water vs. No Drought
  misc_feature: MA Experiment 20001557 PARAMETER Experiment Name: At_Drought_Soil_Dry_P Parameter: Timepoint (day) Value: 13
  misc_feature: MA Experiment 20001557 PARAMETER Experiment Name: At_Drought_Soil_Dry_P Parameter: Treatment Value: Drought vs. No Drought
  misc_feature: MA Experiment ID: 20001558 Result: Up-regulated in Transcription
  misc_feature: MA Experiment 20001558 PARAMETER Experiment Name: At_Drought_Soil_Dry_P Parameter: Age (day) Value: 27
  misc_feature: MA Experiment 20001558 PARAMETER Experiment Name: At_Drought_Soil_Dry_P Parameter: Organism Value: A. thaliana
  misc_feature: MA Experiment 20001558 PARAMETER Experiment Name: At_Drought_Soil_Dry_P Parameter: Plant Line Value: WS
  misc_feature: MA Experiment 20001558 PARAMETER Experiment Name: At_Drought_Soil_Dry_P Parameter: Post Timepoint (hr) Value: 6
  misc_feature: MA Experiment 20001558 PARAMETER Experiment Name: At_Drought_Soil_Dry_P Parameter: Post-Treatment Value: Re-Water vs. No Drought
  misc_feature: MA Experiment 20001558 PARAMETER Experiment Name: At_Drought_Soil_Dry_P Parameter: Timepoint (day) Value: 13
  misc_feature: MA Experiment 20001558 PARAMETER Experiment Name: At_Drought_Soil_Dry_P Parameter: Treatment Value: Drought vs. No Drought
  misc_feature: MA Experiment ID: 20001771 Result: Up-regulated in Transcription
  misc_feature: MA Experiment 20001771 PARAMETER Experiment Name: At_Far-red-enriched-adult_P Parameter: Age (day) Value: 28
  misc_feature: MA Experiment 20001771 PARAMETER Experiment Name: At_Far-red-enriched-adult_P Parameter: Light Value: Far-red enriched vs. White
  misc_feature: MA Experiment 20001771 PARAMETER Experiment Name: At_Far-red-enriched-adult_P Parameter: Organism Value: A. thaliana
  misc_feature: MA Experiment 20001771 PARAMETER Experiment Name: At_Far-red-enriched-adult_P Parameter: Plant Line Value: Columbia
  misc_feature: MA Experiment 20001771 PARAMETER Experiment Name: At_Far-red-enriched-adult_P Parameter: Timepoint (hr) Value: 16
  misc_feature: MA Experiment 20001771 PARAMETER Experiment Name: At_Far-red-enriched-adult_P Parameter: Tissue Value: Aerial
  misc_feature: MA Experiment ID: 20001773 Result: Up-regulated in Transcription
  misc_feature: MA Experiment 20001773 PARAMETER Experiment Name: At_Far-red-enriched-adult_P Parameter: Age (day) Value: 30
  misc_feature: MA Experiment 20001773 PARAMETER Experiment Name: At_Far-red-enriched-adult_P Parameter: Light Value: Far-red enriched vs. White
  misc_feature: MA Experiment 20001773 PARAMETER Experiment Name: At_Far-red-enriched-adult_P Parameter: Organism Value: A. thaliana
  misc_feature: MA Experiment 20001773 PARAMETER Experiment Name: At_Far-red-enriched-adult_P Parameter: Plant Line Value: Columbia
  misc_feature: MA Experiment 20001773 PARAMETER Experiment Name: At_Far-red-enriched-adult_P Parameter: Timepoint (hr) Value: 48
  misc_feature: MA Experiment 20001773 PARAMETER Experiment Name: At_Far-red-enriched-adult_P Parameter: Tissue Value: Aerial
  misc_feature: MA Experiment ID: 20001905 Result: Up-regulated in Transcription
  misc_feature: MA Experiment 20001905 PARAMETER Experiment Name: At_Drought_Reproduction_P Parameter: Age (day) Value: 40
  misc_feature: MA Experiment 20001905 PARAMETER Experiment Name: At_Drought_Reproduction_P Parameter: Organism Value: A. thaliana
  misc_feature: MA Experiment 20001905 PARAMETER Experiment Name: At_Drought_Reproduction_P Parameter: Plant Line Value: WS
  misc_feature: MA Experiment 20001905 PARAMETER Experiment Name: At_Drought_Reproduction_P Parameter: Timepoint (day) Value: 10
  misc_feature: MA Experiment 20001905 PARAMETER Experiment Name: At_Drought_Reproduction_P Parameter: Tissue Value: Rosettes
  misc_feature: MA Experiment 20001905 PARAMETER Experiment Name: At_Drought_Reproduction_P Parameter: Treatment Value: Drought vs. No Drought
  misc_feature: MA Experiment ID: 20001911 Result: Down-regulated in Transcription
  misc_feature: MA Experiment 20001911 PARAMETER Experiment Name: At_Drought_Reproduction_P Parameter: Age (day) Value: 40
  misc_feature: MA Experiment 20001911 PARAMETER Experiment Name: At_Drought_Reproduction_P Parameter: Organism Value: A. thaliana
  misc_feature: MA Experiment 20001911 PARAMETER Experiment Name: At_Drought_Reproduction_P Parameter: Plant Line Value: WS
  misc_feature: MA Experiment 20001911 PARAMETER Experiment Name: At_Drought_Reproduction_P Parameter: Timepoint (day) Value: 10
  misc_feature: MA Experiment 20001911 PARAMETER Experiment Name: At_Drought_Reproduction_P Parameter: Tissue Value: Flowers
  misc_feature: MA Experiment 20001911 PARAMETER Experiment Name: At_Drought_Reproduction_P Parameter: Treatment Value: Drought vs. No Drought
ctcttccccttcgctctcgaatcaatcactctctcttctttagcgtttttattttgtcttcctcgttttcttctacctttttatattttctctcttttcagttttctctagaaaaaaacactagtaatcagtttgcgtttgataaatatttgatgtggcaaaactcttgtggatcttgatgttcaaacattcatgtctccggtgattagtgaaatccttagatctggtttaactatagactcgtctcttagacgcaggacccatcttgttcaatctttctccgtcgtctttctctactggttctatgttttctcataaatcagctctcctttagccctttattattatatattctataaccataataatatattaaaactatatactataatctttttacataataaactttgggtcctgcgtcttaatcatagtacttaattttctctgtgtgttttaatatgaataataaaactgaaatgggatcttccacaagtggaaattgctcgtcggtttcaaccactggtttagctaactccggttcagaatctgatctccggcaacgtgatctaatcgacgagcggaagagaaagaggaaacagtcgaacagagaatctgcgaggaggtcgaggatgaggaagcagaagcatttggatgatctcactgctcaggtgactcatctacgtaaagaaaacgctcagatcgtcgccggaatcgccgtcacgacgcagcactacgtcactatcgaggcggagaacgacattctcagagctcaggttcttgaacttaaccaccgtctccaatctcttaacgagatcgttgatttcgtcgaatcttcttcttcaggattcggtatggagaccggtcagggattattcgacggtggattattcgacggcgtgatgaatcctatgaatctagggttttataatcaaccaatcatggcttctgcttctactgctggtgatgttttcaactgttagaaaacttcacatcattatcatcgtgagtgagactaatcatcgcagcaggggtaaaactgtaatttttcttataaattatgtgatgatgctttgtttctttattttataagatggttaattagtgtttaaaactgattgtaatgatagacagtgtaagaaatgtgtgatatcatggagatggtgatgtgagtttggtacaaatattttaagatcttttctttctatatattaaaagtg

SEQ ID NO: 72036 - protein, 173 aa, Arabidopsis thaliana; identical to SEQ ID NO: 26820
  peptide (1)..(173): Ceres Seq. ID no. 4910091
  misc_feature (34)..(101): Pfam Name: bZIP transcription factor Pfam Description: bZIP transcription factor
  misc_feature (7)..(173): Homolog of NCBI NO: 15222223 NR Description: bZIP transcription factor ATB2, putative; protein At1g75390.1 [Arabidopsis thaliana] >gi|25345497|pir||D96784

SEQ ID NO: 72037 - protein, 167 aa, Arabidopsis thaliana; identical to SEQ ID NO: 26821
  peptide (1)..(167): Ceres Seq. ID no. 4910092
  misc_feature (28)..(95): Pfam Name: bZIP transcription factor Pfam Description: bZIP transcription factor
  misc_feature (1)..(167): Homolog of NCBI NO: 15222223 NR Description: bZIP transcription factor ATB2, putative; protein At1g75390.1 [Arabidopsis thaliana] >gi|25345497|pir||D96784

SEQ ID NO: 72038 - protein, 116 aa, Arabidopsis thaliana; identical to SEQ ID NO: 26822
  peptide (1)..(116): Ceres Seq. ID no. 4910093
  misc_feature (1)..(116): Homolog of NCBI NO: 15222223 NR Description: bZIP transcription factor ATB2, putative; protein At1g75390.1 [Arabidopsis thaliana] >gi|25345497|pir||D96784

SEQ ID NO: 72039 - DNA, 1453 bp, Arabidopsis thaliana
  misc_feature (1)..(1453): Ceres Seq. ID no. 4912006
  misc_feature: MA Experiment ID: 108464 Result: Down-regulated in Transcription
  misc_feature: MA Experiment 108464 PARAMETER Experiment Name: At_Germinating_Seeds_cDNA_P Parameter: Age (day) Value: 4 vs. 0
  misc_feature: MA Experiment 108464 PARAMETER Experiment Name: At_Germinating_Seeds_cDNA_P Parameter: Tissue Value: Germinating Seeds
  misc_feature: MA Experiment ID: 20000265 Result: Up-regulated in Transcription
  misc_feature: MA Experiment 20000265 PARAMETER Experiment Name: At_Open_Flower_P Parameter: Age (day) Value: 21
  misc_feature: MA Experiment 20000265 PARAMETER Experiment Name: At_Open_Flower_P Parameter: Plant Line Value: WS
  misc_feature: MA Experiment 20000265 PARAMETER Experiment Name: At_Open_Flower_P Parameter: Tissue Value: Closed Flower vs. Whole Plant
  misc_feature: MA Experiment ID: 20000495 Result: Up-regulated in Transcription
  misc_feature: MA Experiment 20000495 PARAMETER Experiment Name: At_Guard_Cells_P Parameter: Harvest Date Value: 8/2/2002
  misc_feature: MA Experiment 20000495 PARAMETER Experiment Name: At_Guard_Cells_P Parameter: Organism Value: A. thaliana
  misc_feature: MA Experiment 20000495 PARAMETER Experiment Name: At_Guard_Cells_P Parameter: Tissue Value: Guard Cells vs. Leaves
  misc_feature: MA Experiment ID: 20000794 Result: Up-regulated in Transcription
  misc_feature: MA Experiment 20000794 PARAMETER Experiment Name: At_Petals_P Parameter: Age (day) Value: 23-25 days
  misc_feature: MA Experiment 20000794 PARAMETER Experiment Name: At_Petals_P Parameter: Plant Line Value: WS
  misc_feature: MA Experiment 20000794 PARAMETER Experiment Name: At_Petals_P Parameter: Tissue Value: Petals vs. Whole plant
aaaagaaaattgtcaatttcgaaaaatgttgagcacaagctctgatcttcatggccgtcttctccgattatcagaaccaatagcagagattcttagacgtacacagtacacaccgcaagagagcagcaaagtatccaccaaagatatactcttgtccttgttaccaaacacttcgtcttctcgtctcgccaatgaagaatcgatcaaaagtctcgcgcttgcttgtgcccttctcgcttcttcacgttcatccactcacgaacttctctcatggattccagaaaacctctctgtcatgggggaatctacattttgggagatttcaagggattgtttcagtgatttttctagcaacagtaatgctgagaagcttgtggaattggtagaggatagtgagaagatcgaaatgttgccgatagttttgccggagttaaaagatggaatcgaaaagagttcacttggtaaaggcagtgatgcagaggatgtttcagctgcaatggctagaacacctgttggttatgctatacttgctgctcaccagctcaggtggtttgttactcaggttaaaaaaccgaatttggtgaaattttgtaacttggtggttccttgtgctttgacagcacttgatcattggtctcctgaagtcaaagggcagggtatgataacctttgttcatcttgctaaaaatgtgagttccggtgatcttggtttgtatggagatgtggttcttgatgcgtgttgccagaatatagcttccgatgatgagatttggatacatgtggtagagttatctgtgcttcttgttactaaaatccacccaaataatcctcgaagcccgtggtatgagaagatcatgaatgagatgctcgggcatttggaacgccaaccaagaaataaggagcgacgtatcacttggctaagatttgttgagccactcttgaactctctagggcttttcttacttgctcattttcgacgtatcttccctcttttctttcagtggatgcattcagacgacgccgaaacagttctgttggttcttgagagactggagacagttgtgaggttgacgtggattagacactcacctgtgttcccaagattggtggatgagcttgtttccttgtacaaagagtcatcgatgcgtaaggatcgcgatgatattagacctcttatcctccgtatcttgatgctactccgccagtgcaaaggtctacggtttgagtcagcgtggagtcaataccaggaggatccaaatctgagtactgttagtcaacatatatggactagttcaagttgatctcaagagcgtatgtttgactaaaacagccatttttttttctaattttcgatattagtttggtctaggcctagtgatgcaagtaattactggcgaatcctcgaatttttgtaagcatttggctcttgactcttcttaagctaatctgatttg

SEQ ID NO: 72040 - protein, 432 aa, Arabidopsis thaliana
  peptide (1)..(432): Ceres Seq. ID no. 4912007
  misc_feature (1)..(432): Homolog of NCBI NO: 30688076 NR Description: expressed protein [Arabidopsis thaliana]
  misc_feature (1)..(432): Homolog of NCBI NO: 26451294 NR Description: unknown protein [Arabidopsis thaliana]
  misc_feature (9)..(432): Homolog of NCBI NO: 20198306 NR Description: expressed protein [Arabidopsis thaliana]
  misc_feature (99)..(280): Homolog of NCBI NO: 25370807 NR Description: hypothetical protein At2g39910 [imported] -
KENCQFRKMLSTSSDLHGRLLRLSEPIAEILRRTQYTPQESSKVSTKDILLSLLPNTSSSRLANEESIKSLALACALLASSRSSTHELLSWIPENLSVMGESTFWEISRDCFSDFSSNSNAEKLVELVEDSEKIEMLPIVLPELKDGIEKSSLGKGSDAEDVSAAMARTPVGYAILAAHQLRWFVTQVKKPNLVKFCNLVVPCALTALDHWSPEVKGQGMITFVHLAKNVSSGDLGLYGDVVLDACCQNIASDDEIWIHVVELSVLLVTKIHPNNPRSPWYEKIMNEMLGHLERQPRNKERRITWLRFVEPLLNSLGLFLLAHFRRIFPLFFQWMHSDDAETVLLVLERLETVVRLTWIRHSPVFPRLVDELVSLYKESSMRKDRDDIRPLILRILMLLRQCKGLRFESAWSQYQEDPNLSTVSQHIWTSSS

SEQ ID NO: 72041 - protein, 424 aa, Arabidopsis thaliana; identical to SEQ ID NO: 43088
  peptide (1)..(424): Ceres Seq. ID no. 4912008
  misc_feature (1)..(424): Homolog of NCBI NO: 30688076 NR Description: expressed protein [Arabidopsis thaliana]
  misc_feature (1)..(424): Homolog of NCBI NO: 26451294 NR Description: unknown protein [Arabidopsis thaliana]
  misc_feature (1)..(424): Homolog of NCBI NO: 20198306 NR Description: expressed protein [Arabidopsis thaliana]
  misc_feature (91)..(272): Homolog of NCBI NO: 25370807 NR Description: hypothetical protein At2g39910 [imported] -

SEQ ID NO: 72042 - protein, 334 aa, Arabidopsis thaliana
  peptide (1)..(334): Ceres Seq. ID no. 4912009
  misc_feature (1)..(334): Homolog of NCBI NO: 30688076 NR Description: expressed protein [Arabidopsis thaliana]
  misc_feature (1)..(334): Homolog of NCBI NO: 26451294 NR Description: unknown protein [Arabidopsis thaliana]
  misc_feature (1)..(334): Homolog of NCBI NO: 20198306 NR Description: expressed protein [Arabidopsis thaliana]
  misc_feature (1)..(182): Homolog of NCBI NO: 25370807 NR Description: hypothetical protein At2g39910 [imported] -
MGESTFWEISRDCFSDFSSNSNAEKLVELVEDSEKIEMLPIVLPELKDGIEKSSLGKGSDAEDVSAAMARTPVGYAILAAHQLRWFVTQVKKPNLVKFCNLVVPCALTALDHWSPEVKGQGMITFVHLAKNVSSGDLGLYGDVVLDACCQNIASDDEIWIHVVELSVLLVTKIHPNNPRSPWYEKIMNEMLGHLERQPRNKERRITWLRFVEPLLNSLGLFLLAHFRRIFPLFFQWMHSDDAETVLLVLERLETVVRLTWIRHSPVFPRLVDELVSLYKESSMRKDRDDIRPLILRILMLLRQCKGLRFESAWSQYQEDPNLSTVSQHIWTSSS

SEQ ID NO: 72043 - DNA, 2028 bp, Arabidopsis thaliana
  misc_feature (1)..(2028): Ceres Seq. ID no. 4916239
  misc_feature: MA Experiment ID: 20001556 Result: Up-regulated in Transcription
  misc_feature: MA Experiment 20001556 PARAMETER Experiment Name: At_Drought_Soil_Dry_P Parameter: Age (day) Value: 26
  misc_feature: MA Experiment 20001556 PARAMETER Experiment Name: At_Drought_Soil_Dry_P Parameter: Organism Value: A. thaliana
  misc_feature: MA Experiment 20001556 PARAMETER Experiment Name: At_Drought_Soil_Dry_P Parameter: Plant Line Value: WS
  misc_feature: MA Experiment 20001556 PARAMETER Experiment Name: At_Drought_Soil_Dry_P Parameter: Post Timepoint (hr) Value: None
  misc_feature: MA Experiment 20001556 PARAMETER Experiment Name: At_Drought_Soil_Dry_P Parameter: Post-Treatment Value: None
  misc_feature: MA Experiment 20001556 PARAMETER Experiment Name: At_Drought_Soil_Dry_P Parameter: Timepoint (day) Value: 12
  misc_feature: MA Experiment 20001556 PARAMETER Experiment Name: At_Drought_Soil_Dry_P Parameter: Treatment Value: Drought vs. No Drought
atggaagtagattgtcggcgttattacgtacgtcttcttcaatcatgcagcagcagaaatcgcgaaactttatggagacaaaccaatggattgctcttgaagaagggttttcttagttcaattgtcattgttgctaaccatctcctccaaatgtactcccggtctggtaaaatgggaattgcgcggaacttgttcgacgaaatgcctgatagaaactatttctcgtggaacactatgattgaagggtacatgaattctggggaaaagggaacgtctttgaggttttttgatatgatgccagaaagagatgggtactcttggaacgtggttgtttccgggtttgctaaagctggtgagctaagtgtcgctaggaggttattcaatgccatgccggaaaaagatgttgtgacgttgaactctctgcttcatggatatattttaaacggttatgcagaggaagctctgaggttgtttaaagaattgaattttagcgctgatgcgatcacattgacgacagttcttaaagcttgtgctgagttagaagctttgaaatgtgggaagcagatacatgctcagattctgatcggtggtgttgaatgtgactcgaaaatgaatagttctttagttaatgtgtatgcaaagtgtggtgatttgagaatggcaagctatatgctggagcagattagggaacctgatgaccattctctatctgccttaatttcaggttatgcaaattgtgggagagtgaatgagtctagaggacttttcgataggaaaagtaacagatgtgtaattctatggaactctatgatttcaggctatattgctaacaatatgaaaatggaggcattggttcttttcaatgagatgaggaatgaaacccgggaagattctcgtacgctggcagcggttataaatgcttgcatcggtttgggcttcctagagactggtaaacaaatgcattgtcatgcttgtaaatttgggttaattgatgacattgttgtagctagcactttgcttgacatgtactccaagtgtggaagcccaatggaagcttgcaaacttttcagtgaggtcgaatcctatgacactatcttacttaacagtatgatcaaggtatatttcagctgcggaagaatcgatgatgcaaaacgggtatttgagagaattgaaaataagagcttgatttcttggaactcaatgactaacggattcagtcaaaatggttgtactgttgaaactttagagtatttccatcagatgcataagctggatttgcctacagatgaggttagcctctctagtgtcattagtgcgtgtgcaagtatatcttctctcgaactcggtgagcaagtttttgcgagggcaactattgttggtcttgactctgatcaagtagtatcatcttctctcattgatctctactgcaagtgtggattcgttgagcatggcaggagagtattcgatacaatggttaaatcagatgaagtaccatggaactcaatgatatcaggttatgctacgaatggtcaaggatttgaagcgattgacttgttcaagaaaatgagtgttgctggtataagacctactcagatcacttttatggttgttctaacagcatgcaattactgtggtttagtcgaagagggacgaaaattgtttgagtcaatgaaggttgatcatggttttgttccagataaagagcatttttcatgtatggttgatcttttggctcgtgctggttatgtggaagaagctataaatcttgtagaagagatgcctttcgatgtggatggaagcatgtggtcatctattctaagaggatgtgtagcaaatggatataaagccatgggaaagaaagctgctgagaagattatagagcttgaacctgagaactcagttgcttatgtgcagttgtccgctatattcgcaacctcgggagattgggaaagctcggcgcttgtaagaaaactgatgagggagaacaatgtgacaaagaatccaggttctagttggactgattgttga

SEQ ID NO: 72044 - protein, 675 aa, Arabidopsis thaliana; identical to SEQ ID NO: 69800
  peptide (1)..(675): Ceres Seq. ID no. 4916240
  misc_feature (396)..(430): Pfam Name: PPR repeat Pfam Description: PPR repeat
  misc_feature (68)..(636): Homolog of NCBI NO: 34897444 NR Description: hypothetical protein [Oryza sativa (japonica group)] >gi|28269400|gb|AAO37943.1| hypothetical protein [Oryza
  misc_feature (77)..(674): Homolog of NCBI NO: 15227144 NR Description: hypothetical protein; protein id: At2g22070.1
  misc_feature (94)..(673): Homolog of NCBI NO: 34896896 NR Description: hypothetical protein [Oryza sativa (japonica group)] >gi|24899461|gb|AAN65031.1| hypothetical protein [Oryza
  misc_feature (108)..(672): Homolog of NCBI NO: 15225445 NR Description: hypothetical protein; protein id: At2g13600.1
  misc_feature (77)..(674): Homolog of NCBI NO: 15222566 NR Description: hypothetical protein; protein id: At1g25360.1
  misc_feature (13)..(672): Homolog of NCBI NO: 5803274 NR Description: Similar to Arabidopsis thaliana BAC T5J8 from
  misc_feature (108)..(674): Homolog of NCBI NO: 21740490 NR Description: OSJNBa0006B20.5 [Oryza sativa (japonica
  misc_feature (70)..(674): Homolog of NCBI NO: 15235498 NR Description: hypothetical protein; protein id: At4g02750.1
  misc_feature (44)..(672): Homolog of NCBI NO: 19033573 NR Description: putative DYW7 protein [Oryza sativa (japonica
  misc_feature (79)..(674): Homolog of NCBI NO: 34393605 NR Description: pentatricopeptide (PPR) repeat-containing

SEQ ID NO: 72045 - protein, 625 aa, Arabidopsis thaliana; identical to SEQ ID NO: 69801
  peptide (1)..(625): Ceres Seq. ID no. 4916241
  misc_feature (346)..(380): Pfam Name: PPR repeat Pfam Description: PPR repeat
  misc_feature (18)..(586): Homolog of NCBI NO: 34897444 NR Description: hypothetical protein [Oryza sativa (japonica group)] >gi|28269400|gb|AAO37943.1| hypothetical protein [Oryza
  misc_feature (27)..(624): Homolog of NCBI NO: 15227144 NR Description: hypothetical protein; protein id: At2g22070.1
  misc_feature (44)..(623): Homolog of NCBI NO: 34896896 NR Description: hypothetical protein [Oryza sativa (japonica group)] >gi|24899461|gb|AAN65031.1| hypothetical protein [Oryza
  misc_feature (58)..(622): Homolog of NCBI NO: 15225445 NR Description: hypothetical protein; protein id: At2g13600.1
  misc_feature (27)..(624): Homolog of NCBI NO: 15222566 NR Description: hypothetical protein; protein id: At1g25360.1
  misc_feature (1)..(622): Homolog of NCBI NO: 5803274 NR Description: Similar to Arabidopsis thaliana BAC T5J8 from
  misc_feature (58)..(624): Homolog of NCBI NO: 21740490 NR Description: OSJNBa0006B20.5 [Oryza sativa (japonica
  misc_feature (20)..(624): Homolog of NCBI NO: 15235498 NR Description: hypothetical protein; protein id: At4g02750.1
  misc_feature (1)..(622): Homolog of NCBI NO: 19033573 NR Description: putative DYW7 protein [Oryza sativa (japonica
  misc_feature (29)..(624): Homolog of NCBI NO: 34393605 NR Description: pentatricopeptide (PPR) repeat-containing

SEQ ID NO: 72046 - protein, 618 aa, Arabidopsis thaliana
  peptide (1)..(618): Ceres Seq. ID no. 4916242
  misc_feature (339)..(373): Pfam Name: PPR repeat Pfam Description: PPR repeat
  misc_feature (11)..(579): Homolog of NCBI NO: 34897444 NR Description: hypothetical protein [Oryza sativa (japonica group)] >gi|28269400|gb|AAO37943.1| hypothetical protein [Oryza
  misc_feature (20)..(617): Homolog of NCBI NO: 15227144 NR Description: hypothetical protein; protein id: At2g22070.1
  misc_feature (37)..(616): Homolog of NCBI NO: 34896896 NR Description: hypothetical protein [Oryza sativa (japonica group)] >gi|24899461|gb|AAN65031.1| hypothetical protein [Oryza
  misc_feature (51)..(615): Homolog of NCBI NO: 15225445 NR Description: hypothetical protein; protein id: At2g13600.1
  misc_feature (20)..(617): Homolog of NCBI NO: 15222566 NR Description: hypothetical protein; protein id: At1g25360.1
  misc_feature (1)..(615): Homolog of NCBI NO: 5803274 NR Description: Similar to Arabidopsis thaliana BAC T5J8 from
  misc_feature (51)..(617): Homolog of NCBI NO: 21740490 NR Description: OSJNBa0006B20.5 [Oryza sativa (japonica
  misc_feature (13)..(617): Homolog of NCBI NO: 15235498 NR Description: hypothetical protein; protein id: At4g02750.1
  misc_feature (1)..(615): Homolog of NCBI NO: 19033573 NR Description: putative DYW7 protein [Oryza sativa (japonica
  misc_feature (22)..(617): Homolog of NCBI NO: 34393605 NR Description: pentatricopeptide (PPR) repeat-containing
MGIARNLFDEMPDRNYFSWNTMIEGYMNSGEKGTSLRFFDMMPERDGYSWNVVVSGFAKAGELSVARRLFNAMPEKDVVTLNSLLHGYILNGYAEEALRLFKELNFSADAITLTTVLKACAELEALKCGKQIHAQILIGGVECDSKMNSSLVNVYAKCGDLRMASYMLEQIREPDDHSLSALISGYANCGRVNESRGLFDRKSNRCVILWNSMISGYIANNMKMEALVLFNEMRNETREDSRTLAAVINACIGLGFLETGKQMHCHACKFGLIDDIVVASTLLDMYSKCGSPMEACKLFSEVESYDTILLNSMIKVYFSCGRIDDAKRVFERIENKSLISWNSMTNGFSQNGCTVETLEYFHQMHKLDLPTDEVSLSSVISACASISSLELGEQVFARATIVGLDSDQVVSSSLIDLYCKCGFVEHGRRVFDTMVKSDEVPWNSMISGYATNGQGFEAIDLFKKMSVAGIRPTQITFMVVLTACNYCGLVEEGRKLFESMKVDHGFVPDKEHFSCMVDLLARAGYVEEAINLVEEMPFDVDGSMWSSILRGCVANGYKAMGKKAAEKIIELEPENSVAYVQLSAIFATSGDWESSALVRKLMRENNVTKNPGSSWTDC

SEQ ID NO: 72047 - DNA, 1290 bp, Arabidopsis thaliana
  misc_feature (1)..(1290): Ceres Seq. ID no. 4916263
  misc_feature: MA Experiment ID: 20000327 Result: Up-regulated in Transcription
  misc_feature: MA Experiment 20000327 PARAMETER Experiment Name: At_42deg_Heat_Sub_P Parameter: Age (day) Value: 14
  misc_feature: MA Experiment 20000327 PARAMETER Experiment Name: At_42deg_Heat_Sub_P Parameter: Organism Value: A. thaliana
  misc_feature: MA Experiment 20000327 PARAMETER Experiment Name: At_42deg_Heat_Sub_P Parameter: Plant Line Value: WS
  misc_feature: MA Experiment 20000327 PARAMETER Experiment Name: At_42deg_Heat_Sub_P Parameter: Temperature (deg C) Value: 42 vs. 22
  misc_feature: MA Experiment 20000327 PARAMETER Experiment Name: At_42deg_Heat_Sub_P Parameter: Timepoint (hr) Value: 1
  misc_feature: MA Experiment 20000327 PARAMETER Experiment Name: At_42deg_Heat_Sub_P Parameter: Tissue Value: Aerial
atgccgcagccgcgaccggaaactatacgtggcagtttaaaacctcacatcatggtgtttccatatccagcacaaggccacttgcttcctcttctcgacttaacccatcaactctgtcttcgtggcctcacagtctccatcatcgtcactcctaaaaaccttccttacctctctcctcttctctccgctcatccatccgctgtttccgtcgtcactttacctttccctcaccatcctttaatcccttccggggttgaaaacgttaaagatctaggtggttacggaaatcccttgatcatggcttctcttcgtcagcttcgagagcctatcgtcaactggttaagttctcatccaaatccaccggtcgctctcatttctgatttcttccttggatggaccaaagatcttggtattcctcgctttgctttcttcagttctggagcattcttagcttcgattctccattttgtctctgacaagcctcatctctttgaatcaactgagcctgtctgtttatcggatcttcctcgctcccctgttttcaaaacagagcatctcccgtctttaatccctcagtctccattatcgcaagatcttgaaagtgttaaagacagtaccatgaatttttcgagttatggttgtattttcaatacttgtgagtgtctggaagaggattacatggagtatgtgaagcagaaagtgagtgagaaccgcgttttcggtgttggtccgctttcttcagtcgggttaagtaaggaagattccgtatccaatgtagacgcaaaggcattgttgagttggctagatggatgtccagatgattcagtgctctacatctgcttcggaagtcaaaaggtgttaaccaaagagcagtgtgatgatctggctcttggtctcgagaagagtatgacccgattcgtatgggtggttaagaaagacccgataccggatgggtttgaggatcgggtcgcaggtcgaggaatgattgtgagagggtgggctcctcaagtggctatgttgagtcatgtggcggttggcgggttcttaatccattgtggatggaactcggtgctggaagcgatggctagcggaacaatgatcttggcatggccaatggaagcagaccagtttgtagatgcgaggttggtagtggagcatatgggtgtggcggttagtgtatgtgaagggggtaagactgtgcctgacccgtatgagatgggtcggattatcgctgacacaatgggtgagagtggaggcgaggcgcgtgctcgggctaaggagatgggatag

SEQ ID NO: 72048 - protein, 429 aa, Arabidopsis thaliana
  peptide (1)..(429): Ceres Seq. ID no. 4916264
  misc_feature (1)..(429): Homolog of NCBI NO: 15223779 NR Description: putative glucosyl transferase; protein id: [Arabidopsis thaliana] >gi|25286807|pir||H96549 hypothetical
  misc_feature (12)..(428): Homolog of NCBI NO: 15242769 NR Description: putative protein; protein id: At5g03490.1
  misc_feature (14)..(428): Homolog of NCBI NO: 22330612 NR Description: putative glucosyltransferase; protein id:
  misc_feature (14)..(428): Homolog of NCBI NO: 25406301 NR Description: protein glucosyltransferase F2P9.25 [imported] - thaliana >gi|12325153|gb|AAG52529.1|AC016662_23 putative
  misc_feature (29)..(424): Homolog of NCBI NO: 19911191 NR Description: glucosyltransferase like protein [Vigna angularis]
  misc_feature (28)..(428): Homolog of NCBI NO: 20260128 NR Description: putative glucosyltransferase [Arabidopsis
  misc_feature (38)..(428): Homolog of NCBI NO: 10241430 NR Description: putative glucosyltransferase [Oryza sativa
  misc_feature (16)..(428): Homolog of NCBI NO: 2232354 NR Description: UDPG glucosyltransferase [Solanum berthaultii]
  misc_feature (234)..(416): Homolog of NCBI NO: 18390599 NR Description: expressed protein; protein id: At1g06000.1, by cDNA: 1040., supported by cDNA: gi_20260467 [Arabidopsis
  misc_feature (14)..(158): Homolog of NCBI NO: 18390599 NR Description: expressed protein; protein id: At1g06000.1, by cDNA: 1040., supported by cDNA: gi_20260467 [Arabidopsis
MPQPRPETIRGSLKPHIMVFPYPAQGHLLPLLDLTHQLCLRGLTVSIIVTPKNLPYLSPLLSAHPSAVSVVTLPFPHHPLIPSGVENVKDLGGYGNPLIMASLRQLREPIVNWLSSHPNPPVALISDFFLGWTKDLGIPRFAFFSSGAFLASILHFVSDKPHLFESTEPVCLSDLPRSPVFKTEHLPSLIPQSPLSQDLESVKDSTMNFSSYGCIFNTCECLEEDYMEYVKQKVSENRVFGVGPLSSVGLSKEDSVSNVDAKALLSWLDGCPDDSVLYICFGSQKVLTKEQCDDLALGLEKSMTRFVWVVKKDPIPDGFEDRVAGRGMIVRGWAPQVAMLSHVAVGGFLIHCGWNSVLEAMASGTMILAWPMEADQFVDARLVVEHMGVAVSVCEGGKTVPDPYEMGRIIADTMGESGGEARARAKEMG

SEQ ID NO: 72049 - protein, 412 aa, Arabidopsis thaliana
  peptide (1)..(412): Ceres Seq. ID no. 4916265
  misc_feature (1)..(412): Homolog of NCBI NO: 15223779 NR Description: putative glucosyl transferase; protein id: [Arabidopsis thaliana] >gi|25286807|pir||H96549 hypothetical
  misc_feature (1)..(411): Homolog of NCBI NO: 15242769 NR Description: putative protein; protein id: At5g03490.1
  misc_feature (1)..(411): Homolog of NCBI NO: 22330612 NR Description: putative glucosyltransferase; protein id:
  misc_feature (1)..(411): Homolog of NCBI NO: 25406301 NR Description: protein glucosyltransferase F2P9.25 [imported] - thaliana >gi|12325153|gb|AAG52529.1|AC016662_23 putative
  misc_feature (12)..(407): Homolog of NCBI NO: 19911191 NR Description: glucosyltransferase like protein [Vigna angularis]
  misc_feature (11)..(411): Homolog of NCBI NO: 20260128 NR Description: putative glucosyltransferase [Arabidopsis
  misc_feature (21)..(411): Homolog of NCBI NO: 10241430 NR Description: putative glucosyltransferase [Oryza sativa
  misc_feature (1)..(411): Homolog of NCBI NO: 2232354 NR Description: UDPG glucosyltransferase [Solanum berthaultii]
  misc_feature (217)..(399): Homolog of NCBI NO: 18390599 NR Description: expressed protein; protein id: At1g06000.1, by cDNA: 1040., supported by cDNA: gi_20260467 [Arabidopsis
  misc_feature (1)..(141): Homolog of NCBI NO: 18390599 NR Description: expressed protein; protein id: At1g06000.1, by cDNA: 1040., supported by cDNA: gi_20260467 [Arabidopsis
MVFPYPAQGHLLPLLDLTHQLCLRGLTVSIIVTPKNLPYLSPLLSAHPSAVSVVTLPFPHHPLIPSGVENVKDLGGYGNPLIMASLRQLREPIVNWLSSHPNPPVALISDFFLGWTKDLGIPRFAFFSSGAFLASILHFVSDKPHLFESTEPVCLSDLPRSPVFKTEHLPSLIPQSPLSQDLESVKDSTMNFSSYGCIFNTCECLEEDYMEYVKQKVSENRVFGVGPLSSVGLSKEDSVSNVDAKALLSWLDGCPDDSVLYICFGSQKVLTKEQCDDLALGLEKSMTRFVWVVKKDPIPDGFEDRVAGRGMIVRGWAPQVAMLSHVAVGGFLIHCGWNSVLEAMASGTMILAWPMEADQFVDARLVVEHMGVAVSVCEGGKTVPDPYEMGRIIADTMGESGGEARARAKEMG

SEQ ID NO: 72050 - protein, 330 aa, Arabidopsis thaliana
  peptide (1)..(330): Ceres Seq. ID no. 4916266
  misc_feature (1)..(330): Homolog of NCBI NO: 15223779 NR Description: putative glucosyl transferase; protein id: [Arabidopsis thaliana] >gi|25286807|pir||H96549 hypothetical
  misc_feature (1)..(329): Homolog of NCBI NO: 15242769 NR Description: putative protein; protein id: At5g03490.1
  misc_feature (1)..(329): Homolog of NCBI NO: 22330612 NR Description: putative glucosyltransferase; protein id:
  misc_feature (1)..(329): Homolog of NCBI NO: 25406301 NR Description: protein glucosyltransferase F2P9.25 [imported] - thaliana >gi|12325153|gb|AAG52529.1|AC016662_23 putative
  misc_feature (1)..(325): Homolog of NCBI NO: 19911191 NR Description: glucosyltransferase like protein [Vigna angularis]
  misc_feature (1)..(329): Homolog of NCBI NO: 20260128 NR Description: putative glucosyltransferase [Arabidopsis
  misc_feature (1)..(329): Homolog of NCBI NO: 10241430 NR Description: putative glucosyltransferase [Oryza sativa
  misc_feature (1)..(329): Homolog of NCBI NO: 2232354 NR Description: UDPG glucosyltransferase [Solanum berthaultii]
  misc_feature (135)..(317): Homolog of NCBI NO: 18390599 NR Description: expressed protein; protein id: At1g06000.1, by cDNA: 1040., supported by cDNA: gi_20260467 [Arabidopsis
  misc_feature (1)..(59): Homolog of NCBI NO: 18390599 NR Description: expressed protein; protein id: At1g06000.1, by cDNA: 1040., supported by cDNA: gi_20260467 [Arabidopsis
MASLRQLREPIVNWLSSHPNPPVALISDFFLGWTKDLGIPRFAFFSSGAFLASILHFVSDKPHLFESTEPVCLSDLPRSPVFKTEHLPSLIPQSPLSQDLESVKDSTMNFSSYGCIFNTCECLEEDYMEYVKQKVSENRVFGVGPLSSVGLSKEDSVSNVDAKALLSWLDGCPDDSVLYICFGSQKVLTKEQCDDLALGLEKSMTRFVWVVKKDPIPDGFEDRVAGRGMIVRGWAPQVAMLSHVAVGGFLIHCGWNSVLEAMASGTMILAWPMEADQFVDARLVVEHMGVAVSVCEGGKTVPDPYEMGRIIADTMGESGGEARARAKEMG

SEQ ID NO: 72051 - DNA, 801 bp, Arabidopsis thaliana
  misc_feature (1)..(801): Ceres Seq. ID no. 4916451
  misc_feature: MA Experiment ID: 20000306 Result: Down-regulated in Transcription
  misc_feature: MA Experiment 20000306 PARAMETER Experiment Name: At_Germinating_Seeds_Sub_P Parameter: Age (hr) Value: 6 vs. 0
  misc_feature: MA Experiment 20000306 PARAMETER Experiment Name: At_Germinating_Seeds_Sub_P Parameter: Organism Value: A. thaliana
  misc_feature: MA Experiment 20000306 PARAMETER Experiment Name: At_Germinating_Seeds_Sub_P Parameter: Plant Line Value: WS
  misc_feature: MA Experiment 20000306 PARAMETER Experiment Name: At_Germinating_Seeds_Sub_P Parameter: Tissue Value: Germinating Seeds
  misc_feature: MA Experiment ID: 20000307 Result: Down-regulated in Transcription
  misc_feature: MA Experiment 20000307 PARAMETER Experiment Name: At_Germinating_Seeds_Sub_P Parameter: Age (hr) Value: 24 vs. 0
  misc_feature: MA Experiment 20000307 PARAMETER Experiment Name: At_Germinating_Seeds_Sub_P Parameter: Organism Value: A. thaliana
  misc_feature: MA Experiment 20000307 PARAMETER Experiment Name: At_Germinating_Seeds_Sub_P Parameter: Plant Line Value: WS
  misc_feature: MA Experiment 20000307 PARAMETER Experiment Name: At_Germinating_Seeds_Sub_P Parameter: Tissue Value: Germinating Seeds
  misc_feature: MA Experiment ID: 20000314 Result: Down-regulated in Transcription
  misc_feature: MA Experiment 20000314 PARAMETER Experiment Name: At_14day_Shoots-Roots_Sub_P Parameter: Age (day) Value: 14
  misc_feature: MA Experiment 20000314 PARAMETER Experiment Name: At_14day_Shoots-Roots_Sub_P Parameter: Organism Value: A. thaliana
  misc_feature: MA Experiment 20000314 PARAMETER Experiment Name: At_14day_Shoots-Roots_Sub_P Parameter: Plant Line Value: WS
  misc_feature: MA Experiment 20000314 PARAMETER Experiment Name: At_14day_Shoots-Roots_Sub_P Parameter: Tissue Value: Roots vs. Whole Plant
  misc_feature: MA Experiment ID: 20000355 Result: Down-regulated in Transcription
  misc_feature: MA Experiment 20000355 PARAMETER Experiment Name: At_Siliques_Sub_P Parameter: Age (day) Value: 21
  misc_feature: MA Experiment 20000355 PARAMETER Experiment Name: At_Siliques_Sub_P Parameter: Organism Value: A. thaliana
  misc_feature: MA Experiment 20000355 PARAMETER Experiment Name: At_Siliques_Sub_P Parameter: Plant Line Value: WS
  misc_feature: MA Experiment 20000355 PARAMETER Experiment Name: At_Siliques_Sub_P Parameter: Tissue Value: Less Than 5mm Siliques vs. Whole Plant
  misc_feature: MA Experiment ID: 20000440 Result: Up-regulated in Transcription
  misc_feature: MA Experiment 20000440 PARAMETER Experiment Name: At_Closed-Flower__Sub_P Parameter: Tissue Value: Closed Flower vs. Whole Plant
atgtcttcagtttttggatctgtccatatcttggccatgatagccatacaactcctccttacacacagtgtttcatctctgaaccttaccaatgcgtatctgcaccacaaatgcagcaacactcaaggaaaatataagcaggggagcgcgttcgagaaaaatctcaacttagtcctcagtaccatcacctcgattggaaattttcgtgacggtttccgctacaccgaagaaggtgaggatcccaataacgtctttgtcatgttccagtgtcgcggcgactcctactggtccaagtgccccccttgcattagcaccgccgtctctgggcttcgtaggagatgtccaagaaataagggagcaataatatggtatgaccaatgtcttttaaagatatcttcagttgcctccttcaataagatagattatgagaacgatttctatttgtccaacccaaacaacatgagtgatcgggggttgttcaacaaggagacgtcggctctcctggagaagctggcatataaagcctccgatagaaacaacttggatggtaaacaattggtgttgtacgcagcaggggagaagagaattgggacaaagaaggtgtatgcaatggtgcagtgtacgaaagacttaatatttacaaagtgctttgagtgtttggaagggattttgaggaagtttccacagtgttgtgacggtaaacgaggagggagagttttcggtacgagctgtaactttaggtatgagttatatccttttcttagaaactacagcaacagtacaatgagagctccatattaa

SEQ ID NO: 72052 - protein, 266 aa, Arabidopsis thaliana; identical to SEQ ID NO: 71994
  peptide (1)..(266): Ceres Seq. ID no. 4916452
  misc_feature (201)..(255): Pfam Name: Domain of unknown function DUF26 Pfam Description: Domain of unknown function DUF26
  misc_feature (1)..(266): Homolog of NCBI NO: 15233366 NR Description: pollen coat receptor kinase, putative; protein At4g20670.1 [Arabidopsis thaliana] >gi|7485931|pir||T10609
  misc_feature (1)..(256): Homolog of NCBI NO: 15233235 NR Description: receptor kinase common family, putative; protein At3g21990.1 [Arabidopsis thaliana] >gi|9279756|dbj|BAB01382.1| similarity to receptor kinase~gene_id:MZN24.17 [Arabidopsis
  misc_feature (1)..(247): Homolog of NCBI NO: 15233364 NR Description: receptor kinase common family, 3' partial, protein id: At4g20650.1 [Arabidopsis thaliana]
  misc_feature (1)..(247): Homolog of NCBI NO: 18415518 NR Description: putative protein; protein id: At4g20530.1 thaliana] >gi|18415520|ref|NP_567604.1| putative protein; protein At4g20540.1 [Arabidopsis thaliana] >gi|18415522|ref|NP_567605.1|
  misc_feature (135)..(256): Homolog of NCBI NO: 15233231 NR Description: hypothetical protein; protein id: At3g21980.1
  misc_feature (1)..(110): Homolog of NCBI NO: 15233231 NR Description: hypothetical protein; protein id: At3g21980.1
  misc_feature (1)..(239): Homolog of NCBI NO: 9279755 NR Description: emb|CAB45833.1~gene_id:MZN24.16~similar to
  misc_feature (11)..(262): Homolog of NCBI NO: 15233368 NR Description: putative protein; protein id: At4g20680.1
  misc_feature (11)..(262): Homolog of NCBI NO: 15233236 NR Description: hypothetical protein; protein id: At3g22000.1 thaliana] >gi|9279757|dbj|BAB01383.1| contains similarity to
  misc_feature (1)..(109): Homolog of NCBI NO: 9279754 NR Description: emb|CAB45833.1~gene_id:MZN24.15~similar to

SEQ ID NO: 72053 - protein, 254 aa, Arabidopsis thaliana; identical to SEQ ID NO: 71995
  peptide (1)..(254): Ceres Seq. ID no. 4916453
  misc_feature (189)..(243): Pfam Name: Domain of unknown function DUF26 Pfam Description: Domain of unknown function DUF26
  misc_feature (1)..(254): Homolog of NCBI NO: 15233366 NR Description: pollen coat receptor kinase, putative; protein At4g20670.1 [Arabidopsis thaliana] >gi|7485931|pir||T10609
  misc_feature (1)..(244): Homolog of NCBI NO: 15233235 NR Description: receptor kinase common family, putative; protein At3g21990.1 [Arabidopsis thaliana] >gi|9279756|dbj|BAB01382.1| similarity to receptor kinase~gene_id:MZN24.17 [Arabidopsis
  misc_feature (1)..(235): Homolog of NCBI NO: 15233364 NR Description: receptor kinase common family, 3' partial, protein id: At4g20650.1 [Arabidopsis thaliana]
  misc_feature (1)..(235): Homolog of NCBI NO: 18415518 NR Description: putative protein; protein id: At4g20530.1 thaliana] >gi|18415520|ref|NP_567604.1| putative protein; protein At4g20540.1 [Arabidopsis thaliana] >gi|18415522|ref|NP_567605.1|
  misc_feature (123)..(244): Homolog of NCBI NO: 15233231 NR Description: hypothetical protein; protein id: At3g21980.1
  misc_feature (1)..(98): Homolog of NCBI NO: 15233231 NR Description: hypothetical protein; protein id: At3g21980.1
  misc_feature (1)..(227): Homolog of NCBI NO: 9279755 NR Description: emb|CAB45833.1~gene_id:MZN24.16~similar to
  misc_feature (1)..(250): Homolog of NCBI NO: 15233368 NR Description: putative protein; protein id: At4g20680.1
  misc_feature (1)..(250): Homolog of NCBI NO: 15233236 NR Description: hypothetical protein; protein id: At3g22000.1 thaliana] >gi|9279757|dbj|BAB01383.1| contains similarity to
  misc_feature (1)..(97): Homolog of NCBI NO: 9279754 NR Description: emb|CAB45833.1~gene_id:MZN24.15~similar to

SEQ ID NO: 72054 - protein, 180 aa, Arabidopsis thaliana
  peptide (1)..(180): Ceres Seq. ID no. 4916454
  misc_feature (115)..(169): Pfam Name: Domain of unknown function DUF26 Pfam Description: Domain of unknown function DUF26
  misc_feature (1)..(180): Homolog of NCBI NO: 15233366 NR Description: pollen coat receptor kinase, putative; protein At4g20670.1 [Arabidopsis thaliana] >gi|7485931|pir||T10609
  misc_feature (1)..(170): Homolog of NCBI NO: 15233235 NR Description: receptor kinase common family, putative; protein At3g21990.1 [Arabidopsis thaliana] >gi|9279756|dbj|BAB01382.1| similarity to receptor kinase~gene_id:MZN24.17 [Arabidopsis
  misc_feature (1)..(161): Homolog of NCBI NO: 15233364 NR Description: receptor kinase common family, 3' partial, protein id: At4g20650.1 [Arabidopsis thaliana]
  misc_feature (1)..(161): Homolog of NCBI NO: 18415518 NR Description: putative protein; protein id: At4g20530.1 thaliana] >gi|18415520|ref|NP_567604.1| putative protein; protein At4g20540.1 [Arabidopsis thaliana] >gi|18415522|ref|NP_567605.1|
  misc_feature (49)..(170): Homolog of NCBI NO: 15233231 NR Description: hypothetical protein; protein id: At3g21980.1
  misc_feature (1)..(24): Homolog of NCBI NO: 15233231 NR Description: hypothetical protein; protein id: At3g21980.1
  misc_feature (1)..(153): Homolog of NCBI NO: 9279755 NR Description: emb|CAB45833.1~gene_id:MZN24.16~similar to
  misc_feature (1)..(176): Homolog of NCBI NO: 15233368 NR Description: putative protein; protein id: At4g20680.1
  misc_feature (1)..(176): Homolog of NCBI NO: 15233236 NR Description: hypothetical protein; protein id: At3g22000.1 thaliana] >gi|9279757|dbj|BAB01383.1| contains similarity to
  misc_feature (1)..(23): Homolog of NCBI NO: 9279754 NR Description: emb|CAB45833.1~gene_id:MZN24.15~similar to
MFQCRGDSYWSKCPPCISTAVSGLRRRCPRNKGAIIWYDQCLLKISSVASFNKIDYENDFYLSNPNNMSDRGLFNKETSALLEKLAYKASDRNNLDGKQLVLYAAGEKRIGTKKVYAMVQCTKDLIFTKCFECLEGILRKFPQCCDGKRGGRVFGTSCNFRYELYPFLRNYSNSTMRAPY

SEQ ID NO: 72055 - DNA, 1485 bp, Arabidopsis thaliana
  misc_feature (1)..(1485): Ceres Seq. ID no. 4916626
  misc_feature: MA Experiment ID: 20000171 Result: Up-regulated in Transcription
  misc_feature: MA Experiment 20000171 PARAMETER Experiment Name: At_42deg_Heat_P Parameter: Age (day) Value: 14
  misc_feature: MA Experiment 20000171 PARAMETER Experiment Name: At_42deg_Heat_P Parameter: Organism Value: A. thaliana
  misc_feature: MA Experiment 20000171 PARAMETER Experiment Name: At_42deg_Heat_P Parameter: Plant Line Value: WS
  misc_feature: MA Experiment 20000171 PARAMETER Experiment Name: At_42deg_Heat_P Parameter: Temperature (deg C) Value: 42 vs. 22
  misc_feature: MA Experiment 20000171 PARAMETER Experiment Name: At_42deg_Heat_P Parameter: Timepoint (hr) Value: 1
  misc_feature: MA Experiment 20000171 PARAMETER Experiment Name: At_42deg_Heat_P Parameter: Tissue Value: Aerial
atgtttccttcaatatccaatatctctttatcaccatcgtcgctgtttacagcgtacgcgtccttaaccggattcttgatgctctttagatcactgttcaatgatgaagtaccggagaggctccgatcatacatcaccgacttactcaaccggtttttcactccgaaatcaaagaatttgactatggttatcgacgagatcatcggatttaagaggaaccaagtgttcgacgcggcagaggtgtacctccggaacaaaatcggacccgagacagcccgtttacgagtaggtaaactccctaagcagaagcacttcacaatctatatcgagaaaggagaagagatcttggatactttcgagaatagcgagctgagatggacttatgttgaatcagagaacgaggcaagccaaaaagagaaacgttactacgagctcacgttcgagaagaagcttagagataaagtcatgaactcttatttgagccacgttgtagctgaatctgaggagactaagagggatctgagagcggtgaagctttatagccgagatgtgcgtgcgagcaaagatgatgacggaatggctggtgccggttggggatgtatcaatcttgagcatccatcgacattcgaaacattggcaatggacccgggtgcgaagaagaagataatcgatgatatggagaggtttttgaagagaagagagttttacaaaagagttggtaaagcttggaaacgaggttacttgttgtatgggccaccaggaactggtaaatctagtttgattgctgccatggcgaattatcttaagtttgatgtgtttgatcttgagcttagtagtatttatgaaaatgctcaactaaagagcatcttgttatcaaccacgaaccgttcgattttggttattgaggatatcgattgtagtagtgccgaggtggtagacagggaagctgatgagtatcaagaatacgaagaaggttattatggaagggtgactctatcagggcttttgaatttcgttgatgggttgtggtcaagttttggggatgagagaatcattgtgttcacgacgaatcacaaagaacggcttgaccctgctctgttacgtcctggaagaatggatatgcatatcaacatgtcttactgtacaggtttagggtttaggacattggtctctaattacctcggtttaggtggcttaaaccatcctctttgcgaggaaatcgaggcgctgatcgattccactgaggtgactccggctgagttagctgaagagttgatgcaagaagatgatactgatgttgtccttcgtggagtagttagctttgttgagaatagaaaggtcgagataagcaaaaccaaggagctggaaggttctacttgtagaaaacttgatggtgacgataaacacaatgtttcttctaccaatgatttgaagaagacgaagaagaagaagaaaggtggaaaaggaaaagcgaaaggaaactag

SEQ ID NO: 72056 - protein, 494 aa, Arabidopsis thaliana
  peptide (1)..(494): Ceres Seq. ID no. 4916627
  misc_feature (246)..(376): Pfam Name: ATPase family associated with various cellular Pfam Description: ATPase family associated with various cellular
  misc_feature (1)..(494): Homolog of NCBI NO: 25411838 NR Description: probable AAA-type ATPase [imported] - Arabidopsis
  misc_feature (1)..(494): Homolog of NCBI NO: 30680264 NR Description: AAA-type ATPase family [Arabidopsis thaliana]
  misc_feature (1)..(493): Homolog of NCBI NO: 25411838 NR Description: probable AAA-type ATPase [imported] - Arabidopsis
  misc_feature (1)..(493): Homolog of NCBI NO: 30680274 NR Description: AAA-type ATPase family [Arabidopsis thaliana]
  misc_feature (4)..(453): Homolog of NCBI NO: 30693380 NR Description: AAA-type ATPase family [Arabidopsis thaliana]
  misc_feature (4)..(453): Homolog of NCBI NO: 39104562 NR Description: putative BCS1 protein [Arabidopsis thaliana]
  misc_feature (4)..(318): Homolog of NCBI NO: 7485704 NR Description: hypothetical protein F18B3.220 - Arabidopsis >gi|4835245|emb|CAB42923.1| putative mitochondrial protein
  misc_feature (329)..(453): Homolog of NCBI NO: 7485704 NR Description: hypothetical protein F18B3.220 - Arabidopsis >gi|4835245|emb|CAB42923.1| putative mitochondrial protein
  misc_feature (6)..(453): Homolog of NCBI NO: 21592769 NR Description: BCS1 protein-like protein [Arabidopsis thaliana]
  misc_feature (6)..(453): Homolog of NCBI NO: 7485703 NR Description: hypothetical protein F18B3.210 - Arabidopsis >gi|4835244|emb|CAB42922.1| putative mitochondrial protein thaliana] >gi|13877697|gb|AAK43926.1|AF370607_1 putative
MFPSISNISLSPSSLFTAYASLTGFLMLFRSLFNDEVPERLRSYITDLLNRFFTPKSKNLTMVIDEIIGFKRNQVFDAAEVYLRNKIGPETARLRVGKLPKQKHFTIYIEKGEEILDTFENSELRWTYVESENEASQKEKRYYELTFEKKLRDKVMNSYLSHVVAESEETKRDLRAVKLYSRDVRASKDDDGMAGAGWGCINLEHPSTFETLAMDPGAKKKIIDDMERFLKRREFYKRVGKAWKRGYLLYGPPGTGKSSLIAAMANYLKFDVFDLELSSIYENAQLKSILLSTTNRSILVIEDIDCSSAEVVDREADEYQEYEEGYYGRVTLSGLLNFVDGLWSSFGDERIIVFTTNHKERLDPALLRPGRMDMHINMSYCTGLGFRTLVSNYLGLGGLNHPLCEEIEALIDSTEVTPAELAEELMQEDDTDVVLRGVVSFVENRKVEISKTKELEGSTCRKLDGDDKHNVSSTNDLKKTKKKKKGGKGKAKGN

SEQ ID NO: 72057 - protein, 468 aa, Arabidopsis thaliana
  peptide (1)..(468): Ceres Seq. ID no. 4916628
  misc_feature (220)..(350): Pfam Name: ATPase family associated with various cellular Pfam Description: ATPase family associated with various cellular
  misc_feature (1)..(468): Homolog of NCBI NO: 25411838 NR Description: probable AAA-type ATPase [imported] - Arabidopsis
  misc_feature (1)..(468): Homolog of NCBI NO: 30680264 NR Description: AAA-type ATPase family [Arabidopsis thaliana]
  misc_feature (1)..(467): Homolog of NCBI NO: 25411838 NR Description: probable AAA-type ATPase [imported] - Arabidopsis
  misc_feature (1)..(467): Homolog of NCBI NO: 30680274 NR Description: AAA-type ATPase family [Arabidopsis thaliana]
  misc_feature (1)..(427): Homolog of NCBI NO: 30693380 NR Description: AAA-type ATPase family [Arabidopsis thaliana]
  misc_feature (1)..(427): Homolog of NCBI NO: 39104562 NR Description: putative BCS1 protein [Arabidopsis thaliana]
  misc_feature (1)..(292): Homolog of NCBI NO: 7485704 NR Description: hypothetical protein F18B3.220 - Arabidopsis >gi|4835245|emb|CAB42923.1| putative mitochondrial protein
  misc_feature (303)..(427): Homolog of NCBI NO: 7485704 NR Description: hypothetical protein F18B3.220 - Arabidopsis >gi|4835245|emb|CAB42923.1| putative mitochondrial protein
  misc_feature (1)..(427): Homolog of NCBI NO: 21592769 NR Description: BCS1 protein-like protein [Arabidopsis thaliana]
  misc_feature (1)..(427): Homolog of NCBI NO: 7485703 NR Description: hypothetical protein F18B3.210 - Arabidopsis >gi|4835244|emb|CAB42922.1| putative mitochondrial protein thaliana] >gi|13877697|gb|AAK43926.1|AF370607_1 putative
MLFRSLFNDEVPERLRSYITDLLNRFFTPKSKNLTMVIDEIIGFKRNQVFDAAEVYLRNKIGPETARLRVGKLPKQKHFTIYIEKGEEILDTFENSELRWTYVESENEASQKEKRYYELTFEKKLRDKVMNSYLSHVVAESEETKRDLRAVKLYSRDVRASKDDDGMAGAGWGCINLEHPSTFETLAMDPGAKKKIIDDMERFLKRREFYKRVGKAWKRGYLLYGPPGTGKSSLIAAMANYLKFDVFDLELSSIYENAQLKSILLSTTNRSILVIEDIDCSSAEVVDREADEYQEYEEGYYGRVTLSGLLNFVDGLWSSFGDERIIVFTTNHKERLDPALLRPGRMDMHINMSYCTGLGFRTLVSNYLGLGGLNHPLCEEIEALIDSTEVTPAELAEELMQEDDTDVVLRGVVSFVENRKVEISKTKELEGSTCRKLDGDDKHNVSSTNDLKKTKKKKKGGKGKAKGN

SEQ ID NO: 72058 - protein, 433 aa, Arabidopsis thaliana
  peptide (1)..(433): Ceres Seq. ID no. 4916629
  misc_feature (185)..(315): Pfam Name: ATPase family associated with various cellular Pfam Description: ATPase family associated with various cellular
  misc_feature (1)..(433): Homolog of NCBI NO: 25411838 NR Description: probable AAA-type ATPase [imported] - Arabidopsis
  misc_feature (1)..(433): Homolog of NCBI NO: 30680264 NR Description: AAA-type ATPase family [Arabidopsis thaliana]
  misc_feature (1)..(432): Homolog of NCBI NO: 25411838 NR Description: probable AAA-type ATPase [imported] - Arabidopsis
  misc_feature (1)..(432): Homolog of NCBI NO: 30680274 NR Description: AAA-type ATPase family [Arabidopsis thaliana]
  misc_feature (1)..(392): Homolog of NCBI NO: 30693380 NR Description: AAA-type ATPase family [Arabidopsis thaliana]
  misc_feature (1)..(392): Homolog of NCBI NO: 39104562 NR Description: putative BCS1 protein [Arabidopsis thaliana]
  misc_feature (1)..(257): Homolog of NCBI NO: 7485704 NR Description: hypothetical protein F18B3.220 - Arabidopsis >gi|4835245|emb|CAB42923.1| putative mitochondrial protein
  misc_feature (268)..(392): Homolog of NCBI NO: 7485704 NR Description: hypothetical protein F18B3.220 - Arabidopsis >gi|4835245|emb|CAB42923.1| putative mitochondrial protein
  misc_feature (1)..(392): Homolog of NCBI NO: 21592769 NR Description: BCS1 protein-like protein [Arabidopsis thaliana]
  misc_feature (1)..(392): Homolog of NCBI NO: 7485703 NR Description: hypothetical protein F18B3.210 - Arabidopsis >gi|4835244|emb|CAB42922.1| putative mitochondrial protein thaliana] >gi|13877697|gb|AAK43926.1|AF370607_1 putative
MVIDEIIGFKRNQVFDAAEVYLRNKIGPETARLRVGKLPKQKHFTIYIEKGEEILDTFENSELRWTYVESENEASQKEKRYYELTFEKKLRDKVMNSYLSHVVAESEETKRDLRAVKLYSRDVRASKDDDGMAGAGWGCINLEHPSTFETLAMDPGAKKKIIDDMERFLKRREFYKRVGKAWKRGYLLYGPPGTGKSSLIAAMANYLKFDVFDLELSSIYENAQLKSILLSTTNRSILVIEDIDCSSAEVVDREADEYQEYEEGYYGRVTLSGLLNFVDGLWSSFGDERIIVFTTNHKERLDPALLRPGRMDMHINMSYCTGLGFRTLVSNYLGLGGLNHPLCEEIEALIDSTEVTPAELAEELMQEDDTDVVLRGVVSFVENRKVEISKTKELEGSTCRKLDGDDKHNVSSTNDLKKTKKKKKGGKGKAKGN

SEQ ID NO: 72059 - DNA, 1632 bp, Arabidopsis thaliana
  misc_feature (1)..(1632): Ceres Seq. ID no. 4916724
  misc_feature: MA Experiment ID: 20000180 Result: Up-regulated in Transcription
  misc_feature: MA Experiment 20000180 PARAMETER Experiment Name: At_Germinating_Seeds_P Parameter: Age (hr) Value: 24 vs. 0
  misc_feature: MA Experiment 20000180 PARAMETER Experiment Name: At_Germinating_Seeds_P Parameter: Tissue Value: Germinating Seeds
  misc_feature: MA Experiment ID: 20000211 Result: Up-regulated in Transcription
  misc_feature: MA Experiment 20000211 PARAMETER Experiment Name: At_0.001percent_MeJA__P Parameter: Age (day) Value: 14
  misc_feature: MA Experiment 20000211 PARAMETER Experiment Name: At_0.001percent_MeJA__P Parameter: Organism Value: A. thaliana
  misc_feature: MA Experiment 20000211 PARAMETER Experiment Name: At_0.001percent_MeJA__P Parameter: Plant Line Value: WS
  misc_feature: MA Experiment 20000211 PARAMETER Experiment Name: At_0.001percent_MeJA__P Parameter: Timepoint (hr) Value: 1
  misc_feature: MA Experiment 20000211 PARAMETER Experiment Name: At_0.001percent_MeJA__P Parameter: Tissue Value: Aerial
  misc_feature: MA Experiment 20000211 PARAMETER Experiment Name: At_0.001percent_MeJA__P Parameter: Treatment Value: 0.001percent MeJA vs. No Treatment
  misc_feature: MA Experiment ID: 20000227 Result: Down-regulated in Transcription
  misc_feature: MA Experiment 20000227 PARAMETER Experiment Name: At_Root-Tips-vs-Tops_P Parameter: Tissue Value: Root Tips vs. Root Tops
  misc_feature: MA Experiment ID: 20000234 Result: Down-regulated in Transcription
  misc_feature: MA Experiment 20000234 PARAMETER Experiment Name: At_Siliques_P Parameter: Age (day) Value: 21
  misc_feature: MA Experiment 20000234 PARAMETER Experiment Name: At_Siliques_P Parameter: Organism Value: A. thaliana
  misc_feature: MA Experiment 20000234 PARAMETER Experiment Name: At_Siliques_P Parameter: Plant Line Value: WS
  misc_feature: MA Experiment 20000234 PARAMETER Experiment Name: At_Siliques_P Parameter: Tissue Value: Less Than 5mm Siliques vs. Whole Plant
  misc_feature: MA Experiment ID: 20000235 Result: Down-regulated in Transcription
  misc_feature: MA Experiment 20000235 PARAMETER Experiment Name: At_Siliques_P Parameter: Age (day) Value: 21
  misc_feature: MA Experiment 20000235 PARAMETER Experiment Name: At_Siliques_P Parameter: Organism Value: A. thaliana
  misc_feature: MA Experiment 20000235 PARAMETER Experiment Name: At_Siliques_P Parameter: Plant Line Value: WS
  misc_feature: MA Experiment 20000235 PARAMETER Experiment Name: At_Siliques_P Parameter: Tissue Value: 5-10mm Siliques vs. Whole Plant
  misc_feature: MA Experiment ID: 20000264 Result: Down-regulated in Transcription
  misc_feature: MA Experiment 20000264 PARAMETER Experiment Name: At_Open_Flower_P Parameter: Age (day) Value: 21
  misc_feature: MA Experiment 20000264 PARAMETER Experiment Name: At_Open_Flower_P Parameter: Plant Line Value: WS
  misc_feature: MA Experiment 20000264 PARAMETER Experiment Name: At_Open_Flower_P Parameter: Tissue Value: Open Flower vs. Whole Plant
  misc_feature: MA Experiment ID: 20000265 Result: Down-regulated in Transcription
  misc_feature: MA Experiment 20000265 PARAMETER Experiment Name: At_Open_Flower_P Parameter: Age (day) Value: 21
  misc_feature: MA Experiment 20000265 PARAMETER Experiment Name: At_Open_Flower_P Parameter: Plant Line Value: WS
  misc_feature: MA Experiment 20000265 PARAMETER Experiment Name: At_Open_Flower_P Parameter: Tissue Value: Closed Flower vs. Whole Plant
  misc_feature: MA Experiment ID: 20000286 Result: Down-regulated in Transcription
  misc_feature: MA Experiment 20000286 PARAMETER Experiment Name: At_Open_Flower_P Parameter: Age (day) Value: 21
  misc_feature: MA Experiment 20000286 PARAMETER Experiment Name: At_Open_Flower_P Parameter: Plant Line Value: WS
  misc_feature: MA Experiment 20000286 PARAMETER Experiment Name: At_Open_Flower_P Parameter: Tissue Value: Half Open vs. Whole Plant
  misc_feature: MA Experiment ID: 20000439 Result: Up-regulated in Transcription
  misc_feature: MA Experiment 20000439 PARAMETER Experiment Name: At_Roots__P Parameter: Age (day) Value: 14 vs. 21
  misc_feature: MA Experiment 20000439 PARAMETER Experiment Name: At_Roots__P Parameter: Organism Value: A. thaliana
  misc_feature: MA Experiment 20000439 PARAMETER Experiment Name: At_Roots__P Parameter: Tissue Value: Roots vs. Whole Plant
  misc_feature: MA Experiment ID: 20000445 Result: Down-regulated in Transcription
  misc_feature: MA Experiment 20000445 PARAMETER Experiment Name: At_100uM_NAA__P Parameter: Age (day) Value: 14
  misc_feature: MA Experiment 20000445 PARAMETER Experiment Name: At_100uM_NAA__P Parameter: Organism Value: A. thaliana
  misc_feature: MA Experiment 20000445 PARAMETER Experiment Name: At_100uM_NAA__P Parameter: Plant Line Value: WS
  misc_feature: MA Experiment 20000445 PARAMETER Experiment Name: At_100uM_NAA__P Parameter: Timepoint (hr) Value: 6
  misc_feature: MA Experiment 20000445 PARAMETER Experiment Name: At_100uM_NAA__P Parameter: Tissue Value: Aerial
  misc_feature: MA Experiment 20000445 PARAMETER Experiment Name: At_100uM_NAA__P Parameter: Treatment Value: 100uM NAA vs. No Treatment
  misc_feature: MA Experiment ID: 20000451 Result: Down-regulated in Transcription
  misc_feature: MA Experiment 20000451 PARAMETER Experiment Name: At_CS6879_Shoots-Roots_P Parameter: Age (day) Value: 14
  misc_feature: MA Experiment 20000451 PARAMETER Experiment Name: At_CS6879_Shoots-Roots_P Parameter: Organism Value: A. thaliana
  misc_feature: MA Experiment 20000451 PARAMETER Experiment Name: At_CS6879_Shoots-Roots_P Parameter: Plant Line Value: CS6879 vs. WS
  misc_feature: MA Experiment 20000451 PARAMETER Experiment Name: At_CS6879_Shoots-Roots_P Parameter: Tissue Value: Roots
  misc_feature: MA Experiment ID: 20000794 Result: Down-regulated in Transcription
  misc_feature: MA Experiment 20000794 PARAMETER Experiment Name: At_Petals_P Parameter: Age (day) Value: 23-25 days
  misc_feature: MA Experiment 20000794 PARAMETER Experiment Name: At_Petals_P Parameter: Plant Line Value: WS
  misc_feature: MA Experiment 20000794 PARAMETER Experiment Name: At_Petals_P Parameter: Tissue Value: Petals vs. Whole plant
  misc_feature: MA Experiment ID: 20001555 Result: Down-regulated in Transcription
  misc_feature: MA Experiment 20001555 PARAMETER Experiment Name: At_Drought_Soil_Dry_P Parameter: Age (day) Value: 24
  misc_feature: MA Experiment 20001555 PARAMETER Experiment Name: At_Drought_Soil_Dry_P Parameter: Organism Value: A. thaliana
  misc_feature: MA Experiment 20001555 PARAMETER Experiment Name: At_Drought_Soil_Dry_P Parameter: Plant Line Value: WS
  misc_feature: MA Experiment 20001555 PARAMETER Experiment Name: At_Drought_Soil_Dry_P Parameter: Post Timepoint (hr) Value: None
  misc_feature: MA Experiment 20001555 PARAMETER Experiment Name: At_Drought_Soil_Dry_P Parameter: Post-Treatment Value: None
  misc_feature: MA Experiment 20001555 PARAMETER Experiment Name: At_Drought_Soil_Dry_P Parameter: Timepoint (day) Value: 10
  misc_feature: MA Experiment 20001555 PARAMETER Experiment Name: At_Drought_Soil_Dry_P Parameter: Treatment Value: Drought vs. No Drought
  misc_feature: MA Experiment ID: 20001556 Result: Down-regulated in Transcription
  misc_feature: MA Experiment 20001556 PARAMETER Experiment Name: At_Drought_Soil_Dry_P Parameter: Age (day) Value: 26
  misc_feature: MA Experiment 20001556 PARAMETER Experiment Name: At_Drought_Soil_Dry_P Parameter: Organism Value: A. thaliana
  misc_feature: MA Experiment 20001556 PARAMETER Experiment Name: At_Drought_Soil_Dry_P Parameter: Plant Line Value: WS
  misc_feature: MA Experiment 20001556 PARAMETER Experiment Name: At_Drought_Soil_Dry_P Parameter: Post Timepoint (hr) Value: None
  misc_feature: MA Experiment 20001556 PARAMETER Experiment Name: At_Drought_Soil_Dry_P Parameter: Post-Treatment Value: None
  misc_feature: MA Experiment 20001556 PARAMETER Experiment Name: At_Drought_Soil_Dry_P Parameter: Timepoint (day) Value: 12
  misc_feature: MA Experiment 20001556 PARAMETER Experiment Name: At_Drought_Soil_Dry_P Parameter: Treatment Value: Drought vs. No Drought
  misc_feature: MA Experiment ID: 20001757 Result: Up-regulated in Transcription
  misc_feature: MA Experiment 20001757 PARAMETER Experiment Name: At_50mM_NH4NO3_L-to-H_P Parameter: Timepoint (hr) Value: 6
  misc_feature: MA Experiment 20001757 PARAMETER Experiment Name: At_50mM_NH4NO3_L-to-H_P Parameter: Tissue Value: Leaf
  misc_feature: MA Experiment 20001757 PARAMETER Experiment Name: At_50mM_NH4NO3_L-to-H_P Parameter: Treatment Value: 50mM NH4NO3 vs 100mM Mannitol
  misc_feature: MA Experiment ID: 20001904 Result: Down-regulated in Transcription
  misc_feature: MA Experiment 20001904 PARAMETER Experiment Name: At_Drought_Reproduction_P Parameter: Age (day) Value: 37
  misc_feature: MA Experiment 20001904 PARAMETER Experiment Name: At_Drought_Reproduction_P Parameter: Organism Value: A. thaliana
  misc_feature: MA Experiment 20001904 PARAMETER Experiment Name: At_Drought_Reproduction_P Parameter: Plant Line Value: WS
  misc_feature: MA Experiment 20001904 PARAMETER Experiment Name: At_Drought_Reproduction_P Parameter: Timepoint (day) Value: 7
  misc_feature: MA Experiment 20001904 PARAMETER Experiment Name: At_Drought_Reproduction_P Parameter: Tissue Value: Rosettes
  misc_feature: MA Experiment 20001904 PARAMETER Experiment Name: At_Drought_Reproduction_P Parameter: Treatment Value: Drought vs. No Drought
  misc_feature: MA Experiment ID: 20001905 Result: Down-regulated in Transcription
  misc_feature: MA Experiment 20001905 PARAMETER Experiment Name: At_Drought_Reproduction_P Parameter: Age (day) Value: 40
  misc_feature: MA Experiment 20001905 PARAMETER Experiment Name: At_Drought_Reproduction_P Parameter: Organism Value: A. thaliana
  misc_feature: MA Experiment 20001905 PARAMETER Experiment Name: At_Drought_Reproduction_P Parameter: Plant Line Value: WS
  misc_feature: MA Experiment 20001905 PARAMETER Experiment Name: At_Drought_Reproduction_P Parameter: Timepoint (day) Value: 10
  misc_feature: MA Experiment 20001905 PARAMETER Experiment Name: At_Drought_Reproduction_P Parameter: Tissue Value: Rosettes
  misc_feature: MA Experiment 20001905 PARAMETER Experiment Name: At_Drought_Reproduction_P Parameter: Treatment Value: Drought vs. No Drought
atggatactttagcttcaaactcttcggatctcacgaccaagtcaagtctcggaatgtcgtcgtttaccaacatgtatctcctcacaacgcttcaagcccttgcggccctttgcttcttgatgattctcaacaaaataaagtcatcttcacgaaacaagaagttgcatcctctcccgccaggacccaccggttttccaattgttggaatgattccggcgatgcttaaaaaccgtccagttttccggtggctccacagcctcatgaaggagcttaacacggagatagcttgtgtgcgtctaggaaacactcacgtgatccctgtgacatgtcctaagattgcacgtgagatcttcaagcaacaagacgcactctttgcgtcaagaccactcacttatgctcaaaagattctctctaacggctacaaaacctgcgtgatcacaccgtttggcgaacaattcaagaagatgaggaaagtgatcatgacagagattgtttgtccagcgagacaccgttggctacacgacaatagagctgaggaaaccgatcacttgaccgcttggctctacaacatggttaagaactctgaaccagtcgatctccgttttgttacgaggcattattgtggaaatgcaatcaagaggcttatgttcgggacgaggacgttctcggagaaaaccgaagccgatggtggaccgactttggaagatatcgagcatatggatgctatgttcgaggggttagggtttacgtttgcgttttgtatatcggattatctaccgatgcttacgggattggatctaaacggacatgaaaagattatgagagaatccagtgcaattatggataaatatcacgatcctataattgatgagaggattaagatgtggagagaaggtaagagaactcagatcgaagattttctagacattttcatctctatcaaggacgaagctggccagcctttgcttaccgctgatgaaatcaaaccaaccattaaggaacttgtaatggcggcgccagacaacccatcaaacgccgtggaatgggccattgcggagatgataaacaaaccggagatcctccacaaagctatggaagagatcgatagagtcgtcggaaaagaaagattcgtccaagaatccgatataccaaaacttaactatgttaaagctattatccgagaagctttccgtcttcatcccgtcgccgccttcaacctcccacacgtggcactctctgatacgaccgtcgcaggttaccatattcctaaaggaagtcaagttttacttagccgttacggtcttggtcgtaaccccaaggtttggtctgatccacttagcttcaaaccagaaaggcatctcaatgagtgttcggaagtgactttgacggagaatgatctccgttttatctcgtttagtaccggaaagagaggatgtgctgctccggcgttaggtacggcgataacgaccatgatgctagcgaggcttttgcaagggtttaagtggaaactagcaggaagtgagacacgtgtcgagcttatggaatcgagtcatgatatgtttctttcgaagcctttggtgttggtcggagaattgagattgtcggaggacctttacccaatggtgaagtga

SEQ ID NO: 72060 - protein, 543 aa, Arabidopsis thaliana; identical to SEQ ID NO: 70305
  peptide (1)..(543): Ceres Seq. ID no. 4916725
  misc_feature (59)..(532): Pfam Name: Cytochrome P450 Pfam Description: Cytochrome P450
  misc_feature (1)..(543): Homolog of NCBI NO: 15227187 NR Description: putative cytochrome P450; protein id: At2g22330.1
  misc_feature (1)..(543): Homolog of NCBI NO: 25991347 NR Description: cytochrome P450 [Brassica napus]
  misc_feature (1)..(543): Homolog of NCBI NO: 15236088 NR Description: cytochrome P450 - like protein; protein id: supported by cDNA: gi_15028134, supported by cDNA: gi_20259280
  misc_feature (1)..(543): Homolog of NCBI NO: 5915824 NR Description: Cytochrome P450 79B1 >gi|3283433|gb|AAD03415.1|
  misc_feature (162)..(543): Homolog of NCBI NO: 11357242 NR Description: cytochrome P450 [imported] - Arabidopsis thaliana
  misc_feature (57)..(542): Homolog of NCBI NO: 5915822 NR Description: CYTOCHROME P450 79A1 (CYTOCHROME P450TYR)
  misc_feature (4)..(540): Homolog of NCBI NO: 6739527 NR Description: N-hydroxylating cytochrome P450 [Manihot
  misc_feature (4)..(540): Homolog of NCBI NO: 6739530 NR Description: N-hydroxylating cytochrome P450 [Manihot
  misc_feature (31)..(540): Homolog of NCBI NO: 13878375 NR Description: Cytochrome P450 79A2 >gi|10176738|dbj|BAB09969.1|
  misc_feature (31)..(540): Homolog of NCBI NO: 18414836 NR Description: cytochrome P450 CYP79A2; protein id: At5g05260.1, by cDNA: gi_7839382 [Arabidopsis thaliana]

SEQ ID NO: 72061 - protein, 525 aa, Arabidopsis thaliana; identical to SEQ ID NO: 70306
  peptide (1)..(525): Ceres Seq. ID no. 4916726
  misc_feature (41)..(514): Pfam Name: Cytochrome P450 Pfam Description: Cytochrome P450
  misc_feature (1)..(525): Homolog of NCBI NO: 15227187 NR Description: putative cytochrome P450; protein id: At2g22330.1
  misc_feature (1)..(525): Homolog of NCBI NO: 25991347 NR Description: cytochrome P450 [Brassica napus]
  misc_feature (1)..(525): Homolog of NCBI NO: 15236088 NR Description: cytochrome P450 - like protein; protein id: supported by cDNA: gi_15028134, supported by cDNA: gi_20259280
  misc_feature (1)..(525): Homolog of NCBI NO: 5915824 NR Description: Cytochrome P450 79B1 >gi|3283433|gb|AAD03415.1|
  misc_feature (144)..(525): Homolog of NCBI NO: 11357242 NR Description: cytochrome P450 [imported] - Arabidopsis thaliana
  misc_feature (39)..(524): Homolog of NCBI NO: 5915822 NR Description: CYTOCHROME P450 79A1 (CYTOCHROME P450TYR)
  misc_feature (1)..(522): Homolog of NCBI NO: 6739527 NR Description: N-hydroxylating cytochrome P450 [Manihot
  misc_feature (1)..(522): Homolog of NCBI NO: 6739530 NR Description: N-hydroxylating cytochrome P450 [Manihot
  misc_feature (13)..(522): Homolog of NCBI NO: 13878375 NR Description: Cytochrome P450 79A2 >gi|10176738|dbj|BAB09969.1|
  misc_feature (13)..(522): Homolog of NCBI NO: 18414836 NR Description: cytochrome P450 CYP79A2; protein id: At5g05260.1, by cDNA: gi_7839382 [Arabidopsis thaliana]

SEQ ID NO: 72062 - protein, 519 aa, Arabidopsis thaliana
  peptide (1)..(519): Ceres Seq. ID no. 4916727
  misc_feature (35)..(508): Pfam Name: Cytochrome P450 Pfam Description: Cytochrome P450
  misc_feature (1)..(519): Homolog of NCBI NO: 15227187 NR Description: putative cytochrome P450; protein id: At2g22330.1
  misc_feature (1)..(519): Homolog of NCBI NO: 25991347 NR Description: cytochrome P450 [Brassica napus]
  misc_feature (1)..(519): Homolog of NCBI NO: 15236088 NR Description: cytochrome P450 - like protein; protein id: supported by cDNA: gi_15028134, supported by cDNA: gi_20259280
  misc_feature (1)..(519): Homolog of NCBI NO: 5915824 NR Description: Cytochrome P450 79B1 >gi|3283433|gb|AAD03415.1|
  misc_feature (138)..(519): Homolog of NCBI NO: 11357242 NR Description: cytochrome P450 [imported] - Arabidopsis thaliana
  misc_feature (33)..(518): Homolog of NCBI NO: 5915822 NR Description: CYTOCHROME P450 79A1 (CYTOCHROME P450TYR)
  misc_feature (1)..(516): Homolog of NCBI NO: 6739527 NR Description: N-hydroxylating cytochrome P450 [Manihot
  misc_feature (1)..(516): Homolog of NCBI NO: 6739530 NR Description: N-hydroxylating cytochrome P450 [Manihot
  misc_feature (7)..(516): Homolog of NCBI NO: 13878375 NR Description: Cytochrome P450 79A2 >gi|10176738|dbj|BAB09969.1|
  misc_feature (7)..(516): Homolog of NCBI NO: 18414836 NR Description: cytochrome P450 CYP79A2; protein id: At5g05260.1, by cDNA: gi_7839382 [Arabidopsis thaliana]
MYLLTTLQALAALCFLMILNKIKSSSRNKKLHPLPPGPTGFPIVGMIPAMLKNRPVFRWLHSLMKELNTEIACVRLGNTHVIPVTCPKIAREIFKQQDALFASRPLTYAQKILSNGYKTCVITPFGEQFKKMRKVIMTEIVCPARHRWLHDNRAEETDHLTAWLYNMVKNSEPVDLRFVTRHYCGNAIKRLMFGTRTFSEKTEADGGPTLEDIEHMDAMFEGLGFTFAFCISDYLPMLTGLDLNGHEKIMRESSAIMDKYHDPIIDERIKMWREGKRTQIEDFLDIFISIKDEAGQPLLTADEIKPTIKELVMAAPDNPSNAVEWAIAEMINKPEILHKAMEEIDRVVGKERFVQESDIPKLNYVKAIIREAFRLHPVAAFNLPHVALSDTTVAGYHIPKGSQVLLSRYGLGRNPKVWSDPLSFKPERHLNECSEVTLTENDLRFISFSTGKRGCAAPALGTAITTMMLARLLQGFKWKLAGSETRVELMESSHDMFLSKPLVLVGELRLSEDLYPMVK

SEQ ID NO: 72063 - DNA, 543 bp, Arabidopsis thaliana
  misc_feature (1)..(543): Ceres Seq. ID no. 4916807
  misc_feature: MA Experiment ID: 20000171 Result: Down-regulated in Transcription
  misc_feature: MA Experiment 20000171 PARAMETER Experiment Name: At_42deg_Heat_P Parameter: Age (day) Value: 14
  misc_feature: MA Experiment 20000171 PARAMETER Experiment Name: At_42deg_Heat_P Parameter: Organism Value: A. thaliana
  misc_feature: MA Experiment 20000171 PARAMETER Experiment Name: At_42deg_Heat_P Parameter: Plant Line Value: WS
  misc_feature: MA Experiment 20000171 PARAMETER Experiment Name: At_42deg_Heat_P Parameter: Temperature (deg C) Value: 42 vs. 22
  misc_feature: MA Experiment 20000171 PARAMETER Experiment Name: At_42deg_Heat_P Parameter: Timepoint (hr) Value: 1
  misc_feature: MA Experiment 20000171 PARAMETER Experiment Name: At_42deg_Heat_P Parameter: Tissue Value: Aerial
  misc_feature: MA Experiment ID: 20000173 Result: Down-regulated in Transcription
  misc_feature: MA Experiment 20000173 PARAMETER Experiment Name: At_42deg_Heat_P Parameter: Age (day) Value: 14
  misc_feature: MA Experiment 20000173 PARAMETER Experiment Name: At_42deg_Heat_P Parameter: Organism Value: A. thaliana
  misc_feature: MA Experiment 20000173 PARAMETER Experiment Name: At_42deg_Heat_P Parameter: Plant Line Value: WS
  misc_feature: MA Experiment 20000173 PARAMETER Experiment Name: At_42deg_Heat_P Parameter: Temperature (deg C) Value: 42 vs. 22
  misc_feature: MA Experiment 20000173 PARAMETER Experiment Name: At_42deg_Heat_P Parameter: Timepoint (hr) Value: 6
  misc_feature: MA Experiment 20000173 PARAMETER Experiment Name: At_42deg_Heat_P Parameter: Tissue Value: Aerial
  misc_feature: MA Experiment ID: 20000235 Result: Up-regulated in Transcription
  misc_feature: MA Experiment 20000235 PARAMETER Experiment Name: At_Siliques_P Parameter: Age (day) Value: 21
  misc_feature: MA Experiment 20000235 PARAMETER Experiment Name: At_Siliques_P Parameter: Organism Value: A. thaliana
  misc_feature: MA Experiment 20000235 PARAMETER Experiment Name: At_Siliques_P Parameter: Plant Line Value: WS
  misc_feature: MA Experiment 20000235 PARAMETER Experiment Name: At_Siliques_P Parameter: Tissue Value: 5-10mm Siliques vs. Whole Plant
  misc_feature: MA Experiment ID: 20000496 Result: Up-regulated in Transcription
  misc_feature: MA Experiment 20000496 PARAMETER Experiment Name: At_Guard_Cells_P Parameter: Harvest Date Value: 7/19/2002
  misc_feature: MA Experiment 20000496 PARAMETER Experiment Name: At_Guard_Cells_P Parameter: Organism Value: Canola
  misc_feature: MA Experiment 20000496 PARAMETER Experiment Name: At_Guard_Cells_P Parameter: Tissue Value: Guard Cells vs. Leaves
atgcttcagcttgaggccttttcactagccttagagaagctagatgcagacgtccctagacccaagctccaatttgtgggaagttgtagaaacaattcagatgaagaacgtctgcagaaattgaaagacagagcagtggaactaaaagtagatggagacgtgcaattctataaaaatgccatgtacagagaactagtggaactgttaggaaatgcagttgcaggactgcatgggatgatagatgaacactttggtataagtgttgttgagtacatggctgctggtgcaatcccaatagctcacaactcagctggacctaaaatggacattgtgttggaagaagacggacaaaaaaccgggtttcttgctgagactgtggaggaatacgctgaagcgatccttgagattgtgaagatgaatgaaacagagaggcttaaaatggctgaatctgctagaaaacgagcggcaaggttctctgaacaacggttttgtgaggacttcaaaactgcgattcgacccattttcacaggtcctcttaaatga

SEQ ID NO: 72064 - protein, 180 aa, Arabidopsis thaliana
  peptide (1)..(180): Ceres Seq. ID no. 4916808
  misc_feature (1)..(154): Pfam Name: Glycosyl transferases group 1 Pfam Description: Glycosyl transferases group 1
  misc_feature (1)..(180): Homolog of NCBI NO: 4587993 NR Description: hypothetical protein [Arabidopsis thaliana]
  misc_feature (1)..(180): Homolog of NCBI NO: 15225657 NR Description: unknown protein; protein id: At2g40190.1
  misc_feature (2)..(175): Homolog of NCBI NO: 39795589 NR Description: Unknown (protein for MGC:76133) [Silurana
  misc_feature (2)..(176): Homolog of NCBI NO: 34147157 NR Description: hypothetical protein B230397C21 [Mus musculus]
  misc_feature (2)..(176): Homolog of NCBI NO: 38181472 NR Description: Unknown (protein for MGC:67180) [Mus musculus]
  misc_feature (2)..(176): Homolog of NCBI NO: 34879128 NR Description: similar to CG11306-PA [Rattus norvegicus]
  misc_feature (2)..(176): Homolog of NCBI NO: 28374203 NR Description: Unknown (protein for IMAGE:2601678) [Danio rerio]
  misc_feature (22)..(176): Homolog of NCBI NO: 21358031 NR Description: CG11306-PA [Drosophila melanogaster]
  misc_feature (2)..(163): Homolog of NCBI NO: 39581396 NR Description: Hypothetical protein CBG15348 [Caenorhabditis
  misc_feature (4)..(167): Homolog of NCBI NO: 19075208 NR Description: putative glycosyl transferase
MLQLEAFSLALEKLDADVPRPKLQFVGSCRNNSDEERLQKLKDRAVELKVDGDVQFYKNAMYRELVELLGNAVAGLHGMIDEHFGISVVEYMAAGAIPIAHNSAGPKMDIVLEEDGQKTGFLAETVEEYAEAILEIVKMNETERLKMAESARKRAARFSEQRFCEDFKTAIRPIFTGPLK

SEQ ID NO: 72065 - protein, 120 aa, Arabidopsis thaliana
  peptide (1)..(120): Ceres Seq. ID no. 4916809
  misc_feature (1)..(94): Pfam Name: Glycosyl transferases group 1 Pfam Description: Glycosyl transferases group 1
  misc_feature (1)..(120): Homolog of NCBI NO: 4587993 NR Description: hypothetical protein [Arabidopsis thaliana]
  misc_feature (1)..(120): Homolog of NCBI NO: 15225657 NR Description: unknown protein; protein id: At2g40190.1
  misc_feature (1)..(115): Homolog of NCBI NO: 39795589 NR Description: Unknown (protein for MGC:76133) [Silurana
  misc_feature (1)..(116): Homolog of NCBI NO: 34147157 NR Description: hypothetical protein B230397C21 [Mus musculus]
  misc_feature (1)..(116): Homolog of NCBI NO: 38181472 NR Description: Unknown (protein for MGC:67180) [Mus musculus]
  misc_feature (1)..(116): Homolog of NCBI NO: 34879128 NR Description: similar to CG11306-PA [Rattus norvegicus]
  misc_feature (1)..(116): Homolog of NCBI NO: 28374203 NR Description: Unknown (protein for IMAGE:2601678) [Danio rerio]
  misc_feature (1)..(116): Homolog of NCBI NO: 21358031 NR Description: CG11306-PA [Drosophila melanogaster]
  misc_feature (1)..(103): Homolog of NCBI NO: 39581396 NR Description: Hypothetical protein CBG15348 [Caenorhabditis
  misc_feature (1)..(107): Homolog of NCBI NO: 19075208 NR Description: putative glycosyl transferase
MYRELVELLGNAVAGLHGMIDEHFGISVVEYMAAGAIPIAHNSAGPKMDIVLEEDGQKTGFLAETVEEYAEAILEIVKMNETERLKMAESARKRAARFSEQRFCEDFKTAIRPIFTGPLK

SEQ ID NO: 72066 - protein, 102 aa, Arabidopsis thaliana
  peptide (1)..(102): Ceres Seq. ID no. 4916810
  misc_feature (1)..(76): Pfam Name: Glycosyl transferases group 1 Pfam Description: Glycosyl transferases group 1
  misc_feature (1)..(102): Homolog of NCBI NO: 4587993 NR Description: hypothetical protein [Arabidopsis thaliana]
  misc_feature (1)..(102): Homolog of NCBI NO: 15225657 NR Description: unknown protein; protein id: At2g40190.1
  misc_feature (1)..(97): Homolog of NCBI NO: 39795589 NR Description: Unknown (protein for MGC:76133) [Silurana
  misc_feature (1)..(98): Homolog of NCBI NO: 34147157 NR Description: hypothetical protein B230397C21 [Mus musculus]
  misc_feature (1)..(98): Homolog of NCBI NO: 38181472 NR Description: Unknown (protein for MGC:67180) [Mus musculus]
  misc_feature (1)..(98): Homolog of NCBI NO: 34879128 NR Description: similar to CG11306-PA [Rattus norvegicus]
  misc_feature (1)..(98): Homolog of NCBI NO: 28374203 NR Description: Unknown (protein for IMAGE:2601678) [Danio rerio]
  misc_feature (1)..(98): Homolog of NCBI NO: 21358031 NR Description: CG11306-PA [Drosophila melanogaster]
  misc_feature (1)..(85): Homolog of NCBI NO: 39581396 NR Description: Hypothetical protein CBG15348 [Caenorhabditis
  misc_feature (1)..(89): Homolog of NCBI NO: 19075208 NR Description: putative glycosyl transferase
MIDEHFGISVVEYMAAGAIPIAHNSAGPKMDIVLEEDGQKTGFLAETVEEYAEAILEIVKMNETERLKMAESARKRAARFSEQRFCEDFKTAIRPIFTGPLK

SEQ ID NO: 72067 - DNA, 1095 bp, Arabidopsis thaliana
  misc_feature (1)..(1095): Ceres Seq. ID no. 4916967
  misc_feature: MA Experiment ID: 20000169 Result: Up-regulated in Transcription
  misc_feature: MA Experiment 20000169 PARAMETER Experiment Name: At_100uM_ABA_P Parameter: Age (day) Value: 14
  misc_feature: MA Experiment 20000169 PARAMETER Experiment Name: At_100uM_ABA_P Parameter: Organism Value: A. thaliana
  misc_feature: MA Experiment 20000169 PARAMETER Experiment Name: At_100uM_ABA_P Parameter: Plant Line Value: WS
  misc_feature: MA Experiment 20000169 PARAMETER Experiment Name: At_100uM_ABA_P Parameter: Timepoint (hr) Value: 6
  misc_feature: MA Experiment 20000169 PARAMETER Experiment Name: At_100uM_ABA_P Parameter: Tissue Value: Aerial
  misc_feature: MA Experiment 20000169 PARAMETER Experiment Name: At_100uM_ABA_P Parameter: Treatment Value: 100uM ABA vs. No Treatment
  misc_feature: MA Experiment ID: 20000184 Result: Down-regulated in Transcription
  misc_feature: MA Experiment 20000184 PARAMETER Experiment Name: At_Shoots__P Parameter: Age (day) Value: 7
  misc_feature: MA Experiment 20000184 PARAMETER Experiment Name: At_Shoots__P Parameter: Tissue Value: Shoots vs. Whole Plant
  misc_feature: MA Experiment ID: 20000185 Result: Up-regulated in Transcription
  misc_feature: MA Experiment 20000185 PARAMETER Experiment Name: At_Roots__P Parameter: Age (day) Value: 7 vs. 21
  misc_feature: MA Experiment 20000185 PARAMETER Experiment Name: At_Roots__P Parameter: Organism Value: A. thaliana
  misc_feature: MA Experiment 20000185 PARAMETER Experiment Name: At_Roots__P Parameter: Tissue Value: Roots vs. Whole Plant
  misc_feature: MA Experiment ID: 20000227 Result: Down-regulated in Transcription
  misc_feature: MA Experiment 20000227 PARAMETER Experiment Name: At_Root-Tips-vs-Tops_P Parameter: Tissue Value: Root Tips vs. Root Tops
  misc_feature: MA Experiment ID: 20000234 Result: Down-regulated in Transcription
  misc_feature: MA Experiment 20000234 PARAMETER Experiment Name: At_Siliques_P Parameter: Age (day) Value: 21
  misc_feature: MA Experiment 20000234 PARAMETER Experiment Name: At_Siliques_P Parameter: Organism Value: A. thaliana
  misc_feature: MA Experiment 20000234 PARAMETER Experiment Name: At_Siliques_P Parameter: Plant Line Value: WS
  misc_feature: MA Experiment 20000234 PARAMETER Experiment Name: At_Siliques_P Parameter: Tissue Value: Less Than 5mm Siliques vs. Whole Plant
  misc_feature: MA Experiment ID: 20000265 Result: Up-regulated in Transcription
  misc_feature: MA Experiment 20000265 PARAMETER Experiment Name: At_Open_Flower_P Parameter: Age (day) Value: 21
  misc_feature: MA Experiment 20000265 PARAMETER Experiment Name: At_Open_Flower_P Parameter: Plant Line Value: WS
  misc_feature: MA Experiment 20000265 PARAMETER Experiment Name: At_Open_Flower_P Parameter: Tissue Value: Closed Flower vs. Whole Plant
  misc_feature: MA Experiment ID: 20000269 Result: Down-regulated in Transcription
  misc_feature: MA Experiment 20000269 PARAMETER Experiment Name: At_1mM_KNO3_L-vs-H_Roots_P Parameter: Age (day) Value: 7,10,12
  misc_feature: MA Experiment 20000269 PARAMETER Experiment Name: At_1mM_KNO3_L-vs-H_Roots_P Parameter: Organism Value: A. thaliana
  misc_feature: MA Experiment 20000269 PARAMETER Experiment Name: At_1mM_KNO3_L-vs-H_Roots_P Parameter: Plant Line Value: WS
  misc_feature: MA Experiment 20000269 PARAMETER Experiment Name: At_1mM_KNO3_L-vs-H_Roots_P Parameter: Timepoint (day) Value: 7,10,12
  misc_feature: MA Experiment 20000269 PARAMETER Experiment Name: At_1mM_KNO3_L-vs-H_Roots_P Parameter: Tissue Value: Roots
  misc_feature: MA Experiment 20000269 PARAMETER Experiment Name: At_1mM_KNO3_L-vs-H_Roots_P Parameter: Treatment Value: 1mM KNO3 vs. 50mM KNO3
  misc_feature: MA Experiment ID: 20000286 Result: Up-regulated in Transcription
  misc_feature: MA Experiment 20000286 PARAMETER Experiment Name: At_Open_Flower_P Parameter: Age (day) Value: 21
  misc_feature: MA Experiment 20000286 PARAMETER Experiment Name: At_Open_Flower_P Parameter: Plant Line Value: WS
  misc_feature: MA Experiment 20000286 PARAMETER Experiment Name: At_Open_Flower_P Parameter: Tissue Value: Half Open vs. Whole Plant
  misc_feature: MA Experiment ID: 20000438 Result: Down-regulated in Transcription
  misc_feature: MA Experiment 20000438 PARAMETER Experiment Name: At_Shoots__P Parameter: Age (day) Value: 14
  misc_feature: MA Experiment 20000438 PARAMETER Experiment Name: At_Shoots__P Parameter: Tissue Value: Shoots vs. Whole Plant
  misc_feature: MA Experiment ID: 20000439 Result: Up-regulated in Transcription
  misc_feature: MA Experiment 20000439 PARAMETER Experiment Name: At_Roots__P Parameter: Age (day) Value: 14 vs. 21
  misc_feature: MA Experiment 20000439 PARAMETER Experiment Name: At_Roots__P Parameter: Organism Value: A. thaliana
  misc_feature: MA Experiment 20000439 PARAMETER Experiment Name: At_Roots__P Parameter: Tissue Value: Roots vs. Whole Plant
  misc_feature: MA Experiment ID: 20000451 Result: Down-regulated in Transcription
  misc_feature: MA Experiment 20000451 PARAMETER Experiment Name: At_CS6879_Shoots-Roots_P Parameter: Age (day) Value: 14
  misc_feature: MA Experiment 20000451 PARAMETER Experiment Name: At_CS6879_Shoots-Roots_P Parameter: Organism Value: A. thaliana
  misc_feature: MA Experiment 20000451 PARAMETER Experiment Name: At_CS6879_Shoots-Roots_P Parameter: Plant Line Value: CS6879 vs. WS
  misc_feature: MA Experiment 20000451 PARAMETER Experiment Name: At_CS6879_Shoots-Roots_P Parameter: Tissue Value: Roots
  misc_feature: MA Experiment ID: 20000453 Result: Up-regulated in Transcription
  misc_feature: MA Experiment 20000453 PARAMETER Experiment Name: At_100uM_ABA_P Parameter: Age (day) Value: 15
  misc_feature: MA Experiment 20000453 PARAMETER Experiment Name: At_100uM_ABA_P Parameter: Organism Value: A. thaliana
  misc_feature: MA Experiment 20000453 PARAMETER Experiment Name: At_100uM_ABA_P Parameter: Plant Line Value: WS
  misc_feature: MA Experiment 20000453 PARAMETER Experiment Name: At_100uM_ABA_P Parameter: Timepoint (hr) Value: 24
  misc_feature: MA Experiment 20000453 PARAMETER Experiment Name: At_100uM_ABA_P Parameter: Tissue Value: Aerial
  misc_feature: MA Experiment 20000453 PARAMETER Experiment Name: At_100uM_ABA_P Parameter: Treatment Value: 100uM ABA vs. No Treatment
  misc_feature: MA Experiment ID: 20000574 Result: Up-regulated in Transcription
  misc_feature: MA Experiment 20000574 PARAMETER Experiment Name: At_100uM_ABA_Mutants__P Parameter: Organism Value: A. thaliana
  misc_feature: MA Experiment 20000574 PARAMETER Experiment Name: At_100uM_ABA_Mutants__P Parameter: Plant Line Value: CS23 vs. Ler wt
  misc_feature: MA Experiment 20000574 PARAMETER Experiment Name: At_100uM_ABA_Mutants__P Parameter: Timepoint (hr) Value: N/A
  misc_feature: MA Experiment 20000574 PARAMETER Experiment Name: At_100uM_ABA_Mutants__P Parameter: Tissue Value: Whole Plant
  misc_feature: MA Experiment 20000574 PARAMETER Experiment Name: At_100uM_ABA_Mutants__P Parameter: Treatment Value: None
  misc_feature: MA Experiment ID: 20000794 Result: Up-regulated in Transcription
  misc_feature: MA Experiment 20000794 PARAMETER Experiment Name: At_Petals_P Parameter: Age (day) Value: 23-25 days
  misc_feature: MA Experiment 20000794 PARAMETER Experiment Name: At_Petals_P Parameter: Plant Line Value: WS
  misc_feature: MA Experiment 20000794 PARAMETER Experiment Name: At_Petals_P Parameter: Tissue Value: Petals vs. Whole plant
  misc_feature: MA Experiment ID: 20001555 Result: Up-regulated in Transcription
  misc_feature: MA Experiment 20001555 PARAMETER Experiment Name: At_Drought_Soil_Dry_P Parameter: Age (day) Value: 24
  misc_feature: MA Experiment 20001555 PARAMETER Experiment Name: At_Drought_Soil_Dry_P Parameter: Organism Value: A. thaliana
  misc_feature: MA Experiment 20001555 PARAMETER Experiment Name: At_Drought_Soil_Dry_P Parameter: Plant Line Value: WS
  misc_feature: MA Experiment 20001555 PARAMETER Experiment Name: At_Drought_Soil_Dry_P Parameter: Post Timepoint (hr) Value: None
  misc_feature: MA Experiment 20001555 PARAMETER Experiment Name: At_Drought_Soil_Dry_P Parameter: Post-Treatment Value: None
  misc_feature: MA Experiment 20001555 PARAMETER Experiment Name: At_Drought_Soil_Dry_P Parameter: Timepoint (day) Value: 10
  misc_feature: MA Experiment 20001555 PARAMETER Experiment Name: At_Drought_Soil_Dry_P Parameter: Treatment Value: Drought vs. No Drought
  misc_feature: MA Experiment ID: 20001560 Result: Up-regulated in Transcription
  misc_feature: MA Experiment 20001560 PARAMETER Experiment Name: At_Drought_Soil_Dry_P Parameter: Age (day) Value: 28
  misc_feature: MA Experiment 20001560 PARAMETER Experiment Name: At_Drought_Soil_Dry_P Parameter: Organism Value: A. thaliana
  misc_feature: MA Experiment 20001560 PARAMETER Experiment Name: At_Drought_Soil_Dry_P Parameter: Plant Line Value: WS
  misc_feature: MA Experiment 20001560 PARAMETER Experiment Name: At_Drought_Soil_Dry_P Parameter: Post Timepoint (hr) Value: None
  misc_feature: MA Experiment 20001560 PARAMETER Experiment Name: At_Drought_Soil_Dry_P Parameter: Post-Treatment Value: None
  misc_feature: MA Experiment 20001560 PARAMETER Experiment Name: At_Drought_Soil_Dry_P Parameter: Timepoint (day) Value: 14
  misc_feature: MA Experiment 20001560 PARAMETER Experiment Name: At_Drought_Soil_Dry_P Parameter: Treatment Value: Drought vs. No Drought
  misc_feature: MA Experiment ID: 20001757 Result: Down-regulated in Transcription
  misc_feature: MA Experiment 20001757 PARAMETER Experiment Name: At_50mM_NH4NO3_L-to-H_P Parameter: Timepoint (hr) Value: 6
  misc_feature: MA Experiment 20001757 PARAMETER Experiment Name: At_50mM_NH4NO3_L-to-H_P Parameter: Tissue Value: Leaf
  misc_feature: MA Experiment 20001757 PARAMETER Experiment Name: At_50mM_NH4NO3_L-to-H_P Parameter: Treatment Value: 50mM NH4NO3 vs 100mM Mannitol
  misc_feature: MA Experiment ID: 20001904 Result: Up-regulated in Transcription
  misc_feature: MA Experiment 20001904 PARAMETER Experiment Name: At_Drought_Reproduction_P Parameter: Age (day) Value: 37
  misc_feature: MA Experiment 20001904 PARAMETER Experiment Name: At_Drought_Reproduction_P Parameter: Organism Value: A. thaliana
  misc_feature: MA Experiment 20001904 PARAMETER Experiment Name: At_Drought_Reproduction_P Parameter: Plant Line Value: WS
  misc_feature: MA Experiment 20001904 PARAMETER Experiment Name: At_Drought_Reproduction_P Parameter: Timepoint (day) Value: 7
  misc_feature: MA Experiment 20001904 PARAMETER Experiment Name: At_Drought_Reproduction_P Parameter: Tissue Value: Rosettes
  misc_feature: MA Experiment 20001904 PARAMETER Experiment Name: At_Drought_Reproduction_P Parameter: Treatment Value: Drought vs. No Drought
  misc_feature: MA Experiment ID: 20001906 Result: Up-regulated in Transcription
  misc_feature: MA Experiment 20001906 PARAMETER Experiment Name: At_Drought_Reproduction_P Parameter: Age (day) Value: 35
  misc_feature: MA Experiment 20001906 PARAMETER Experiment Name: At_Drought_Reproduction_P Parameter: Organism Value: A. thaliana
  misc_feature: MA Experiment 20001906 PARAMETER Experiment Name: At_Drought_Reproduction_P Parameter: Plant Line Value: WS
  misc_feature: MA Experiment 20001906 PARAMETER Experiment Name: At_Drought_Reproduction_P Parameter: Timepoint (day) Value: 5
  misc_feature: MA Experiment 20001906 PARAMETER Experiment Name: At_Drought_Reproduction_P Parameter: Tissue Value: Siliques
  misc_feature: MA Experiment 20001906 PARAMETER Experiment Name: At_Drought_Reproduction_P Parameter: Treatment Value: Drought vs. No Drought
  misc_feature: MA Experiment ID: 20001911 Result: Up-regulated in Transcription
  misc_feature: MA Experiment 20001911 PARAMETER Experiment Name: At_Drought_Reproduction_P Parameter: Age (day) Value: 40
  misc_feature: MA Experiment 20001911 PARAMETER Experiment Name: At_Drought_Reproduction_P Parameter: Organism Value: A. thaliana
  misc_feature: MA Experiment 20001911 PARAMETER Experiment Name: At_Drought_Reproduction_P Parameter: Plant Line Value: WS
  misc_feature: MA Experiment 20001911 PARAMETER Experiment Name: At_Drought_Reproduction_P Parameter: Timepoint (day) Value: 10
  misc_feature: MA Experiment 20001911 PARAMETER Experiment Name: At_Drought_Reproduction_P Parameter: Tissue Value: Flowers
  misc_feature: MA Experiment 20001911 PARAMETER Experiment Name: At_Drought_Reproduction_P Parameter: Treatment Value: Drought vs. No Drought
atgaaggaagaacaatgggcaccagtgatagtaatgttaatatcaagtgttgcaatgggatcagtgaacgctctcgttaagaaagcacttgatgttggtgttaaccatatgatctttggtgcttatagaatggctatttctgctctaatcttggttccgttttcttatatttgggagaggaaaacaaggccacaactaacgttcatgcttttgtgcgaacatttcatcagcggattacttggggcaagtttgatgcaatttttctttttacttgggctttcgtacacgtcagcaactgtttcgatggctctagttagcatgttacctgctatcacctttgcgttagcccttattttccggatagagaatgcgcaaaacctaaagagcaaagcaggcgtgctcaaagtaatgggaaccctaatttgcataatgggagcaatgttgttgacattttacaaaggcccagagttatcaaaccctcattctcatccacaagctcgtcacaacaacaacaataacaatggtcacgaccaaacaaagaaatggcttctaggctgtctttatttagtcattgggacagtgttgttgtctctatggatgttgtttcaagggaaattaagctttaagtatcctggaaataaatactcaagcacttgtctcatgtcagtcttcgcatcatttcaatgtgctattttgagtctttataaaagtagagacgtcaaagattggatcattgaagataaattcgtcattttggtcaccctttacgctggaatagtgggacaagcgatgtcgacagtggtaacgtcatggtccataaaaatgacaggagcagttttcgtctcaacattcagccccgtcagcctcgtcgccgctacgttattcgatttcctcatcttacactctcctttataccttggcagcatacttggatcagtagtgactataactggcctctacgtttttctttggggaaggaagaatgagacagatcagtctgtttcgaagactttgaacagttcccagttttctcagaataaggataacgaagaccatacaatagcaaatcataaggatactaatttgcccgtttga

SEQ ID NO: 72068 - protein, 364 aa, Arabidopsis thaliana; identical to SEQ ID NO: 45410
  peptide (1)..(364): Ceres Seq. ID no. 4916968
  misc_feature (17)..(151): Pfam Name: Integral membrane protein DUF6 Pfam Description: Integral membrane protein DUF6
  misc_feature (1)..(364): Homolog of NCBI NO: 15234179 NR Description: unknown protein; protein id: At4g01430.1, by cDNA: gi_20260641 [Arabidopsis thaliana]
  misc_feature (82)..(364): Homolog of NCBI NO: 7486354 NR Description: hypothetical protein F3D13.4 - Arabidopsis >gi|3193309|gb|AAC19292.1| F3D13.4 gene product [Arabidopsis
  misc_feature (1)..(70): Homolog of NCBI NO: 7486354 NR Description: hypothetical protein F3D13.4 - Arabidopsis >gi|3193309|gb|AAC19292.1| F3D13.4 gene product [Arabidopsis
  misc_feature (4)..(350): Homolog of NCBI NO: 18378792 NR Description: expressed protein; protein id: At1g01070.1,
  misc_feature (3)..(331): Homolog of NCBI NO: 15220389 NR Description: hypothetical protein; protein id: At1g11460.1
  misc_feature (82)..(350): Homolog of NCBI NO: 25406714 NR Description: protein T25K16.7 [imported] - Arabidopsis >gi|6715646|gb|AAF26473.1|AC007323_14 T25K16.7 [Arabidopsis
  misc_feature (5)..(357): Homolog of NCBI NO: 15234185 NR Description: unknown protein; protein id: At4g01450.1
  misc_feature (85)..(354): Homolog of NCBI NO: 30682241 NR Description: nodulin MtN21 family protein [Arabidopsis
  misc_feature (5)..(351): Homolog of NCBI NO: 15234182 NR Description: hypothetical protein; protein id: At4g01440.1, by cDNA: 40560. [Arabidopsis thaliana] >gi|25407108|pir||G85018
  misc_feature (5)..(307): Homolog of NCBI NO: 30678880 NR Description: nodulin MtN21 family protein [Arabidopsis >gi|26449909|dbj|BAC42076.1| unknown protein [Arabidopsis >gi|28973211|gb|AAO63930.1| unknown protein [Arabidopsis

SEQ ID NO: 72069 - protein, 353 aa, Arabidopsis thaliana
  peptide (1)..(353): Ceres Seq. ID no. 4916969
  misc_feature (6)..(140): Pfam Name: Integral membrane protein DUF6 Pfam Description: Integral membrane protein DUF6
  misc_feature (1)..(353): Homolog of NCBI NO: 15234179 NR Description: unknown protein; protein id: At4g01430.1, by cDNA: gi_20260641 [Arabidopsis thaliana]
  misc_feature (71)..(353): Homolog of NCBI NO: 7486354 NR Description: hypothetical protein F3D13.4 - Arabidopsis >gi|3193309|gb|AAC19292.1| F3D13.4 gene product [Arabidopsis
  misc_feature (1)..(59): Homolog of NCBI NO: 7486354 NR Description: hypothetical protein F3D13.4 - Arabidopsis >gi|3193309|gb|AAC19292.1| F3D13.4 gene product [Arabidopsis
  misc_feature (1)..(339): Homolog of NCBI NO: 18378792 NR Description: expressed protein; protein id: At1g01070.1,
  misc_feature (1)..(320): Homolog of NCBI NO: 15220389 NR Description: hypothetical protein; protein id: At1g11460.1
  misc_feature (71)..(339): Homolog of NCBI NO: 25406714 NR Description: protein T25K16.7 [imported] - Arabidopsis >gi|6715646|gb|AAF26473.1|AC007323_14 T25K16.7 [Arabidopsis
  misc_feature (1)..(346): Homolog of NCBI NO: 15234185 NR Description: unknown protein; protein id: At4g01450.1
  misc_feature (74)..(343): Homolog of NCBI NO: 30682241 NR Description: nodulin MtN21 family protein [Arabidopsis
  misc_feature (1)..(340): Homolog of NCBI NO: 15234182 NR Description: hypothetical protein; protein id: At4g01440.1, by cDNA: 40560. [Arabidopsis thaliana] >gi|25407108|pir||G85018
  misc_feature (1)..(296): Homolog of NCBI NO: 30678880 NR Description: nodulin MtN21 family protein [Arabidopsis >gi|26449909|dbj|BAC42076.1| unknown protein [Arabidopsis >gi|28973211|gb|AAO63930.1| unknown protein [Arabidopsis
MLISSVAMGSVNALVKKALDVGVNHMIFGAYRMAISALILVPFSYIWERKTRPQLTFMLLCEHFISGLLGASLMQFFFLLGLSYTSATVSMALVSMLPAITFALALIFRIENAQNLKSKAGVLKVMGTLICIMGAMLLTFYKGPELSNPHSHPQARHNNNNNNGHDQTKKWLLGCLYLVIGTVLLSLWMLFQGKLSFKYPGNKYSSTCLMSVFASFQCAILSLYKSRDVKDWIIEDKFVILVTLYAGIVGQAMSTVVTSWSIKMTGAVFVSTFSPVSLVAATLFDFLILHSPLYLGSILGSVVTITGLYVFLWGRKNETDQSVSKTLNSSQFSQNKDNEDHTIANHKDTNLPV

SEQ ID NO: 72070 - protein, 346 aa, Arabidopsis thaliana
  peptide (1)..(346): Ceres Seq. ID no. 4916970
  misc_feature (1)..(133): Pfam Name: Integral membrane protein DUF6 Pfam Description: Integral membrane protein DUF6
  misc_feature (1)..(346): Homolog of NCBI NO: 15234179 NR Description: unknown protein; protein id: At4g01430.1, by cDNA: gi_20260641 [Arabidopsis thaliana]
  misc_feature (64)..(346): Homolog of NCBI NO: 7486354 NR Description: hypothetical protein F3D13.4 - Arabidopsis >gi|3193309|gb|AAC19292.1| F3D13.4 gene product [Arabidopsis
  misc_feature (1)..(52): Homolog of NCBI NO: 7486354 NR Description: hypothetical protein F3D13.4 - Arabidopsis >gi|3193309|gb|AAC19292.1| F3D13.4 gene product [Arabidopsis
  misc_feature (1)..(332): Homolog of NCBI NO: 18378792 NR Description: expressed protein; protein id: At1g01070.1,
  misc_feature (1)..(313): Homolog of NCBI NO: 15220389 NR Description: hypothetical protein; protein id: At1g11460.1
  misc_feature (64)..(332): Homolog of NCBI NO: 25406714 NR Description: protein T25K16.7 [imported] - Arabidopsis >gi|6715646|gb|AAF26473.1|AC007323_14 T25K16.7 [Arabidopsis
  misc_feature (1)..(339): Homolog of NCBI NO: 15234185 NR Description: unknown protein; protein id: At4g01450.1
  misc_feature (67)..(336): Homolog of NCBI NO: 30682241 NR Description: nodulin MtN21 family protein [Arabidopsis
  misc_feature (1)..(333): Homolog of NCBI NO: 15234182 NR Description: hypothetical protein; protein id: At4g01440.1, by cDNA: 40560. [Arabidopsis thaliana] >gi|25407108|pir||G85018
  misc_feature (1)..(289): Homolog of NCBI NO: 30678880 NR Description: nodulin MtN21 family protein [Arabidopsis >gi|26449909|dbj|BAC42076.1| unknown protein [Arabidopsis >gi|28973211|gb|AAO63930.1| unknown protein [Arabidopsis
MGSVNALVKKALDVGVNHMIFGAYRMAISALILVPFSYIWERKTRPQLTFMLLCEHFISGLLGASLMQFFFLLGLSYTSATVSMALVSMLPAITFALALIFRIENAQNLKSKAGVLKVMGTLICIMGAMLLTFYKGPELSNPHSHPQARHNNNNNNGHDQTKKWLLGCLYLVIGTVLLSLWMLFQGKLSFKYPGNKYSSTCLMSVFASFQCAILSLYKSRDVKDWIIEDKFVILVTLYAGIVGQAMSTVVTSWSIKMTGAVFVSTFSPVSLVAATLFDFLILHSPLYLGSILGSVVTITGLYVFLWGRKNETDQSVSKTLNSSQFSQNKDNEDHTIANHKDTNLPV

SEQ ID NO: 72071 - DNA, 627 bp, Arabidopsis thaliana
  misc_feature (1)..(627): Ceres Seq. ID no. 4917031
  misc_feature: MA Experiment ID: 20001911 Result: Up-regulated in Transcription
  misc_feature: MA Experiment 20001911 PARAMETER Experiment Name: At_Drought_Reproduction_P Parameter: Age (day) Value: 40
  misc_feature: MA Experiment 20001911 PARAMETER Experiment Name: At_Drought_Reproduction_P Parameter: Organism Value: A. thaliana
  misc_feature: MA Experiment 20001911 PARAMETER Experiment Name: At_Drought_Reproduction_P Parameter: Plant Line Value: WS
  misc_feature: MA Experiment 20001911 PARAMETER Experiment Name: At_Drought_Reproduction_P Parameter: Timepoint (day) Value: 10
  misc_feature: MA Experiment 20001911 PARAMETER Experiment Name: At_Drought_Reproduction_P Parameter: Tissue Value: Flowers
  misc_feature: MA Experiment 20001911 PARAMETER Experiment Name: At_Drought_Reproduction_P Parameter: Treatment Value: Drought vs. No Drought
  misc_feature: Pfam Name: CBFD_NFYB_HMF Pfam Description: Histone-like transcription factor (CBF/NF-Y) and archaeal histone
atgaccagctcagtcgtagtagccggcgccggtgacaagaacaatggtatcgtggtccagcagcaaccaccatgtgtggctcgtgagcaagaccaatacatgccaatcgcaaacgtcataagaatcatgcgtaaaaccttaccgtctcacgccaaaatctctgacgacgccaaagaaacgattcaagaatgtgtctccgagtacatcagcttcgtgaccggtgaagccaacgagcgttgccaacgtgagcaacgtaagaccataactgctgaagatatcctttgggctatgagcaagcttgggttcgataactacgtggaccccctcaccgtgttcattaaccggtaccgtgagatagagaccgatcgtggttctgcacttagaggtgagccaccgtcgttgagacaaacctatggaggaaatggtattgggtttcacggcccatctcatggcctacctcctccgggtccttatggttatggtatgttggaccaatccatggttatgggaggtggtcggtactaccaaaacgggtcgtcgggtcaagatgaatccagtgttggtggtggctcttcgtcttccattaacggaatgccggcttttgaccattatggtcagtataagtga

SEQ ID NO: 72072 - protein, 208 aa, Arabidopsis thaliana
  peptide (1)..(208): Ceres Seq. ID no. 4917032
  misc_feature: Pfam Name: CBFD_NFYB_HMF Pfam Description: Histone-like transcription factor (CBF/NF-Y) and archaeal histone
  misc_feature (1)..(208): Homolog of NCBI NO: 15219151 NR Description: CCAAT-box binding factor HAP3 homolog; protein At1g21970.1 [Arabidopsis thaliana] >gi|25402948|pir||G86352
  misc_feature (1)..(208): Homolog of NCBI NO: 3282674 NR Description: CCAAT-box binding factor HAP3 homolog
  misc_feature (10)..(160): Homolog of NCBI NO: 22536010 NR Description: LEC1-like protein [Phaseolus coccineus]
  misc_feature (25)..(197): Homolog of NCBI NO: 9758795 NR Description: contains similarity to CCAAT-box-binding
  misc_feature (25)..(197): Homolog of NCBI NO: 30695265 NR Description: leafy cotyledon 1-related L1L protein
  misc_feature (25)..(197): Homolog of NCBI NO: 28393564 NR Description: unknown protein [Arabidopsis thaliana]
  misc_feature (8)..(154): Homolog of NCBI NO: 15321716 NR Description: leafy cotyledon1 [Zea mays]
  misc_feature (10)..(124): Homolog of NCBI NO: 30349365 NR Description: leafy cotyledon 1 [Oryza sativa (indica
  misc_feature (28)..(117): Homolog of NCBI NO: 16902054 NR Description: CCAAT-box binding factor HAP3 B domain [Vernonia
MTSSVVVAGAGDKNNGIVVQQQPPCVAREQDQYMPIANVIRIMRKTLPSHAKISDDAKETIQECVSEYISFVTGEANERCQREQRKTITAEDILWAMSKLGFDNYVDPLTVFINRYREIETDRGSALRGEPPSLRQTYGGNGIGFHGPSHGLPPPGPYGYGMLDQSMVMGGGRYYQNGSSGQDESSVGGGSSSSINGMPAFDHYGQYK

SEQ ID NO: 72073 - protein, 175 aa, Arabidopsis thaliana
  peptide (1)..(175): Ceres Seq. ID no. 4917033
  misc_feature: Pfam Name: CBFD_NFYB_HMF Pfam Description: Histone-like transcription factor (CBF/NF-Y) and archaeal histone
  misc_feature (1)..(175): Homolog of NCBI NO: 15219151 NR Description: CCAAT-box binding factor HAP3 homolog; protein At1g21970.1 [Arabidopsis thaliana] >gi|25402948|pir||G86352
  misc_feature (1)..(175): Homolog of NCBI NO: 3282674 NR Description: CCAAT-box binding factor HAP3 homolog
  misc_feature (1)..(127): Homolog of NCBI NO: 22536010 NR Description: LEC1-like protein [Phaseolus coccineus]
  misc_feature (1)..(164): Homolog of NCBI NO: 9758795 NR Description: contains similarity to CCAAT-box-binding
  misc_feature (1)..(164): Homolog of NCBI NO: 30695265 NR Description: leafy cotyledon 1-related L1L protein
  misc_feature (1)..(164): Homolog of NCBI NO: 28393564 NR Description: unknown protein [Arabidopsis thaliana]
  misc_feature (1)..(121): Homolog of NCBI NO: 15321716 NR Description: leafy cotyledon1 [Zea mays]
  misc_feature (1)..(91): Homolog of NCBI NO: 30349365 NR Description: leafy cotyledon 1 [Oryza sativa (indica
  misc_feature (1)..(84): Homolog of NCBI NO: 16902054 NR Description: CCAAT-box binding factor HAP3 B domain [Vernonia
MPIANVIRIMRKTLPSHAKISDDAKETIQECVSEYISFVTGEANERCQREQRKTITAEDILWAMSKLGFDNYVDPLTVFINRYREIETDRGSALRGEPPSLRQTYGGNGIGFHGPSHGLPPPGPYGYGMLDQSMVMGGGRYYQNGSSGQDESSVGGGSSSSINGMPAFDHYGQYK

SEQ ID NO: 72074 - protein, 166 aa, Arabidopsis thaliana
  peptide (1)..(166): Ceres Seq. ID no. 4917034
  misc_feature: Pfam Name: CBFD_NFYB_HMF Pfam Description: Histone-like transcription factor (CBF/NF-Y) and archaeal histone
  misc_feature (1)..(166): Homolog of NCBI NO: 15219151 NR Description: CCAAT-box binding factor HAP3 homolog; protein At1g21970.1 [Arabidopsis thaliana] >gi|25402948|pir||G86352
  misc_feature (1)..(166): Homolog of NCBI NO: 3282674 NR Description: CCAAT-box binding factor HAP3 homolog
  misc_feature (1)..(118): Homolog of NCBI NO: 22536010 NR Description: LEC1-like protein [Phaseolus coccineus]
  misc_feature (1)..(155): Homolog of NCBI NO: 9758795 NR Description: contains similarity to CCAAT-box-binding
  misc_feature (1)..(155): Homolog of NCBI NO: 30695265 NR Description: leafy cotyledon 1-related L1L protein
  misc_feature (1)..(155): Homolog of NCBI NO: 28393564 NR Description: unknown protein [Arabidopsis thaliana]
  misc_feature (1)..(112): Homolog of NCBI NO: 15321716 NR Description: leafy cotyledon1 [Zea mays]
  misc_feature (1)..(82): Homolog of NCBI NO: 30349365 NR Description: leafy cotyledon 1 [Oryza sativa (indica
  misc_feature (1)..(75): Homolog of NCBI NO: 16902054 NR Description: CCAAT-box binding factor HAP3 B domain [Vernonia
MRKTLPSHAKISDDAKETIQECVSEYISFVTGEANERCQREQRKTITAEDILWAMSKLGFDNYVDPLTVFINRYREIETDRGSALRGEPPSLRQTYGGNGIGFHGPSHGLPPPGPYGYGMLDQSMVMGGGRYYQNGSSGQDESSVGGGSSSSINGMPAFDHYGQYK

SEQ ID NO: 72075 - DNA, 681 bp, Arabidopsis thaliana
  misc_feature (1)..(681): Ceres Seq. ID no. 4917212
  misc_feature: MA Experiment ID: 20000307 Result: Down-regulated in Transcription
  misc_feature: MA Experiment 20000307 PARAMETER Experiment Name: At_Germinating_Seeds_Sub_P Parameter: Age (hr) Value: 24 vs. 0
  misc_feature: MA Experiment 20000307 PARAMETER Experiment Name: At_Germinating_Seeds_Sub_P Parameter: Organism Value: A. thaliana
  misc_feature: MA Experiment 20000307 PARAMETER Experiment Name: At_Germinating_Seeds_Sub_P Parameter: Plant Line Value: WS
  misc_feature: MA Experiment 20000307 PARAMETER Experiment Name: At_Germinating_Seeds_Sub_P Parameter: Tissue Value: Germinating Seeds
atgaattcatttcctgcacaaaaccttatgctatctgctacaaacgcaaacaaggactcaggcttgcgtacgtctaatgctcattggttacattcatgtatcgccgttccaaagaccacaggcattgatctttctcaggaacctcctgctgaaggtgtgatggtgcctcaatctcatttgtttcctcctcctattagagattccagaaacgatactgaaactgtgaaacagaagtccgtaaatcagtctccttcgaaagctttgaagccaaaaccgcaaaggaagaaacgctctgtatccaacaagtcaaagaaaacacctagcataccagaaacaaaacgtgagaaaaagaatctggacatcaacattgacatctcaagctttgatacttctggggttcctcctcctgtatgttcatgtacaggcgtttcaagggtttgctacaaatggggcatgggcggttggcaatcctcatgttgtaccatcagcatatcgacatacccactacccatgagcacaacaagacctggagctcgtcttgcaggaagaaaaatgagcaatggtgcttatgttaagctccttgcgaggcttgcggacgaaggctatgacctctctcaccctcttgatctcaagaaccattgggccagacacggtactaacaagtttgtgaccatcaagtag

SEQ ID NO: 72076 - protein, 226 aa, Arabidopsis thaliana
  peptide (1)..(226): Ceres Seq. ID no. 4917213
  misc_feature (1)..(226): Homolog of NCBI NO: 30686452 NR Description: expressed protein [Arabidopsis thaliana]
  misc_feature (1)..(226): Homolog of NCBI NO: 30686455 NR Description: expressed protein [Arabidopsis thaliana]
  misc_feature (46)..(226): Homolog of NCBI NO: 26190436 NR Description: barley B recombinant [Hordeum vulgare]
MNSFPAQNLMLSATNANKDSGLRTSNAHWLHSCIAVPKTTGIDLSQEPPAEGVMVPQSHLFPPPIRDSRNDTETVKQKSVNQSPSKALKPKPQRKKRSVSNKSKKTPSIPETKREKKNLDINIDISSFDTSGVPPPVCSCTGVSRVCYKWGMGGWQSSCCTISISTYPLPMSTTRPGARLAGRKMSNGAYVKLLARLADEGYDLSHPLDLKNHWARHGTNKFVTIK

SEQ ID NO: 72077 - protein, 217 aa, Arabidopsis thaliana
  peptide (1)..(217): Ceres Seq. ID no. 4917214
  misc_feature (1)..(217): Homolog of NCBI NO: 30686452 NR Description: expressed protein [Arabidopsis thaliana]
  misc_feature (1)..(217): Homolog of NCBI NO: 30686455 NR Description: expressed protein [Arabidopsis thaliana]
  misc_feature (37)..(217): Homolog of NCBI NO: 26190436 NR Description: barley B recombinant [Hordeum vulgare]
MLSATNANKDSGLRTSNAHWLHSCIAVPKTTGIDLSQEPPAEGVMVPQSHLFPPPIRDSRNDTETVKQKSVNQSPSKALKPKPQRKKRSVSNKSKKTPSIPETKREKKNLDINIDISSFDTSGVPPPVCSCTGVSRVCYKWGMGGWQSSCCTISISTYPLPMSTTRPGARLAGRKMSNGAYVKLLARLADEGYDLSHPLDLKNHWARHGTNKFVTIK

SEQ ID NO: 72078 - protein, 173 aa, Arabidopsis thaliana
  peptide (1)..(173): Ceres Seq. ID no. 4917215
  misc_feature (1)..(173): Homolog of NCBI NO: 30686452 NR Description: expressed protein [Arabidopsis thaliana]
  misc_feature (1)..(173): Homolog of NCBI NO: 30686455 NR Description: expressed protein [Arabidopsis thaliana]
  misc_feature (1)..(173): Homolog of NCBI NO: 26190436 NR Description: barley B recombinant [Hordeum vulgare]
MVPQSHLFPPPIRDSRNDTETVKQKSVNQSPSKALKPKPQRKKRSVSNKSKKTPSIPETKREKKNLDINIDISSFDTSGVPPPVCSCTGVSRVCYKWGMGGWQSSCCTISISTYPLPMSTTRPGARLAGRKMSNGAYVKLLARLADEGYDLSHPLDLKNHWARHGTNKFVTIK

SEQ ID NO: 72079 - DNA, 489 bp, Arabidopsis thaliana
  misc_feature (1)..(489): Ceres Seq. ID no. 4917233
  misc_feature: MA Experiment ID: 20000227 Result: Down-regulated in Transcription
  misc_feature: MA Experiment 20000227 PARAMETER Experiment Name: At_Root-Tips-vs-Tops_P Parameter: Tissue Value: Root Tips vs. Root Tops
atgaatcggttaccgtcgtctgaagacggagacgatgaagaattcagtcacgatgatggctctgctcctccgcgaaagaaactccgtctaaccagagaacagtcacgtcttcttgaagatagtttcagacagaatcatacccttaatcccaaacaaaaggaagtacttgccaagcatttgatgctacggccaagacaaattgaagtttggtttcaaaaccgtagagcaaggagcaaattgaagcaaaccgagatggaatgcgagtatctcaaaaggtggtttggttcattaacggaagaaaaccacaggctccatagagaagtagaagagcttagagccatgaaggttggcccaacaacggtgaactctgcctcgagccttactatgtgtcctcgctgcgagcgagttacccctgccgcgagcccttcgagggcggtggtgccggttccggctaagaaaacgtttccgccgcaagagcgtgatcgttga

SEQ ID NO: 72080 - protein, 162 aa, Arabidopsis thaliana
  peptide (1)..(162): Ceres Seq. ID no. 4917234
  misc_feature (24)..(80): Pfam Name: Homeobox domain Pfam Description: Homeobox domain
  misc_feature (1)..(162): Homolog of NCBI NO: 25386214 NR Description: probable homeodomain transcription factor - Arabidopsis thaliana >gi|3785973|gb|AAC67320.1| putative
  misc_feature (1)..(162): Homolog of NCBI NO: 30677923 NR Description: homeodomain-leucine zipper protein ATHB-17
  misc_feature (10)..(151): Homolog of NCBI NO: 5006851 NR Description: homeodomain leucine zipper protein [Oryza sativa]
  misc_feature (10)..(151): Homolog of NCBI NO: 34911664 NR Description: putative homeodomain-leucine zipper [Oryza sativa
  misc_feature (1)..(146): Homolog of NCBI NO: 30698765 NR Description: homeodomain-leucine zipper protein, putative thaliana] >gi|26451347|dbj|BAC42774.1| unknown protein thaliana] >gi|28973379|gb|AAO64014.1| putative homeodomain
  misc_feature (6)..(143): Homolog of NCBI NO: 12230908 NR Description: Homeobox-leucine zipper protein HAT14 (HD-ZIP leucine zipper protein~gene_id:MPH15.6 [Arabidopsis thaliana]
  misc_feature (6)..(143): Homolog of NCBI NO: 22326632 NR Description: homeobox-leucine zipper protein HAT14 (HD-Zip
  misc_feature (6)..(143): Homolog of NCBI NO: 25386203 NR Description: homeobox protein HAT14 [imported] - Arabidopsis
  misc_feature (6)..(143): Homolog of NCBI NO: 29028870 NR Description: At5g06710 [Arabidopsis thaliana]
  misc_feature (10)..(149): Homolog of NCBI NO: 25453563 NR Description: homeobox protein HAT3 [imported] - Arabidopsis >gi|549889|gb|AAA56904.1| homeobox protein
MNRLPSSEDGDDEEFSHDDGSAPPRKKLRLTREQSRLLEDSFRQNHTLNPKQKEVLAKHLMLRPRQIEVWFQNRRARSKLKQTEMECEYLKRWFGSLTEENHRLHREVEELRAMKVGPTTVNSASSLTMCPRCERVTPAASPSRAVVPVPAKKTFPPQERDR

SEQ ID NO: 72081 - protein, 102 aa, Arabidopsis thaliana
  peptide (1)..(102): Ceres Seq. ID no. 4917235
  misc_feature (21)..(65): Pfam Name: Homeobox associated leucine zipper Pfam Description: Homeobox associated leucine zipper
  misc_feature (1)..(102): Homolog of NCBI NO: 25386214 NR Description: probable homeodomain transcription factor - Arabidopsis thaliana >gi|3785973|gb|AAC67320.1| putative
  misc_feature (1)..(102): Homolog of NCBI NO: 30677923 NR Description: homeodomain-leucine zipper protein ATHB-17
  misc_feature (1)..(91): Homolog of NCBI NO: 5006851 NR Description: homeodomain leucine zipper protein [Oryza sativa]
  misc_feature (1)..(91): Homolog of NCBI NO: 34911664 NR Description: putative homeodomain-leucine zipper [Oryza sativa
  misc_feature (1)..(86): Homolog of NCBI NO: 30698765 NR Description: homeodomain-leucine zipper protein, putative thaliana] >gi|26451347|dbj|BAC42774.1| unknown protein thaliana] >gi|28973379|gb|AAO64014.1| putative homeodomain
  misc_feature (1)..(83): Homolog of NCBI NO: 12230908 NR Description: Homeobox-leucine zipper protein HAT14 (HD-ZIP leucine zipper protein~gene_id:MPH15.6 [Arabidopsis thaliana]
  misc_feature (1)..(83): Homolog of NCBI NO: 22326632 NR Description: homeobox-leucine zipper protein HAT14 (HD-Zip
  misc_feature (1)..(83): Homolog of NCBI NO: 25386203 NR Description: homeobox protein HAT14 [imported] - Arabidopsis
  misc_feature (1)..(83): Homolog of NCBI NO: 29028870 NR Description: At5g06710 [Arabidopsis thaliana]
  misc_feature (1)..(89): Homolog of NCBI NO: 25453563 NR Description: homeobox protein HAT3 [imported] - Arabidopsis >gi|549889|gb|AAA56904.1| homeobox protein
MLRPRQIEVWFQNRRARSKLKQTEMECEYLKRWFGSLTEENHRLHREVEELRAMKVGPTTVNSASSLTMCPRCERVTPAASPSRAVVPVPAKKTFPPQERDR

SEQ ID NO: 72082 - DNA, 1431 bp, Arabidopsis thaliana
  misc_feature (1)..(1431): Ceres Seq. ID no. 4917266
  misc_feature: MA Experiment ID: 20000314 Result: Down-regulated in Transcription
  misc_feature: MA Experiment 20000314 PARAMETER Experiment Name: At_14day_Shoots-Roots_Sub_P Parameter: Age (day) Value: 14
  misc_feature: MA Experiment 20000314 PARAMETER Experiment Name: At_14day_Shoots-Roots_Sub_P Parameter: Organism Value: A. thaliana
  misc_feature: MA Experiment 20000314 PARAMETER Experiment Name: At_14day_Shoots-Roots_Sub_P Parameter: Plant Line Value: WS
  misc_feature: MA Experiment 20000314 PARAMETER Experiment Name: At_14day_Shoots-Roots_Sub_P Parameter: Tissue Value: Roots vs. Whole Plant
  misc_feature: MA Experiment ID: 20000355 Result: Down-regulated in Transcription
  misc_feature: MA Experiment 20000355 PARAMETER Experiment Name: At_Siliques_Sub_P Parameter: Age (day) Value: 21
  misc_feature: MA Experiment 20000355 PARAMETER Experiment Name: At_Siliques_Sub_P Parameter: Organism Value: A. thaliana
  misc_feature: MA Experiment 20000355 PARAMETER Experiment Name: At_Siliques_Sub_P Parameter: Plant Line Value: WS
  misc_feature: MA Experiment 20000355 PARAMETER Experiment Name: At_Siliques_Sub_P Parameter: Tissue Value: Less Than 5mm Siliques vs. Whole Plant
atggttttcttcaagatcctctttatctctttaatggcaggattagccatgaaaggatctaagatcaacgtagaagatctccaaaagttctccctccaccatacacagaacaacctccaaaccataagccttctattgtttcttgtcgtttttgtgtggatcctctacatgttaacccgacctaaacccgtttaccttgttgatttctcctgctaccttccaccgtcgcatctcaaggtcagtatccaaaccctaatgggacacgcaagacgtgcaagagaagcaggcatgtgttggaagaacaaagagagcgaccatttagttgacttccaggagaagattcttgaacgttccggtcttggtcaagaaacctacatccccgagggtcttcagtgcttcccacttcagcaaggcatgggtgcttcacgtaaagagacggaagaagtaatcttcggagctcttgacaatctttttcgcaacaccggtgtaaaacctgatgatatcggtatattggtggtgaattctagcacgtttaatccaactccatcactcgcctccatgattgtgaacaagtacaaactcagagacaacatcaagagtttgaatcttggagggatgggttgcagtgccggagttatagctgttgatgtcgctaagggattactacaagttcataggaacacttatgctattgtagtaagcacagagaacatcactcagaacttatacttggggaaaaacaaatcaatgctagtcacaaactgtttgttccgcgttggtggtgctgcggttctgctttcaaacagatctagagaccgtaaccgcgccaaatacgagcttgttcacaccgtacggatccataccggatcagatgataggtcgttcgaatgtgcgacacaagaagaggatgaagatggtataattggagttaccttgacaaagaatctacctatggtggctgcaaggactcttaagataaatatcgcaactttgggtcctcttgtacttccattaaaagagaagctagccttctttattacttttgtcaagaagaagtatttcaagccagagttaaggaattatacaccagatttcaagcttgcctttgagcatttctgtatccacgctggtggaagagctctaatagatgagctggagaagaaccttaagctttctccgttacacgtagaggcgtcaagaatgacactacacaggtttggtaacacttcttctagctcaatctggtacgagttagcttatacagaagctaaaggaaggatgaaggaaggagataggatttggcagattgctttggggtcaggttttaagtgtaacagttcagtatgggtggctctgcgagacgttaagccttcagctaacagtccatgggaagactgtatggatagatatccggttgagattgatatttaa

SEQ ID NO: 72083 - protein, 476 aa, Arabidopsis thaliana; identical to SEQ ID NO: 70945
  peptide (1)..(476): Ceres Seq. ID no. 4917267
  misc_feature (307)..(453): Pfam Name: Chalcone and stilbene synthases, C-terminal domain Pfam Description: Chalcone and stilbene synthases, C-terminal
  misc_feature (1)..(476): Homolog of NCBI NO: 25411602 NR Description: probable fatty acid elongase [imported] - thaliana >gi|4115364|gb|AAD03366.1| putative fatty acid elongase
  misc_feature (1)..(476): Homolog of NCBI NO: 30679326 NR Description: fatty acid elongase 1 (FAE1), putative
  misc_feature (4)..(476): Homolog of NCBI NO: 15235309 NR Description: fatty acid elongase - like protein; protein id: [Arabidopsis thaliana] >gi|7484964|pir||T04771 fatty acid
  misc_feature (3)..(475): Homolog of NCBI NO: 15236144 NR Description: fatty acid elongase 1; protein id: At4g34520.1
  misc_feature (3)..(475): Homolog of NCBI NO: 30424122 NR Description: beta-ketoacyl-CoA synthase FAE1.2 [Brassica
  misc_feature (15)..(474): Homolog of NCBI NO: 15223556 NR Description: very-long-chain fatty acid condensing enzyme putative; protein id: At1g19440.1, supported by cDNA: 158882.
  misc_feature (4)..(475): Homolog of NCBI NO: 14495235 NR Description: beta-ketoacyl-CoA synthase [Brassica napus]
  misc_feature (4)..(475): Homolog of NCBI NO: 19919734 NR Description: 3-ketoacyl-CoA synthase [Brassica oleracea]
  misc_feature (4)..(475): Homolog of NCBI NO: 19919736 NR Description: 3-ketoacyl-CoA synthase [Brassica rapa]
  misc_feature (4)..(475): Homolog of NCBI NO: 30424120 NR Description: beta-ketoacyl-CoA synthase FAE1.1 [Brassica

SEQ ID NO: 72084 - protein, 465 aa, Arabidopsis thaliana; identical to SEQ ID NO: 70946
  peptide (1)..(465): Ceres Seq. ID no. 4917268
  misc_feature (296)..(442): Pfam Name: Chalcone and stilbene synthases, C-terminal domain Pfam Description: Chalcone and stilbene synthases, C-terminal
  misc_feature (1)..(465): Homolog of NCBI NO: 25411602 NR Description: probable fatty acid elongase [imported] - thaliana >gi|4115364|gb|AAD03366.1| putative fatty acid elongase
  misc_feature (1)..(465): Homolog of NCBI NO: 30679326 NR Description: fatty acid elongase 1 (FAE1), putative
  misc_feature (1)..(465): Homolog of NCBI NO: 15235309 NR Description: fatty acid elongase - like protein; protein id: [Arabidopsis thaliana] >gi|7484964|pir||T04771 fatty acid
  misc_feature (1)..(464): Homolog of NCBI NO: 15236144 NR Description: fatty acid elongase 1; protein id: At4g34520.1
  misc_feature (1)..(464): Homolog of NCBI NO: 30424122 NR Description: beta-ketoacyl-CoA synthase FAE1.2 [Brassica
  misc_feature (4)..(463): Homolog of NCBI NO: 15223556 NR Description: very-long-chain fatty acid condensing enzyme putative; protein id: At1g19440.1, supported by cDNA: 158882.
  misc_feature (1)..(464): Homolog of NCBI NO: 14495235 NR Description: beta-ketoacyl-CoA synthase [Brassica napus]
  misc_feature (1)..(464): Homolog of NCBI NO: 19919734 NR Description: 3-ketoacyl-CoA synthase [Brassica oleracea]
  misc_feature (1)..(464): Homolog of NCBI NO: 19919736 NR Description: 3-ketoacyl-CoA synthase [Brassica rapa]
  misc_feature (1)..(464): Homolog of NCBI NO: 30424120 NR Description: beta-ketoacyl-CoA synthase FAE1.1 [Brassica

SEQ ID NO: 72085 - protein, 460 aa, Arabidopsis thaliana
  peptide (1)..(460): Ceres Seq. ID no. 4917269
  misc_feature (291)..(437): Pfam Name: Chalcone and stilbene synthases, C-terminal domain Pfam Description: Chalcone and stilbene synthases, C-terminal
  misc_feature (1)..(460): Homolog of NCBI NO: 25411602 NR Description: probable fatty acid elongase [imported] - thaliana >gi|4115364|gb|AAD03366.1| putative fatty acid elongase
  misc_feature (1)..(460): Homolog of NCBI NO: 30679326 NR Description: fatty acid elongase 1 (FAE1), putative
  misc_feature (1)..(460): Homolog of NCBI NO: 15235309 NR Description: fatty acid elongase - like protein; protein id: [Arabidopsis thaliana] >gi|7484964|pir||T04771 fatty acid
  misc_feature (1)..(459): Homolog of NCBI NO: 15236144 NR Description: fatty acid elongase 1; protein id: At4g34520.1
  misc_feature (1)..(459): Homolog of NCBI NO: 30424122 NR Description: beta-ketoacyl-CoA synthase FAE1.2 [Brassica
  misc_feature (1)..(458): Homolog of NCBI NO: 15223556 NR Description: very-long-chain fatty acid condensing enzyme putative; protein id: At1g19440.1, supported by cDNA: 158882.
  misc_feature (1)..(459): Homolog of NCBI NO: 14495235 NR Description: beta-ketoacyl-CoA synthase [Brassica napus]
  misc_feature (1)..(459): Homolog of NCBI NO: 19919734 NR Description: 3-ketoacyl-CoA synthase [Brassica oleracea]
  misc_feature (1)..(459): Homolog of NCBI NO: 19919736 NR Description: 3-ketoacyl-CoA synthase [Brassica rapa]
  misc_feature (1)..(459): Homolog of NCBI NO: 30424120 NR Description: beta-ketoacyl-CoA synthase FAE1.1 [Brassica
MKGSKINVEDLQKFSLHHTQNNLQTISLLLFLVVFVWILYMLTRPKPVYLVDFSCYLPPSHLKVSIQTLMGHARRAREAGMCWKNKESDHLVDFQEKILERSGLGQETYIPEGLQCFPLQQGMGASRKETEEVIFGALDNLFRNTGVKPDDIGILVVNSSTFNPTPSLASMIVNKYKLRDNIKSLNLGGMGCSAGVIAVDVAKGLLQVHRNTYAIVVSTENITQNLYLGKNKSMLVTNCLFRVGGAAVLLSNRSRDRNRAKYELVHTVRIHTGSDDRSFECATQEEDEDGIIGVTLTKNLPMVAARTLKINIATLGPLVLPLKEKLAFFITFVKKKYFKPELRNYTPDFKLAFEHFCIHAGGRALIDELEKNLKLSPLHVEASRMTLHRFGNTSSSSIWYELAYTEAKGRMKEGDRIWQIALGSGFKCNSSVWVALRDVKPSANSPWEDCMDRYPVEIDI

SEQ ID NO: 72086 - DNA, 1047 bp, Arabidopsis thaliana
  misc_feature (1)..(1047): Ceres Seq. ID no. 4917323
  misc_feature: MA Experiment ID: 20000307 Result: Down-regulated in Transcription
  misc_feature: MA Experiment 20000307 PARAMETER Experiment Name: At_Germinating_Seeds_Sub_P Parameter: Age (hr) Value: 24 vs. 0
  misc_feature: MA Experiment 20000307 PARAMETER Experiment Name: At_Germinating_Seeds_Sub_P Parameter: Organism Value: A. thaliana
  misc_feature: MA Experiment 20000307 PARAMETER Experiment Name: At_Germinating_Seeds_Sub_P Parameter: Plant Line Value: WS
  misc_feature: MA Experiment 20000307 PARAMETER Experiment Name: At_Germinating_Seeds_Sub_P Parameter: Tissue Value: Germinating Seeds
  misc_feature: MA Experiment ID: 20000347 Result: Up-regulated in Transcription
  misc_feature: MA Experiment 20000347 PARAMETER Experiment Name: At_2mM_SA_Sub_P Parameter: Age (day) Value: 14
  misc_feature: MA Experiment 20000347 PARAMETER Experiment Name: At_2mM_SA_Sub_P Parameter: Organism Value: A. thaliana
  misc_feature: MA Experiment 20000347 PARAMETER Experiment Name: At_2mM_SA_Sub_P Parameter: Plant Line Value: WS
  misc_feature: MA Experiment 20000347 PARAMETER Experiment Name: At_2mM_SA_Sub_P Parameter: Timepoint (hr) Value: 6
  misc_feature: MA Experiment 20000347 PARAMETER Experiment Name: At_2mM_SA_Sub_P Parameter: Tissue Value: Aerial
  misc_feature: MA Experiment 20000347 PARAMETER Experiment Name: At_2mM_SA_Sub_P Parameter: Treatment Value: 2mM SA vs. No Treatment
atgaaaggtctcttcaagaacaaatcacgtcttcctggtgaaatcgtacgtcagactcgagatctcatcgctttagcggaatccgaagaagaagaaaccgatgcgagaaactcgaaaaggttagggatttgtgcggagttgtgtcgaaacattagagatttgaaatcgattctttatggtaatggtgaagctgagcctgttcctgaagcttgtcttttgttaactcaagagtttttccgagcagacacgcttcgtcctttgatcaaatctataccaaaacttgacctagaagcaagaaaagacgcgacacagattgtcgcgaatcttcagaagcaacaagtcgaatttcgactcgttgcttctgaatatcttgaatcgaacttagatgttatcgattcgttagtcgaaggtatcgatcacgaccatgagctggcgttgcattacacgggaatgcttaaagaatgtgtgcggcatcaggttgttgcaaagtacatactcgaatcgaagaatttggagaagtttttcgattatgttcagcttccgtatttcgatgtagctaccgatgctagcaagatcttcagagagcttttgacgaggcataaatcgactgtagcggagtatcttgcgaagaactacgaatggtttttcgcagagtataacaccaagttgttggagaaaggaagctattttacgaagagacaagcgtcgaaattgcttggagatgtgttgatggatcgttcgaattcaggtgtgatggtaaagtatgtgagcagtttggataatttgagaatcatgatgaatcttttaagagaaccaaccaagaacattcagttagaagcatttcatatctttaaactctttgtggcaaacgagaacaaacctgaggatatcgtggcgattctcgtggcgaatcggaccaagattcttcgtttgtttgctgatttgaaacctgagaaagaagatgtaggttttgaaactgataaagcattggttatgaatgagattgctacactttctcttctcgatatcaaaaccgcagatcgataa

SEQ ID NO: 72087 - protein, 348 aa, Arabidopsis thaliana
  peptide (1)..(348): Ceres Seq. ID no. 4917324
  misc_feature (39)..(340): Pfam Name: Mo25 protein family Pfam Description: Mo25 protein family
  misc_feature (1)..(348): Homolog of NCBI NO: 15227629 NR Description: unknown protein; protein id: At2g03410.1
  misc_feature (1)..(343): Homolog of NCBI NO: 15214076 NR Description: Hypothetical MO25-like protein At5g47540 emb|CAB78730.1~gene_id:MNJ7.13~similar to unknown protein thaliana] >gi|16226301|gb|AAL16128.1|AF428296_1 AT5g47540/MNJ7_13
  misc_feature (1)..(343): Homolog of NCBI NO: 15238126 NR Description: putative protein; protein id: At5g47540.1
  misc_feature (1)..(343): Homolog of NCBI NO: 15236013 NR Description: putative protein; protein id: At4g17270.1, by cDNA: gi_14190518, supported by cDNA: gi_15810066 [Arabidopsis
  misc_feature (46)..(343): Homolog of NCBI NO: 7485184 NR Description: hypothetical protein - Arabidopsis thaliana
  misc_feature (1)..(338): Homolog of NCBI NO: 34901086 NR Description: putative MO25 protein (CGI-66) [Oryza sativa
  misc_feature (5)..(338): Homolog of NCBI NO: 31982582 NR Description: MO25 protein; calcium binding protein, 39 kDa musculus] >gi|547911|sp|Q06138|MO25_MOUSE MO25 protein
  misc_feature (5)..(338): Homolog of NCBI NO: 34877516 NR Description: similar to MO25 protein [Rattus norvegicus]
  misc_feature (5)..(338): Homolog of NCBI NO: 7706481 NR Description: MO25 protein [Homo sapiens]
  misc_feature (4)..(338): Homolog of NCBI NO: 30923384 NR Description: MO25-like protein >gi|16359342|gb|AAH16128.1| protein [Mus musculus] >gi|26345724|dbj|BAC36513.1| unnamed
MKGLFKNKSRLPGEIVRQTRDLIALAESEEEETDARNSKRLGICAELCRNIRDLKSILYGNGEAEPVPEACLLLTQEFFRADTLRPLIKSIPKLDLEARKDATQIVANLQKQQVEFRLVASEYLESNLDVIDSLVEGIDHDHELALHYTGMLKECVRHQVVAKYILESKNLEKFFDYVQLPYFDVATDASKIFRELLTRHKSTVAEYLAKNYEWFFAEYNTKLLEKGSYFTKRQASKLLGDVLMDRSNSGVMVKYVSSLDNLRIMMNLLREPTKNIQLEAFHIFKLFVANENKPEDIVAILVANRTKILRLFADLKPEKEDVGFETDKALVMNEIATLSLLDIKTADR

SEQ ID NO: 72088 - protein, 198 aa, Arabidopsis thaliana
  peptide (1)..(198): Ceres Seq. ID no. 4917325
  misc_feature (1)..(190): Pfam Name: Mo25 protein family Pfam Description: Mo25 protein family
  misc_feature (1)..(198): Homolog of NCBI NO: 15227629 NR Description: unknown protein; protein id: At2g03410.1
  misc_feature (1)..(193): Homolog of NCBI NO: 15214076 NR Description: Hypothetical MO25-like protein At5g47540 emb|CAB78730.1~gene_id:MNJ7.13~similar to unknown protein thaliana] >gi|16226301|gb|AAL16128.1|AF428296_1 AT5g47540/MNJ7_13
  misc_feature (1)..(193): Homolog of NCBI NO: 15238126 NR Description: putative protein; protein id: At5g47540.1
  misc_feature (1)..(193): Homolog of NCBI NO: 15236013 NR Description: putative protein; protein id: At4g17270.1, by cDNA: gi_14190518, supported by cDNA: gi_15810066 [Arabidopsis
  misc_feature (1)..(193): Homolog of NCBI NO: 7485184 NR Description: hypothetical protein - Arabidopsis thaliana
  misc_feature (1)..(188): Homolog of NCBI NO: 34901086 NR Description: putative MO25 protein (CGI-66) [Oryza sativa
  misc_feature (1)..(188): Homolog of NCBI NO: 31982582 NR Description: MO25 protein; calcium binding protein, 39 kDa musculus] >gi|547911|sp|Q06138|MO25_MOUSE MO25 protein
  misc_feature (1)..(188): Homolog of NCBI NO: 34877516 NR Description: similar to MO25 protein [Rattus norvegicus]
  misc_feature (1)..(188): Homolog of NCBI NO: 7706481 NR Description: MO25 protein [Homo sapiens]
  misc_feature (1)..(188): Homolog of NCBI NO: 30923384 NR Description: MO25-like protein >gi|16359342|gb|AAH16128.1| protein [Mus musculus] >gi|26345724|dbj|BAC36513.1| unnamed
MLKECVRHQVVAKYILESKNLEKFFDYVQLPYFDVATDASKIFRELLTRHKSTVAEYLAKNYEWFFAEYNTKLLEKGSYFTKRQASKLLGDVLMDRSNSGVMVKYVSSLDNLRIMMNLLREPTKNIQLEAFHIFKLFVANENKPEDIVAILVANRTKILRLFADLKPEKEDVGFETDKALVMNEIATLSLLDIKTADR

SEQ ID NO: 72089 - DNA, 1074 bp, Arabidopsis thaliana
  misc_feature (1)..(1074): Ceres Seq. ID no. 4917434
  misc_feature: MA Experiment ID: 20000315 Result: Down-regulated in Transcription
  misc_feature: MA Experiment 20000315 PARAMETER Experiment Name: At_14day_Shoots-Roots_Sub_P Parameter: Age (day) Value: 14
  misc_feature: MA Experiment 20000315 PARAMETER Experiment Name: At_14day_Shoots-Roots_Sub_P Parameter: Organism Value: A. thaliana
  misc_feature: MA Experiment 20000315 PARAMETER Experiment Name: At_14day_Shoots-Roots_Sub_P Parameter: Plant Line Value: WS
  misc_feature: MA Experiment 20000315 PARAMETER Experiment Name: At_14day_Shoots-Roots_Sub_P Parameter: Tissue Value: Shoots vs. Whole Plant
  misc_feature: MA Experiment ID: 20000328 Result: Down-regulated in Transcription
  misc_feature: MA Experiment 20000328 PARAMETER Experiment Name: At_42deg_Heat_Sub_P Parameter: Age (day) Value: 14
  misc_feature: MA Experiment 20000328 PARAMETER Experiment Name: At_42deg_Heat_Sub_P Parameter: Organism Value: A. thaliana
  misc_feature: MA Experiment 20000328 PARAMETER Experiment Name: At_42deg_Heat_Sub_P Parameter: Plant Line Value: WS
  misc_feature: MA Experiment 20000328 PARAMETER Experiment Name: At_42deg_Heat_Sub_P Parameter: Temperature (deg C) Value: 42 vs. 22
  misc_feature: MA Experiment 20000328 PARAMETER Experiment Name: At_42deg_Heat_Sub_P Parameter: Timepoint (hr) Value: 6
  misc_feature: MA Experiment 20000328 PARAMETER Experiment Name: At_42deg_Heat_Sub_P Parameter: Tissue Value: Aerial
  misc_feature: MA Experiment ID: 20000347 Result: Up-regulated in Transcription
  misc_feature: MA Experiment 20000347 PARAMETER Experiment Name: At_2mM_SA_Sub_P Parameter: Age (day) Value: 14
  misc_feature: MA Experiment 20000347 PARAMETER Experiment Name: At_2mM_SA_Sub_P Parameter: Organism Value: A. thaliana
  misc_feature: MA Experiment 20000347 PARAMETER Experiment Name: At_2mM_SA_Sub_P Parameter: Plant Line Value: WS
  misc_feature: MA Experiment 20000347 PARAMETER Experiment Name: At_2mM_SA_Sub_P Parameter: Timepoint (hr) Value: 6
  misc_feature: MA Experiment 20000347 PARAMETER Experiment Name: At_2mM_SA_Sub_P Parameter: Tissue Value: Aerial
  misc_feature: MA Experiment 20000347 PARAMETER Experiment Name: At_2mM_SA_Sub_P Parameter: Treatment Value: 2mM SA vs. No Treatment
atgatgcagagtgacctcttgaaagagcgaggtgttgatgattcatctccttactctccagatgaaaagaatgtctctggtttccagcttgattcccatgacctagtgtctggtgaatgttcgacagtatatccgcggaagtcaatatcattgccgtcatctccgcgaagctatcaaattcaattatctgaaagaagtgaacattcacctcaagaaataagccacatttggaatgaagtgctggagtctccaatgttccagaataaacctttgttaccatttgaagaatggaacatagatttctccaagttgaaagttggggcttctgttgggagtggaacttctggagtagtatgtcgtggcgtctggaataaaactgaagttgcgatcaagatatttcttggacaacagcttacagctgagaacatgaaagttttctgcaatgagatatctattcttagccgtcttcaacatcccaatgttattctgctccttggagcatgcacaaagcctcctcagttatcactggtcacagagtatatgagtacggggtccttgtatgatgtgatccgtaccagaaaaaaggagttgagctggcaaaggaaactaaagattctggctgaaatttgcaggggtttgatgtacatacacaagatggggatagtccaccgtgatctaaccagtgcgaactgcctgttaaacaagtcgatagtcaagatctgtgattttgggctctcgagaaggatgacaggtacggcagtgaaagatactgaagctgcaggaactcctgagtggatggctcctgaacttatccgcaatgaacccgtcacagaaaaaagcgacatctttagctttggtgttataatgtgggaacttagcactctatccaagccctggaaaggagtcccaaaagaaaaagtcattcatatcgttgcaaacgaaggagcccggctcaaaatacctgaaggaccactacagaagcttattgcagattgttggtcggaaccagagcaaaggccgagctgtaaagagatactgcaccgtcttaagacctgcgagattccgatttgctga

SEQ ID NO: 72090 - protein, 357 aa, Arabidopsis thaliana
  peptide (1)..(357): Ceres Seq. ID no. 4917435
  misc_feature (104)..(349): Pfam Name: Protein kinase domain Pfam Description: Protein kinase domain
  misc_feature (1)..(357): Homolog of NCBI NO: 15227972 NR Description: putative protein kinase; protein id: At2g42630.1
  misc_feature (1)..(357): Homolog of NCBI NO: 18411001 NR Description: putative protein; protein id: At3g58640.1, by cDNA: gi_15146175 [Arabidopsis thaliana] AT3g58640/F14P22_230 [Arabidopsis thaliana]
  misc_feature (1)..(357): Homolog of NCBI NO: 22655056 NR Description: unknown protein [Arabidopsis thaliana]
  misc_feature (13)..(357): Homolog of NCBI NO: 11346387 NR Description: hypothetical protein F14P22.230 - Arabidopsis >gi|6735381|emb|CAB68202.1| putative protein [Arabidopsis
  misc_feature (49)..(357): Homolog of NCBI NO: 30684784 NR Description: protein kinase family [Arabidopsis thaliana]
  misc_feature (49)..(330): Homolog of NCBI NO: 25408119 NR Description: probable protein kinase [imported] - Arabidopsis >gi|3201626|gb|AAC20735.1| putative protein kinase [Arabidopsis
  misc_feature (212)..(356): Homolog of NCBI NO: 34911062 NR Description: P0485G01.18 [Oryza sativa (japonica
  misc_feature (116)..(161): Homolog of NCBI NO: 34911062 NR Description: P0485G01.18 [Oryza sativa (japonica
  misc_feature (90)..(350): Homolog of NCBI NO: 25387032 NR Description: probable mitogen-activated protein kinase MAP3K
  misc_feature (90)..(350): Homolog of NCBI NO: 22326737 NR Description: MAP3K delta-1 protein kinase; protein id: supported by cDNA: gi_18700074 [Arabidopsis thaliana]
MMQSDLLKERGVDDSSPYSPDEKNVSGFQLDSHDLVSGECSTVYPRKSISLPSSPRSYQIQLSERSEHSPQEISHIWNEVLESPMFQNKPLLPFEEWNIDFSKLKVGASVGSGTSGVVCRGVWNKTEVAIKIFLGQQLTAENMKVFCNEISILSRLQHPNVILLLGACTKPPQLSLVTEYMSTGSLYDVIRTRKKELSWQRKLKILAEICRGLMYIHKMGIVHRDLTSANCLLNKSIVKICDFGLSRRMTGTAVKDTEAAGTPEWMAPELIRNEPVTEKSDIFSFGVIMWELSTLSKPWKGVPKEKVIHIVANEGARLKIPEGPLQKLIADCWSEPEQRPSCKEILHRLKTCEIPIC

SEQ ID NO: 72091 - protein, 356 aa, Arabidopsis thaliana
  peptide (1)..(356): Ceres Seq. ID no. 4917436
  misc_feature (103)..(348): Pfam Name: Protein kinase domain Pfam Description: Protein kinase domain
  misc_feature (1)..(356): Homolog of NCBI NO: 15227972 NR Description: putative protein kinase; protein id: At2g42630.1
  misc_feature (1)..(356): Homolog of NCBI NO: 18411001 NR Description: putative protein; protein id: At3g58640.1, by cDNA: gi_15146175 [Arabidopsis thaliana] AT3g58640/F14P22_230 [Arabidopsis thaliana]
  misc_feature (1)..(356): Homolog of NCBI NO: 22655056 NR Description: unknown protein [Arabidopsis thaliana]
  misc_feature (12)..(356): Homolog of NCBI NO: 11346387 NR Description: hypothetical protein F14P22.230 - Arabidopsis >gi|6735381|emb|CAB68202.1| putative protein [Arabidopsis
  misc_feature (48)..(356): Homolog of NCBI NO: 30684784 NR Description: protein kinase family [Arabidopsis thaliana]
  misc_feature (48)..(329): Homolog of NCBI NO: 25408119 NR Description: probable protein kinase [imported] - Arabidopsis >gi|3201626|gb|AAC20735.1| putative protein kinase [Arabidopsis
  misc_feature (211)..(355): Homolog of NCBI NO: 34911062 NR Description: P0485G01.18 [Oryza sativa (japonica
  misc_feature (115)..(160): Homolog of NCBI NO: 34911062 NR Description: P0485G01.18 [Oryza sativa (japonica
  misc_feature (89)..(349): Homolog of NCBI NO: 25387032 NR Description: probable mitogen-activated protein kinase MAP3K
  misc_feature (89)..(349): Homolog of NCBI NO: 22326737 NR Description: MAP3K delta-1 protein kinase; protein id: supported by cDNA: gi_18700074 [Arabidopsis thaliana]
MQSDLLKERGVDDSSPYSPDEKNVSGFQLDSHDLVSGECSTVYPRKSISLPSSPRSYQIQLSERSEHSPQEISHIWNEVLESPMFQNKPLLPFEEWNIDFSKLKVGASVGSGTSGVVCRGVWNKTEVAIKIFLGQQLTAENMKVFCNEISILSRLQHPNVILLLGACTKPPQLSLVTEYMSTGSLYDVIRTRKKELSWQRKLKILAEICRGLMYIHKMGIVHRDLTSANCLLNKSIVKICDFGLSRRMTGTAVKDTEAAGTPEWMAPELIRNEPVTEKSDIFSFGVIMWELSTLSKPWKGVPKEKVIHIVANEGARLKIPEGPLQKLIADCWSEPEQRPSCKEILHRLKTCEIPIC

SEQ ID NO: 72092 - protein, 273 aa, Arabidopsis thaliana
  peptide (1)..(273): Ceres Seq. ID no. 4917437
  misc_feature (20)..(265): Pfam Name: Protein kinase domain Pfam Description: Protein kinase domain
  misc_feature (1)..(273): Homolog of NCBI NO: 15227972 NR Description: putative protein kinase; protein id: At2g42630.1
  misc_feature (1)..(273): Homolog of NCBI NO: 18411001 NR Description: putative protein; protein id: At3g58640.1, by cDNA: gi_15146175 [Arabidopsis thaliana] AT3g58640/F14P22_230 [Arabidopsis thaliana]
  misc_feature (1)..(273): Homolog of NCBI NO: 22655056 NR Description: unknown protein [Arabidopsis thaliana]
  misc_feature (1)..(273): Homolog of NCBI NO: 11346387 NR Description: hypothetical protein F14P22.230 - Arabidopsis >gi|6735381|emb|CAB68202.1| putative protein [Arabidopsis
  misc_feature (1)..(273): Homolog of NCBI NO: 30684784 NR Description: protein kinase family [Arabidopsis thaliana]
  misc_feature (1)..(246): Homolog of NCBI NO: 25408119 NR Description: probable protein kinase [imported] - Arabidopsis >gi|3201626|gb|AAC20735.1| putative protein kinase [Arabidopsis
  misc_feature (128)..(272): Homolog of NCBI NO: 34911062 NR Description: P0485G01.18 [Oryza sativa (japonica
  misc_feature (32)..(77): Homolog of NCBI NO: 34911062 NR Description: P0485G01.18 [Oryza sativa (japonica
  misc_feature (6)..(266): Homolog of NCBI NO: 25387032 NR Description: probable mitogen-activated protein kinase MAP3K
  misc_feature (6)..(266): Homolog of NCBI NO: 22326737 NR Description: MAP3K delta-1 protein kinase; protein id: supported by cDNA: gi_18700074 [Arabidopsis thaliana]
MFQNKPLLPFEEWNIDFSKLKVGASVGSGTSGVVCRGVWNKTEVAIKIFLGQQLTAENMKVFCNEISILSRLQHPNVILLLGACTKPPQLSLVTEYMSTGSLYDVIRTRKKELSWQRKLKILAEICRGLMYIHKMGIVHRDLTSANCLLNKSIVKICDFGLSRRMTGTAVKDTEAAGTPEWMAPELIRNEPVTEKSDIFSFGVIMWELSTLSKPWKGVPKEKVIHIVANEGARLKIPEGPLQKLIADCWSEPEQRPSCKEILHRLKTCEIPIC

SEQ ID NO: 72093 - DNA, 1533 bp, Arabidopsis thaliana
  misc_feature (1)..(1533): Ceres Seq. ID no. 4917453
  misc_feature: MA Experiment ID: 20000171 Result: Up-regulated in Transcription
  misc_feature: MA Experiment 20000171 PARAMETER Experiment Name: At_42deg_Heat_P Parameter: Age (day) Value: 14
  misc_feature: MA Experiment 20000171 PARAMETER Experiment Name: At_42deg_Heat_P Parameter: Organism Value: A. thaliana
  misc_feature: MA Experiment 20000171 PARAMETER Experiment Name: At_42deg_Heat_P Parameter: Plant Line Value: WS
  misc_feature: MA Experiment 20000171 PARAMETER Experiment Name: At_42deg_Heat_P Parameter: Temperature (deg C) Value: 42 vs. 22
  misc_feature: MA Experiment 20000171 PARAMETER Experiment Name: At_42deg_Heat_P Parameter: Timepoint (hr) Value: 1
  misc_feature: MA Experiment 20000171 PARAMETER Experiment Name: At_42deg_Heat_P Parameter: Tissue Value: Aerial
  misc_feature: MA Experiment ID: 20000173 Result: Up-regulated in Transcription
  misc_feature: MA Experiment 20000173 PARAMETER Experiment Name: At_42deg_Heat_P Parameter: Age (day) Value: 14
  misc_feature: MA Experiment 20000173 PARAMETER Experiment Name: At_42deg_Heat_P Parameter: Organism Value: A. thaliana
  misc_feature: MA Experiment 20000173 PARAMETER Experiment Name: At_42deg_Heat_P Parameter: Plant Line Value: WS
  misc_feature: MA Experiment 20000173 PARAMETER Experiment Name: At_42deg_Heat_P Parameter: Temperature (deg C) Value: 42 vs. 22
  misc_feature: MA Experiment 20000173 PARAMETER Experiment Name: At_42deg_Heat_P Parameter: Timepoint (hr) Value: 6
  misc_feature: MA Experiment 20000173 PARAMETER Experiment Name: At_42deg_Heat_P Parameter: Tissue Value: Aerial
  misc_feature: MA Experiment ID: 20001248 Result: Down-regulated in Transcription
  misc_feature: MA Experiment 20001248 PARAMETER Experiment Name: At_Far-red-induction_P Parameter: Age (day) Value: 7
  misc_feature: MA Experiment 20001248 PARAMETER Experiment Name: At_Far-red-induction_P Parameter: Light Value: Far-red vs. White
  misc_feature: MA Experiment 20001248 PARAMETER Experiment Name: At_Far-red-induction_P Parameter: Organism Value: A. thaliana
  misc_feature: MA Experiment 20001248 PARAMETER Experiment Name: At_Far-red-induction_P Parameter: Plant Line Value: Columbia
  misc_feature: MA Experiment 20001248 PARAMETER Experiment Name: At_Far-red-induction_P Parameter: Timepoint (hr) Value: 4
  misc_feature: MA Experiment 20001248 PARAMETER Experiment Name: At_Far-red-induction_P Parameter: Tissue Value: Whole Plant
  misc_feature: MA Experiment ID: 20001560 Result: Down-regulated in Transcription
  misc_feature: MA Experiment 20001560 PARAMETER Experiment Name: At_Drought_Soil_Dry_P Parameter: Age (day) Value: 28
  misc_feature: MA Experiment 20001560 PARAMETER Experiment Name: At_Drought_Soil_Dry_P Parameter: Organism Value: A. thaliana
  misc_feature: MA Experiment 20001560 PARAMETER Experiment Name: At_Drought_Soil_Dry_P Parameter: Plant Line Value: WS
  misc_feature: MA Experiment 20001560 PARAMETER Experiment Name: At_Drought_Soil_Dry_P Parameter: Post Timepoint (hr) Value: None
  misc_feature: MA Experiment 20001560 PARAMETER Experiment Name: At_Drought_Soil_Dry_P Parameter: Post-Treatment Value: None
  misc_feature: MA Experiment 20001560 PARAMETER Experiment Name: At_Drought_Soil_Dry_P Parameter: Timepoint (day) Value: 14
  misc_feature: MA Experiment 20001560 PARAMETER Experiment Name: At_Drought_Soil_Dry_P Parameter: Treatment Value: Drought vs. No Drought
  misc_feature: MA Experiment ID: 20001757 Result: Down-regulated in Transcription
  misc_feature: MA Experiment 20001757 PARAMETER Experiment Name: At_50mM_NH4NO3_L-to-H_P Parameter: Timepoint (hr) Value: 6
  misc_feature: MA Experiment 20001757 PARAMETER Experiment Name: At_50mM_NH4NO3_L-to-H_P Parameter: Tissue Value: Leaf
  misc_feature: MA Experiment 20001757 PARAMETER Experiment Name: At_50mM_NH4NO3_L-to-H_P Parameter: Treatment Value: 50mM NH4NO3 vs 100mM Mannitol
atgttcatcgagagcttcaaagtagagagtccaaatgtcaaatacacagagaatgagatcaattcggtgtacgattacgaaacaacagaggtcgtccacgagaatcgtaacggtacatatcaatgggtcgtgaagccaaagactgtcaaatacgatttcaaaacagacactcgtgtccccaaattaggggttatgcttgttggttggggaggaaacaatggatcaacactaaccgctggtgtcattgctaacaaagaaggaatatcgtgggcgactaaagacaaagtgcaacaagctaattactttggttcacttactcaagcttcatcgattcgtgttggctcttacaatggtgaagagatctatgctcctttcaagagtcttcttccaatggtgaatccagaggatgttgtgtttggtggttgggatataagtgacatgaatttagcagacgctatggctagagctagagttcttgatattgatctgcagaaacaacttagaccttacatggagaacatgatcccacttcctggtatctatgaccctgatttcatcgctgctaatcaaggttcacgtgctaatagcgtgatcaaaggtaccaagaaggaacaagttgatcacatcatcaaggacatgagggagtttaaggagaagaacaaagtggataagttggttgtgttatggactgcaaacacagagcgttatagcaatgtgattgtaggacttaacgatacgacggagaatctattggcttctgttgaaaaggacgagtctgagatctcgccgtctacgttgtatgcgattgcttgtgttcttgaaggcattcctttcatcaatgggagtcctcagaatacttttgtccccggtcttatcgaattggctatatcgaagaattgtttgattggtggggatgatttcaagagtggtcagactaagatgaaatccgttttggttgatttccttgttggagctggcattaagcctacttcgattgtgagctataatcatttgggaaacaacgacgggatgaacctctcagcgccacagactttccgctctaaggagatttcaaagagcaatgttgtagacgacatggtagctagtaatggcatcctctttgagcctggtgaacaccctgaccatgtcgttgtcatcaagtatgtgccatatgttgcggatagtaaaagagcaatggatgagtacacgtctgagatattcatgggagggaggaacactatagtgttgcataacacttgtgaggactctctcttggctgcaccaattatcttggatcttgtccttctcgctgaactcagcaccagaatccaatttaaagctgaaggagaggggaagtttcactctttccacccggtagctaccatactcagttacctcacaaaggcacctcttgtaccgcccggaacaccggtggttaacgctctgtcgaagcagcgggcaatgctggaaaacattcttagggcatgtgttgggcttgcgccagagaacaacatgatcatggagtacaagtga

SEQ ID NO: 72094 - protein, 510 aa, Arabidopsis thaliana; identical to SEQ ID NO: 44889
  peptide (1)..(510): Ceres Seq. ID no. 4917454
  misc_feature (61)..(495): Pfam Name: Myo-inositol-1-phosphate synthase Pfam Description: Myo-inositol-1-phosphate synthase
  misc_feature (1)..(510): Homolog of NCBI NO: 15227169 NR Description: putative myo-inositol 1-phosphate synthase; id: At2g22240.1, supported by cDNA: gi_15450746, supported by
  misc_feature (1)..(510): Homolog of NCBI NO: 973313 NR Description: myo-inositol 1-phosphate synthase isozyme-2
  misc_feature (1)..(510): Homolog of NCBI NO: 14548098 NR Description: Inositol-3-phosphate synthase
  misc_feature (1)..(510): Homolog of NCBI NO: 14548093 NR Description: Inositol-3-phosphate synthase
  misc_feature (1)..(510): Homolog of NCBI NO: 15236025 NR Description: myo-inositol-1-phosphate synthase; protein id: supported by cDNA: 1978., supported by cDNA: gi_1161311, by cDNA: gi_13937199, supported by cDNA: gi_14334743 [Arabidopsis
  misc_feature (2)..(510): Homolog of NCBI NO: 7488491 NR Description: inositol-3-phosphate synthase (EC 5.5.1.4)
  misc_feature (1)..(510): Homolog of NCBI NO: 1161312 NR Description: myo-inositol-1-phosphate synthase
  misc_feature (1)..(510): Homolog of NCBI NO: 14548092 NR Description: Inositol-3-phosphate synthase
  misc_feature (1)..(510): Homolog of NCBI NO: 14548095 NR Description: Inositol-3-phosphate synthase
  misc_feature (1)..(510): Homolog of NCBI NO: 14548099 NR Description: Inositol-3-phosphate synthase

SEQ ID NO: 72095 - protein, 446 aa, Arabidopsis thaliana
  peptide (1)..(446): Ceres Seq. ID no. 4917455
  misc_feature (1)..(431): Pfam Name: Myo-inositol-1-phosphate synthase Pfam Description: Myo-inositol-1-phosphate synthase
  misc_feature (1)..(446): Homolog of NCBI NO: 15227169 NR Description: putative myo-inositol 1-phosphate synthase; id: At2g22240.1, supported by cDNA: gi_15450746, supported by
  misc_feature (1)..(446): Homolog of NCBI NO: 973313 NR Description: myo-inositol 1-phosphate synthase isozyme-2
  misc_feature (1)..(446): Homolog of NCBI NO: 14548098 NR Description: Inositol-3-phosphate synthase
  misc_feature (1)..(446): Homolog of NCBI NO: 14548093 NR Description: Inositol-3-phosphate synthase
  misc_feature (1)..(446): Homolog of NCBI NO: 15236025 NR Description: myo-inositol-1-phosphate synthase; protein id: supported by cDNA: 1978., supported by cDNA: gi_1161311, by cDNA: gi_13937199, supported by cDNA: gi_14334743 [Arabidopsis
  misc_feature (1)..(446): Homolog of NCBI NO: 7488491 NR Description: inositol-3-phosphate synthase (EC 5.5.1.4)
  misc_feature (1)..(446): Homolog of NCBI NO: 1161312 NR Description: myo-inositol-1-phosphate synthase
  misc_feature (1)..(446): Homolog of NCBI NO: 14548092 NR Description: Inositol-3-phosphate synthase
  misc_feature (1)..(446): Homolog of NCBI NO: 14548095 NR Description: Inositol-3-phosphate synthase
  misc_feature (1)..(446): Homolog of NCBI NO: 14548099 NR Description: Inositol-3-phosphate synthase
MLVGWGGNNGSTLTAGVIANKEGISWATKDKVQQANYFGSLTQASSIRVGSYNGEEIYAPFKSLLPMVNPEDVVFGGWDISDMNLADAMARARVLDIDLQKQLRPYMENMIPLPGIYDPDFIAANQGSRANSVIKGTKKEQVDHIIKDMREFKEKNKVDKLVVLWTANTERYSNVIVGLNDTTENLLASVEKDESEISPSTLYAIACVLEGIPFINGSPQNTFVPGLIELAISKNCLIGGDDFKSGQTKMKSVLVDFLVGAGIKPTSIVSYNHLGNNDGMNLSAPQTFRSKEISKSNVVDDMVASNGILFEPGEHPDHVVVIKYVPYVADSKRAMDEYTSEIFMGGRNTIVLHNTCEDSLLAAPIILDLVLLAELSTRIQFKAEGEGKFHSFHPVATILSYLTKAPLVPPGTPVVNALSKQRAMLENILRACVGLAPENNMIMEYK

SEQ ID NO: 72096 - protein, 380 aa, Arabidopsis thaliana
  peptide (1)..(380): Ceres Seq. ID no. 4917456
  misc_feature (1)..(365): Pfam Name: Myo-inositol-1-phosphate synthase Pfam Description: Myo-inositol-1-phosphate synthase
  misc_feature (1)..(380): Homolog of NCBI NO: 15227169 NR Description: putative myo-inositol 1-phosphate synthase; id: At2g22240.1, supported by cDNA: gi_15450746, supported by
  misc_feature (1)..(380): Homolog of NCBI NO: 973313 NR Description: myo-inositol 1-phosphate synthase isozyme-2
  misc_feature (1)..(380): Homolog of NCBI NO: 14548098 NR Description: Inositol-3-phosphate synthase
  misc_feature (1)..(380): Homolog of NCBI NO: 14548093 NR Description: Inositol-3-phosphate synthase
  misc_feature (1)..(380): Homolog of NCBI NO: 15236025 NR Description: myo-inositol-1-phosphate synthase; protein id: supported by cDNA: 1978., supported by cDNA: gi_1161311, by cDNA: gi_13937199, supported by cDNA: gi_14334743 [Arabidopsis
  misc_feature (1)..(380): Homolog of NCBI NO: 7488491 NR Description: inositol-3-phosphate synthase (EC 5.5.1.4)
  misc_feature (1)..(380): Homolog of NCBI NO: 1161312 NR Description: myo-inositol-1-phosphate synthase
  misc_feature (1)..(380): Homolog of NCBI NO: 14548092 NR Description: Inositol-3-phosphate synthase
  misc_feature (1)..(380): Homolog of NCBI NO: 14548095 NR Description: Inositol-3-phosphate synthase
  misc_feature (1)..(380): Homolog of NCBI NO: 14548099 NR Description: Inositol-3-phosphate synthase
MVNPEDVVFGGWDISDMNLADAMARARVLDIDLQKQLRPYMENMIPLPGIYDPDFIAANQGSRANSVIKGTKKEQVDHIIKDMREFKEKNKVDKLVVLWTANTERYSNVIVGLNDTTENLLASVEKDESEISPSTLYAIACVLEGIPFINGSPQNTFVPGLIELAISKNCLIGGDDFKSGQTKMKSVLVDFLVGAGIKPTSIVSYNHLGNNDGMNLSAPQTFRSKEISKSNVVDDMVASNGILFEPGEHPDHVVVIKYVPYVADSKRAMDEYTSEIFMGGRNTIVLHNTCEDSLLAAPIILDLVLLAELSTRIQFKAEGEGKFHSFHPVATILSYLTKAPLVPPGTPVVNALSKQRAMLENILRACVGLAPENNMIMEYK

SEQ ID NO: 72097 - DNA, 1146 bp, Arabidopsis thaliana
  misc_feature (1)..(1146): Ceres Seq. ID no. 4917476
  misc_feature: MA Experiment ID: 20000173 Result: Down-regulated in Transcription
  misc_feature: MA Experiment 20000173 PARAMETER Experiment Name: At_42deg_Heat_P Parameter: Age (day) Value: 14
  misc_feature: MA Experiment 20000173 PARAMETER Experiment Name: At_42deg_Heat_P Parameter: Organism Value: A. thaliana
  misc_feature: MA Experiment 20000173 PARAMETER Experiment Name: At_42deg_Heat_P Parameter: Plant Line Value: WS
  misc_feature: MA Experiment 20000173 PARAMETER Experiment Name: At_42deg_Heat_P Parameter: Temperature (deg C) Value: 42 vs. 22
  misc_feature: MA Experiment 20000173 PARAMETER Experiment Name: At_42deg_Heat_P Parameter: Timepoint (hr) Value: 6
  misc_feature: MA Experiment 20000173 PARAMETER Experiment Name: At_42deg_Heat_P Parameter: Tissue Value: Aerial
  misc_feature: MA Experiment ID: 20000182 Result: Up-regulated in Transcription
  misc_feature: MA Experiment 20000182 PARAMETER Experiment Name: At_2mM_SA_P Parameter: Age (day) Value: 14
  misc_feature: MA Experiment 20000182 PARAMETER Experiment Name: At_2mM_SA_P Parameter: Organism Value: A. thaliana
  misc_feature: MA Experiment 20000182 PARAMETER Experiment Name: At_2mM_SA_P Parameter: Plant Line Value: WS
  misc_feature: MA Experiment 20000182 PARAMETER Experiment Name: At_2mM_SA_P Parameter: Timepoint (hr) Value: 6
  misc_feature: MA Experiment 20000182 PARAMETER Experiment Name: At_2mM_SA_P Parameter: Tissue Value: Aerial
  misc_feature: MA Experiment 20000182 PARAMETER Experiment Name: At_2mM_SA_P Parameter: Treatment Value: 2mM SA vs. No Treatment
  misc_feature: MA Experiment ID: 20000184 Result: Down-regulated in Transcription
  misc_feature: MA Experiment 20000184 PARAMETER Experiment Name: At_Shoots__P Parameter: Age (day) Value: 7
  misc_feature: MA Experiment 20000184 PARAMETER Experiment Name: At_Shoots__P Parameter: Tissue Value: Shoots vs. Whole Plant
  misc_feature: MA Experiment ID: 20000438 Result: Down-regulated in Transcription
  misc_feature: MA Experiment 20000438 PARAMETER Experiment Name: At_Shoots__P Parameter: Age (day) Value: 14
  misc_feature: MA Experiment 20000438 PARAMETER Experiment Name: At_Shoots__P Parameter: Tissue Value: Shoots vs. Whole Plant
  misc_feature: MA Experiment ID: 20001247 Result: Up-regulated in Transcription
  misc_feature: MA Experiment 20001247 PARAMETER Experiment Name: At_Far-red-induction_P Parameter: Age (day) Value: 7
  misc_feature: MA Experiment 20001247 PARAMETER Experiment Name: At_Far-red-induction_P Parameter: Light Value: Far-red vs. White
  misc_feature: MA Experiment 20001247 PARAMETER Experiment Name: At_Far-red-induction_P Parameter: Organism Value: A. thaliana
  misc_feature: MA Experiment 20001247 PARAMETER Experiment Name: At_Far-red-induction_P Parameter: Plant Line Value: Columbia
  misc_feature: MA Experiment 20001247 PARAMETER Experiment Name: At_Far-red-induction_P Parameter: Timepoint (hr) Value: 1
  misc_feature: MA Experiment 20001247 PARAMETER Experiment Name: At_Far-red-induction_P Parameter: Tissue Value: Whole Plant
atggagcaaaaagttttcccatttcaagttttagtttccgctaccaaagattttcacccgacccataaactcggtgaaggtggtttcggtcccgtcttcaagggaagattacctgacgggagagacatagcagtgaagaagctatctcaggtttcaaggcaaggcaaaaacgagtttgtgaacgaggctaagttgttggctaaagttcagcatcgcaatgttgttaatctttggggttattgtacacatggagatgataagctcttggtttatgagtatgtcgttaatgagagcctcgacaaggtcctcttcaaatccaacagaaaatcggagatagattggaagcagaggtttgagatcataacaggcattgctcgaggactgctctatctacatgaagacgcgccaaactgcatcatccacagggatattaaggctggcaatattttgctggatgaaaaatgggttcctaagattgcagattttgggatggctagactctatcaggaagatgtaacacatgtcaacactcgtgttgcaggaaccaatggttatatggcgccagagtacgtaatgcacggggttctatcggtaaaggcagacgtattcagctttggggttttggttctggagctcgtaagtggacagaagaactcgagttttagcatgagacaccctgaccagactcttcttgaatgggcatttaagttgtacaagaaaggccggaccatggagatactagaccaagatatagcagcttcagctgatccagatcaagtcaaactctgtgtacagatcggactactctgcgttcaaggcgatccgcatcaaagaccgagcatgagacgggtatctctacttctctctagaaaaccaggacatctagaagaaccggatcatcctggtgtcccgggatctagataccgtcggcgaacacaacgtccttcaggagcagcatcacttggaacattgtcgaccactggttccagcacagattctttcggttcaaacctgaacacaaacacgggaactggtgttagaggtacccccgcatcttctaaagcttcaactcggagtaatgccactagaagtgctggtcagagctctagctcagaccctcacgggaaacgacatatgagttattga

SEQ ID NO: 72098 - protein, 381 aa, Arabidopsis thaliana
  peptide (1)..(381): Ceres Seq. ID no. 4917477
  misc_feature (1)..(381): Homolog of NCBI NO: 25287628 NR Description: hypothetical protein F5A18.8 [imported] -
  misc_feature (1)..(381): Homolog of NCBI NO: 30698743 NR Description: protein kinase family [Arabidopsis thaliana]
  misc_feature (223)..(381): Homolog of NCBI NO: 26449977 NR Description: putative protein kinase [Arabidopsis thaliana]
  misc_feature (6)..(301): Homolog of NCBI NO: 34896978 NR Description: putative receptor-like kinase [Oryza sativa
  misc_feature (1)..(313): Homolog of NCBI NO: 34910120 NR Description: putative receptor kinase [Oryza sativa (japonica group)] >gi|20804899|dbj|BAB92579.1| putative receptor kinase
  misc_feature (10)..(331): Homolog of NCBI NO: 34895498 NR Description: putative receptor-like protein kinase [Oryza
  misc_feature (8)..(303): Homolog of NCBI NO: 7488195 NR Description: probable serine/threonine-specific protein kinase
  misc_feature (8)..(303): Homolog of NCBI NO: 24417476 NR Description: unknown [Arabidopsis thaliana]
  misc_feature (8)..(303): Homolog of NCBI NO: 30686087 NR Description: serine/threonine kinase -related protein
  misc_feature (6)..(344): Homolog of NCBI NO: 4530126 NR Description: receptor-like protein kinase homolog RK20-1
MEQKVFPFQVLVSATKDFHPTHKLGEGGFGPVFKGRLPDGRDIAVKKLSQVSRQGKNEFVNEAKLLAKVQHRNVVNLWGYCTHGDDKLLVYEYVVNESLDKVLFKSNRKSEIDWKQRFEIITGIARGLLYLHEDAPNCIIHRDIKAGNILLDEKWVPKIADFGMARLYQEDVTHVNTRVAGTNGYMAPEYVMHGVLSVKADVFSFGVLVLELVSGQKNSSFSMRHPDQTLLEWAFKLYKKGRTMEILDQDIAASADPDQVKLCVQIGLLCVQGDPHQRPSMRRVSLLLSRKPGHLEEPDHPGVPGSRYRRRTQRPSGAASLGTLSTTGSSTDSFGSNLNTNTGTGVRGTPASSKASTRSNATRSAGQSSSSDPHGKRHMSY

SEQ ID NO: 72099 - protein, 218 aa, Arabidopsis thaliana
  peptide (1)..(218): Ceres Seq. ID no. 4917478
  misc_feature (1)..(218): Homolog of NCBI NO: 25287628 NR Description: hypothetical protein F5A18.8 [imported] -
  misc_feature (1)..(218): Homolog of NCBI NO: 30698743 NR Description: protein kinase family [Arabidopsis thaliana]
  misc_feature (60)..(218): Homolog of NCBI NO: 26449977 NR Description: putative protein kinase [Arabidopsis thaliana]
  misc_feature (1)..(138): Homolog of NCBI NO: 34896978 NR Description: putative receptor-like kinase [Oryza sativa
  misc_feature (1)..(150): Homolog of NCBI NO: 34910120 NR Description: putative receptor kinase [Oryza sativa (japonica group)] >gi|20804899|dbj|BAB92579.1| putative receptor kinase
  misc_feature (1)..(168): Homolog of NCBI NO: 34895498 NR Description: putative receptor-like protein kinase [Oryza
  misc_feature (1)..(140): Homolog of NCBI NO: 7488195 NR Description: probable serine/threonine-specific protein kinase
  misc_feature (1)..(140): Homolog of NCBI NO: 24417476 NR Description: unknown [Arabidopsis thaliana]
  misc_feature (1)..(140): Homolog of NCBI NO: 30686087 NR Description: serine/threonine kinase -related protein
  misc_feature (1)..(181): Homolog of NCBI NO: 4530126 NR Description: receptor-like protein kinase homolog RK20-1
MARLYQEDVTHVNTRVAGTNGYMAPEYVMHGVLSVKADVFSFGVLVLELVSGQKNSSFSMRHPDQTLLEWAFKLYKKGRTMEILDQDIAASADPDQVKLCVQIGLLCVQGDPHQRPSMRRVSLLLSRKPGHLEEPDHPGVPGSRYRRRTQRPSGAASLGTLSTTGSSTDSFGSNLNTNTGTGVRGTPASSKASTRSNATRSAGQSSSSDPHGKRHMSY

SEQ ID NO: 72100 - protein, 196 aa, Arabidopsis thaliana
  peptide (1)..(196): Ceres Seq. ID no. 4917479
  misc_feature (1)..(196): Homolog of NCBI NO: 25287628 NR Description: hypothetical protein F5A18.8 [imported] -
  misc_feature (1)..(196): Homolog of NCBI NO: 30698743 NR Description: protein kinase family [Arabidopsis thaliana]
  misc_feature (38)..(196): Homolog of NCBI NO: 26449977 NR Description: putative protein kinase [Arabidopsis thaliana]
  misc_feature (1)..(116): Homolog of NCBI NO: 34896978 NR Description: putative receptor-like kinase [Oryza sativa
  misc_feature (1)..(128): Homolog of NCBI NO: 34910120 NR Description: putative receptor kinase [Oryza sativa (japonica group)] >gi|20804899|dbj|BAB92579.1| putative receptor kinase
  misc_feature (1)..(146): Homolog of NCBI NO: 34895498 NR Description: putative receptor-like protein kinase [Oryza
  misc_feature (1)..(118): Homolog of NCBI NO: 7488195 NR Description: probable serine/threonine-specific protein kinase
  misc_feature (1)..(118): Homolog of NCBI NO: 24417476 NR Description: unknown [Arabidopsis thaliana]
  misc_feature (1)..(118): Homolog of NCBI NO: 30686087 NR Description: serine/threonine kinase -related protein
  misc_feature (1)..(159): Homolog of NCBI NO: 4530126 NR Description: receptor-like protein kinase homolog RK20-1
MAPEYVMHGVLSVKADVFSFGVLVLELVSGQKNSSFSMRHPDQTLLEWAFKLYKKGRTMEILDQDIAASADPDQVKLCVQIGLLCVQGDPHQRPSMRRVSLLLSRKPGHLEEPDHPGVPGSRYRRRTQRPSGAASLGTLSTTGSSTDSFGSNLNTNTGTGVRGTPASSKASTRSNATRSAGQSSSSDPHGKRHMSY

SEQ ID NO: 72101 - DNA, 1017 bp, Arabidopsis thaliana
  misc_feature (1)..(1017): Ceres Seq. ID no. 4917580
  misc_feature: MA Experiment ID: 20000314 Result: Down-regulated in Transcription
  misc_feature: MA Experiment 20000314 PARAMETER Experiment Name: At_14day_Shoots-Roots_Sub_P Parameter: Age (day) Value: 14
  misc_feature: MA Experiment 20000314 PARAMETER Experiment Name: At_14day_Shoots-Roots_Sub_P Parameter: Organism Value: A. thaliana
  misc_feature: MA Experiment 20000314 PARAMETER Experiment Name: At_14day_Shoots-Roots_Sub_P Parameter: Plant Line Value: WS
  misc_feature: MA Experiment 20000314 PARAMETER Experiment Name: At_14day_Shoots-Roots_Sub_P Parameter: Tissue Value: Roots vs. Whole Plant
  misc_feature: MA Experiment ID: 20000315 Result: Down-regulated in Transcription
  misc_feature: MA Experiment 20000315 PARAMETER Experiment Name: At_14day_Shoots-Roots_Sub_P Parameter: Age (day) Value: 14
  misc_feature: MA Experiment 20000315 PARAMETER Experiment Name: At_14day_Shoots-Roots_Sub_P Parameter: Organism Value: A. thaliana
  misc_feature: MA Experiment 20000315 PARAMETER Experiment Name: At_14day_Shoots-Roots_Sub_P Parameter: Plant Line Value: WS
  misc_feature: MA Experiment 20000315 PARAMETER Experiment Name: At_14day_Shoots-Roots_Sub_P Parameter: Tissue Value: Shoots vs. Whole Plant
  misc_feature: MA Experiment ID: 20000328 Result: Down-regulated in Transcription
  misc_feature: MA Experiment 20000328 PARAMETER Experiment Name: At_42deg_Heat_Sub_P Parameter: Age (day) Value: 14
  misc_feature: MA Experiment 20000328 PARAMETER Experiment Name: At_42deg_Heat_Sub_P Parameter: Organism Value: A. thaliana
  misc_feature: MA Experiment 20000328 PARAMETER Experiment Name: At_42deg_Heat_Sub_P Parameter: Plant Line Value: WS
  misc_feature: MA Experiment 20000328 PARAMETER Experiment Name: At_42deg_Heat_Sub_P Parameter: Temperature (deg C) Value: 42 vs. 22
  misc_feature: MA Experiment 20000328 PARAMETER Experiment Name: At_42deg_Heat_Sub_P Parameter: Timepoint (hr) Value: 6
  misc_feature: MA Experiment 20000328 PARAMETER Experiment Name: At_42deg_Heat_Sub_P Parameter: Tissue Value: Aerial
  misc_feature: MA Experiment ID: 20000347 Result: Up-regulated in Transcription
  misc_feature: MA Experiment 20000347 PARAMETER Experiment Name: At_2mM_SA_Sub_P Parameter: Age (day) Value: 14
  misc_feature: MA Experiment 20000347 PARAMETER Experiment Name: At_2mM_SA_Sub_P Parameter: Organism Value: A. thaliana
  misc_feature: MA Experiment 20000347 PARAMETER Experiment Name: At_2mM_SA_Sub_P Parameter: Plant Line Value: WS
  misc_feature: MA Experiment 20000347 PARAMETER Experiment Name: At_2mM_SA_Sub_P Parameter: Timepoint (hr) Value: 6
  misc_feature: MA Experiment 20000347 PARAMETER Experiment Name: At_2mM_SA_Sub_P Parameter: Tissue Value: Aerial
  misc_feature: MA Experiment 20000347 PARAMETER Experiment Name: At_2mM_SA_Sub_P Parameter: Treatment Value: 2mM SA vs. No Treatment
  misc_feature: MA Experiment ID: 20000440 Result: Down-regulated in Transcription
  misc_feature: MA Experiment 20000440 PARAMETER Experiment Name: At_Closed-Flower__Sub_P Parameter: Tissue Value: Closed Flower vs. Whole Plant
atgtatcctggtcaaatccctgaccttgagcttctcttcctctgccatgatagacccgccatttggaaaagagacttgaagaaaaaacgaaaggatacgtggcctcctccgccgttgtttcactactgtggtcaccgtgatgcatacgacatagttttccctgattggagcttctggggatggcctgagctgaatataaaggagtggaataaattatctgtggcactaaaagaagggaacaaaaaggtgaaatgggaagatagagttccgtacgcttattggaaaggaaaccctcatgtttctcctataagaggagatcttatgagatgtaacttctccgacaagtatgatcctatggttcgtctctatgtccaggattggaggagtgagatagaggcagggttcagaggatcgaacctagaagatcaatgtactcatagatataagatctacatagaaggaaacgcatggtcggtgagcgaaaagtatatactttcgtgtgatagtatgactctgttggttaaaccagagtactacgactttttcttccgaagtatggtcccaatgaagcatttttggcctattagacaaaacaacaaatgtggtgacctcaaatttgcagtcgaatggggcaacaacaacaccgaaaaggcacaaatcatagggagacaaggaagtgagtacatgatgaagaacctaaagatgaagtatgtgtatgattacatgttgtatgtgttacaaggctatgggaaattgatgaagttggatgtgacagtgcctgaaaatgccacggaggtttgttcagagacgatggcttgttcgattactgatggtggacggatcaggcagtgcatggacgactcgttggttatgtctccgagtgtcaaggcggcttgtgatttgccaccttcttatggagactatgagctcaagaagtttcgtaagaaacaagaaagtgcggagagaaaggttgagcagtggaccaataagtattggaacttgagagatccaaaataa

SEQ ID NO: 72102 - protein, 338 aa, Arabidopsis thaliana; identical to SEQ ID NO: 71025
  peptide (1)..(338): Ceres Seq. ID no. 4917581
  misc_feature (1)..(333): Pfam Name: Arabidopsis thaliana protein of unknown function Pfam Description: Arabidopsis thaliana protein of unknown
  misc_feature (1)..(338): Homolog of NCBI NO: 15233072 NR Description: putative protein; protein id: At3g61280.1
  misc_feature (1)..(336): Homolog of NCBI NO: 15233074 NR Description: putative protein; protein id: At3g61290.1
  misc_feature (1)..(332): Homolog of NCBI NO: 30267795 NR Description: hypothetical protein [Arabidopsis thaliana]
  misc_feature (2)..(333): Homolog of NCBI NO: 7486461 NR Description: hypothetical protein At2g45830 [imported] - thaliana >gi|3386611|gb|AAC28541.1| unknown protein [Arabidopsis
  misc_feature (2)..(333): Homolog of NCBI NO: 30690136 NR Description: expressed protein [Arabidopsis thaliana]
  misc_feature (2)..(332): Homolog of NCBI NO: 15229061 NR Description: putative protein; protein id: At3g48980.1
  misc_feature (2)..(333): Homolog of NCBI NO: 15237842 NR Description: putative protein; protein id: At5g23850.1 thaliana] >gi|10176852|dbj|BAB10058.1| contains similarity to
  misc_feature (2)..(334): Homolog of NCBI NO: 15233070 NR Description: putative protein; protein id: At3g61270.1
  misc_feature (2)..(332): Homolog of NCBI NO: 15222413 NR Description: hypothetical protein; protein id: At1g63420.1
  misc_feature (2)..(327): Homolog of NCBI NO: 21742339 NR Description: OSJNBb0020O11.18 [Oryza sativa (japonica

SEQ ID NO: 72103 - protein, 231 aa, Arabidopsis thaliana
  peptide (1)..(231): Ceres Seq. ID no. 4917582
  misc_feature (1)..(226): Pfam Name: Arabidopsis thaliana protein of unknown function Pfam Description: Arabidopsis thaliana protein of unknown
  misc_feature (1)..(231): Homolog of NCBI NO: 15233072 NR Description: putative protein; protein id: At3g61280.1
  misc_feature (1)..(229): Homolog of NCBI NO: 15233074 NR Description: putative protein; protein id: At3g61290.1
  misc_feature (1)..(225): Homolog of NCBI NO: 30267795 NR Description: hypothetical protein [Arabidopsis thaliana]
  misc_feature (1)..(226): Homolog of NCBI NO: 7486461 NR Description: hypothetical protein At2g45830 [imported] - thaliana >gi|3386611|gb|AAC28541.1| unknown protein [Arabidopsis
  misc_feature (1)..(226): Homolog of NCBI NO: 30690136 NR Description: expressed protein [Arabidopsis thaliana]
  misc_feature (1)..(225): Homolog of NCBI NO: 15229061 NR Description: putative protein; protein id: At3g48980.1
  misc_feature (1)..(226): Homolog of NCBI NO: 15237842 NR Description: putative protein; protein id: At5g23850.1 thaliana] >gi|10176852|dbj|BAB10058.1| contains similarity to
  misc_feature (1)..(227): Homolog of NCBI NO: 15233070 NR Description: putative protein; protein id: At3g61270.1
  misc_feature (1)..(225): Homolog of NCBI NO: 15222413 NR Description: hypothetical protein; protein id: At1g63420.1
  misc_feature (1)..(220): Homolog of NCBI NO: 21742339 NR Description: OSJNBb0020O11.18 [Oryza sativa (japonica
MRCNFSDKYDPMVRLYVQDWRSEIEAGFRGSNLEDQCTHRYKIYIEGNAWSVSEKYILSCDSMTLLVKPEYYDFFFRSMVPMKHFWPIRQNNKCGDLKFAVEWGNNNTEKAQIIGRQGSEYMMKNLKMKYVYDYMLYVLQGYGKLMKLDVTVPENATEVCSETMACSITDGGRIRQCMDDSLVMSPSVKAACDLPPSYGDYELKKFRKKQESAERKVEQWTNKYWNLRDPK

SEQ ID NO: 72104 - protein, 220 aa, Arabidopsis thaliana
  peptide (1)..(220): Ceres Seq. ID no. 4917583
  misc_feature (1)..(215): Pfam Name: Arabidopsis thaliana protein of unknown function Pfam Description: Arabidopsis thaliana protein of unknown
  misc_feature (1)..(220): Homolog of NCBI NO: 15233072 NR Description: putative protein; protein id: At3g61280.1
  misc_feature (1)..(218): Homolog of NCBI NO: 15233074 NR Description: putative protein; protein id: At3g61290.1
  misc_feature (1)..(214): Homolog of NCBI NO: 30267795 NR Description: hypothetical protein [Arabidopsis thaliana]
  misc_feature (1)..(215): Homolog of NCBI NO: 7486461 NR Description: hypothetical protein At2g45830 [imported] - thaliana >gi|3386611|gb|AAC28541.1| unknown protein [Arabidopsis
  misc_feature (1)..(215): Homolog of NCBI NO: 30690136 NR Description: expressed protein [Arabidopsis thaliana]
  misc_feature (1)..(214): Homolog of NCBI NO: 15229061 NR Description: putative protein; protein id: At3g48980.1
  misc_feature (1)..(215): Homolog of NCBI NO: 15237842 NR Description: putative protein; protein id: At5g23850.1 thaliana] >gi|10176852|dbj|BAB10058.1| contains similarity to
  misc_feature (1)..(216): Homolog of NCBI NO: 15233070 NR Description: putative protein; protein id: At3g61270.1
  misc_feature (1)..(214): Homolog of NCBI NO: 15222413 NR Description: hypothetical protein; protein id: At1g63420.1
  misc_feature (1)..(209): Homolog of NCBI NO: 21742339 NR Description: OSJNBb0020O11.18 [Oryza sativa (japonica
MVRLYVQDWRSEIEAGFRGSNLEDQCTHRYKIYIEGNAWSVSEKYILSCDSMTLLVKPEYYDFFFRSMVPMKHFWPIRQNNKCGDLKFAVEWGNNNTEKAQIIGRQGSEYMMKNLKMKYVYDYMLYVLQGYGKLMKLDVTVPENATEVCSETMACSITDGGRIRQCMDDSLVMSPSVKAACDLPPSYGDYELKKFRKKQESAERKVEQWTNKYWNLRDPK

SEQ ID NO: 72105 - DNA, 1074 bp, Arabidopsis thaliana
  misc_feature (1)..(1074): Ceres Seq. ID no. 4917600
atggagtatcaggggcttcaaaattgggacggtcttttagacccattggacgacaatctccggcgagagattctccggtacggtcaatttgtcgaatcggcttatcaagcatttgatttcgatccttcctctccaacctacgggacatgccggtttccgaggagcacgttgttagagcgatccggtttacccaactccggttatcgactaacgaagaaccttcgtgccacgtcaggtattaacttgccacgttggattgagaaagcgccaagctggatggctacacaatctagctggattggttacgtggcagtttgccaggacaaagaagagatctcgcggcttgggcgtagagacgtcgtcatctccttccgtggaaccgccacgtgtctcgagtggttagagaaccttcgcgccacgctgactcatctccctaatgggcctactggagcaaatctaaacgggtctaactctgggcccatggttgagagcgggtttttaagcttgtatacttcaggtgttcacagtttgagagacatggtaagagaagagatcgcaaggctactccaatcttacggcgacgagccgttaagtgtaacgataaccggtcacagcctcggcgctgcgatcgcgacactagcagcttacgatatcaaaacgacgtttaaacgtgcgcctatggttaccgtaatatctttcggaggtccacgtgtcggaaacagatgctttcggaaactccttgagaagcaaggcacgaaggttctaagaatcgtgaactccgacgacgtcatcaccaaagttcctggagttgttttagaaaacagagagcaagataacgttaagatgacagcgtcgataatgccgagctggatacagagacgcgtggaggagacgccgtgggtttacgctgaaatcggtaaggagcttcggctgagtagccgtgactcgccgcacttgagcagcatcaatgtggccacgtgtcatgagctgaaaacgtatttacatttggtagacgggtttgtgagctccacgtgtccattcagagaaacagctcggagagttctccatagatga

SEQ ID NO: 72106 - protein, 357 aa, Arabidopsis thaliana
  peptide (1)..(357): Ceres Seq. ID no. 4917601
  misc_feature (1)..(357): Homolog of NCBI NO: 15224963 NR Description: putative triacylglycerol lipase; protein id: supported by cDNA: gi_18491248 [Arabidopsis thaliana]
  misc_feature (1)..(357): Homolog of NCBI NO: 16215706 NR Description: DEFECTIVE IN ANTHER DEHISCENCE1 [Arabidopsis
  misc_feature (2)..(357): Homolog of NCBI NO: 24898901 NR Description: DAD1 [Brassica rapa]
  misc_feature (2)..(357): Homolog of NCBI NO: 7488220 NR Description: probable triacylglycerol lipase - Arabidopsis >gi|2245036|emb|CAB10455.1| triacylglycerol lipase like protein thaliana] >gi|7268433|emb|CAB80953.1| triacylglycerol lipase like
  misc_feature (2)..(357): Homolog of NCBI NO: 18414755 NR Description: triacylglycerol lipase like protein; protein id:
  misc_feature (5)..(270): Homolog of NCBI NO: 14140134 NR Description: lipase-like protein [Oryza sativa]
  misc_feature (294)..(357): Homolog of NCBI NO: 14140134 NR Description: lipase-like protein [Oryza sativa]
  misc_feature (3)..(357): Homolog of NCBI NO: 37536870 NR Description: putative lipase [Oryza sativa (japonica
  misc_feature (4)..(342): Homolog of NCBI NO: 30684625 NR Description: lipase (class 3) family [Arabidopsis thaliana]
  misc_feature (4)..(340): Homolog of NCBI NO: 18402385 NR Description: putative lipase; protein id: At2g30550.1, by cDNA: 207043., supported by cDNA: gi_20268777 [Arabidopsis >gi|20198327|gb|AAB63082.2| putative lipase [Arabidopsis
MEYQGLQNWDGLLDPLDDNLRREILRYGQFVESAYQAFDFDPSSPTYGTCRFPRSTLLERSGLPNSGYRLTKNLRATSGINLPRWIEKAPSWMATQSSWIGYVAVCQDKEEISRLGRRDVVISFRGTATCLEWLENLRATLTHLPNGPTGANLNGSNSGPMVESGFLSLYTSGVHSLRDMVREEIARLLQSYGDEPLSVTITGHSLGAAIATLAAYDIKTTFKRAPMVTVISFGGPRVGNRCFRKLLEKQGTKVLRIVNSDDVITKVPGVVLENREQDNVKMTASIMPSWIQRRVEETPWVYAEIGKELRLSSRDSPHLSSINVATCHELKTYLHLVDGFVSSTCPFRETARRVLHR

SEQ ID NO: 72107 - protein, 265 aa, Arabidopsis thaliana
  peptide (1)..(265): Ceres Seq. ID no. 4917602
  misc_feature (1)..(265): Homolog of NCBI NO: 15224963 NR Description: putative triacylglycerol lipase; protein id: supported by cDNA: gi_18491248 [Arabidopsis thaliana]
  misc_feature (1)..(265): Homolog of NCBI NO: 16215706 NR Description: DEFECTIVE IN ANTHER DEHISCENCE1 [Arabidopsis
  misc_feature (1)..(265): Homolog of NCBI NO: 24898901 NR Description: DAD1 [Brassica rapa]
  misc_feature (1)..(265): Homolog of NCBI NO: 7488220 NR Description: probable triacylglycerol lipase - Arabidopsis >gi|2245036|emb|CAB10455.1| triacylglycerol lipase like protein thaliana] >gi|7268433|emb|CAB80953.1| triacylglycerol lipase like
  misc_feature (1)..(265): Homolog of NCBI NO: 18414755 NR Description: triacylglycerol lipase like protein; protein id:
  misc_feature (1)..(178): Homolog of NCBI NO: 14140134 NR Description: lipase-like protein [Oryza sativa]
  misc_feature (202)..(265): Homolog of NCBI NO: 14140134 NR Description: lipase-like protein [Oryza sativa]
  misc_feature (1)..(265): Homolog of NCBI NO: 37536870 NR Description: putative lipase [Oryza sativa (japonica
  misc_feature (1)..(250): Homolog of NCBI NO: 30684625 NR Description: lipase (class 3) family [Arabidopsis thaliana]
  misc_feature (1)..(248): Homolog of NCBI NO: 18402385 NR Description: putative lipase; protein id: At2g30550.1, by cDNA: 207043., supported by cDNA: gi_20268777 [Arabidopsis >gi|20198327|gb|AAB63082.2| putative lipase [Arabidopsis
MATQSSWIGYVAVCQDKEEISRLGRRDVVISFRGTATCLEWLENLRATLTHLPNGPTGANLNGSNSGPMVESGFLSLYTSGVHSLRDMVREEIARLLQSYGDEPLSVTITGHSLGAAIATLAAYDIKTTFKRAPMVTVISFGGPRVGNRCFRKLLEKQGTKVLRIVNSDDVITKVPGVVLENREQDNVKMTASIMPSWIQRRVEETPWVYAEIGKELRLSSRDSPHLSSINVATCHELKTYLHLVDGFVSSTCPFRETARRVLHR

SEQ ID NO: 72108 - protein, 197 aa, Arabidopsis thaliana
  peptide (1)..(197): Ceres Seq. ID no. 4917603
  misc_feature (1)..(197): Homolog of NCBI NO: 15224963 NR Description: putative triacylglycerol lipase; protein id: supported by cDNA: gi_18491248 [Arabidopsis thaliana]
  misc_feature (1)..(197): Homolog of NCBI NO: 16215706 NR Description: DEFECTIVE IN ANTHER DEHISCENCE1 [Arabidopsis
  misc_feature (1)..(197): Homolog of NCBI NO: 24898901 NR Description: DAD1 [Brassica rapa]
  misc_feature (1)..(197): Homolog of NCBI NO: 7488220 NR Description: probable triacylglycerol lipase - Arabidopsis >gi|2245036|emb|CAB10455.1| triacylglycerol lipase like protein thaliana] >gi|7268433|emb|CAB80953.1| triacylglycerol lipase like
  misc_feature (1)..(197): Homolog of NCBI NO: 18414755 NR Description: triacylglycerol lipase like protein; protein id:
  misc_feature (1)..(110): Homolog of NCBI NO: 14140134 NR Description: lipase-like protein [Oryza sativa]
  misc_feature (134)..(197): Homolog of NCBI NO: 14140134 NR Description: lipase-like protein [Oryza sativa]
  misc_feature (1)..(197): Homolog of NCBI NO: 37536870 NR Description: putative lipase [Oryza sativa (japonica
  misc_feature (1)..(182): Homolog of NCBI NO: 30684625 NR Description: lipase (class 3) family [Arabidopsis thaliana]
  misc_feature (1)..(180): Homolog of NCBI NO: 18402385 NR Description: putative lipase; protein id: At2g30550.1, by cDNA: 207043., supported by cDNA: gi_20268777 [Arabidopsis >gi|20198327|gb|AAB63082.2| putative lipase [Arabidopsis
MVESGFLSLYTSGVHSLRDMVREEIARLLQSYGDEPLSVTITGHSLGAAIATLAAYDIKTTFKRAPMVTVISFGGPRVGNRCFRKLLEKQGTKVLRIVNSDDVITKVPGVVLENREQDNVKMTASIMPSWIQRRVEETPWVYAEIGKELRLSSRDSPHLSSINVATCHELKTYLHLVDGFVSSTCPFRETARRVLHR

SEQ ID NO: 72109 - DNA, 1059 bp, Arabidopsis thaliana
  misc_feature (1)..(1059): Ceres Seq. ID no. 4917604
  misc_feature: MA Experiment ID: 20000180 Result: Down-regulated in Transcription
  misc_feature: MA Experiment 20000180 PARAMETER Experiment Name: At_Germinating_Seeds_P Parameter: Age (hr) Value: 24 vs. 0
  misc_feature: MA Experiment 20000180 PARAMETER Experiment Name: At_Germinating_Seeds_P Parameter: Tissue Value: Germinating Seeds
atgagtttgcttgatgattcttttacaagtgcaatgacacttaccaattcaggtgtgcctcaagtccctgatcgctacgttcttcctccttcgcaaaggccagctcttggttcaagcttaggcaccagcgagactacacttcctgtcattgatctctctcttttgcaccaacctttccttcgatccctcgcaatccacgagattagcatggcctgcaaggagtttggtttctttcaggttataaaccatggaataccatcatcagtggttaacgatgccttagatgcagcaacacagttcttcgacttacctgtggaagagaagatgcttctggtgtctgcaaacgttcatgagccagtcaggtatggcacaagccttaaccattcaacagacagagttcactactggagagatttcatcaagcattactctcatccactctcaaagtggatcgatatgtggccatcaaatcctccatgctacaaggataaagtgggcaagtatgcagaggcaacacatttgctacacaagcagttaatagaagctatctcagaaagcctgggactggagaaaaattacttacaagaagagatagaagaaggctcacaagtcatggcagtgaattgttatccagcatgcccggaacctgaaatggccttgggaatgccaccacactcagacttcagctcactgaccatcttacttcagagtagcaagggactccagataatggactgcaacaaaaactgggtttgtgtgccgtatatagaaggagctttgatagttcagctgggagatcaggtagaggtgatgagcaacggcatatacaagagcgtcattcatcgtgtaacagtgaacaaagaagtcaaaaggctatcttttgcaagtcttcacagtctacctctgcacaagaaaataagtccagcaccaaaactcgtcaacccaaacaatgcaccagcctatggagagtttagtttcaacgattttctgaactacatctcaagcaacgattttatacaagaaagattcattgacacaataaagaaaagcagttcctaa

SEQ ID NO: 72110 - protein, 352 aa, Arabidopsis thaliana; identical to SEQ ID NO: 71051
  peptide (1)..(352): Ceres Seq. ID no. 4917605
  misc_feature (201)..(300): Pfam Name: 2OG-Fe(II) oxygenase superfamily Pfam Description: 2OG-Fe(II) oxygenase superfamily
  misc_feature (1)..(352): Homolog of NCBI NO: 7433240 NR Description: probable flavonol synthase [imported] - thaliana >gi|20197022|gb|AAM14878.1| putative flavonol synthase
  misc_feature (1)..(352): Homolog of NCBI NO: 30689834 NR Description: flavonol synthase family [Arabidopsis thaliana]
  misc_feature (162)..(351): Homolog of NCBI NO: 15232291 NR Description: SRG1 - like protein; protein id: At3g60290.1
  misc_feature (2)..(121): Homolog of NCBI NO: 15232291 NR Description: SRG1 - like protein; protein id: At3g60290.1
  misc_feature (80)..(348): Homolog of NCBI NO: 15240797 NR Description: putative protein; protein id: At5g07480.1
  misc_feature (47)..(348): Homolog of NCBI NO: 32488371 NR Description: OSJNBa0043A12.1 [Oryza sativa (japonica
  misc_feature (75)..(348): Homolog of NCBI NO: 15228020 NR Description: putative giberellin beta-hydroxylase; protein id: [Arabidopsis thaliana] >gi|25285698|pir||E84783 probable
  misc_feature (31)..(348): Homolog of NCBI NO: 32488372 NR Description: OSJNBa0043A12.2 [Oryza sativa (japonica
  misc_feature (22)..(348): Homolog of NCBI NO: 37536444 NR Description: unknown protein [Oryza sativa (japonica
  misc_feature (22)..(348): Homolog of NCBI NO: 38345872 NR Description: OSJNBa0064M23.14 [Oryza sativa (japonica

SEQ ID NO: 72111 - protein, 341 aa, Arabidopsis thaliana; identical to SEQ ID NO: 71052
  peptide (1)..(341): Ceres Seq. ID no. 4917606
  misc_feature (190)..(289): Pfam Name: 2OG-Fe(II) oxygenase superfamily Pfam Description: 2OG-Fe(II) oxygenase superfamily
  misc_feature (1)..(341): Homolog of NCBI NO: 7433240 NR Description: probable flavonol synthase [imported] - thaliana >gi|20197022|gb|AAM14878.1| putative flavonol synthase
  misc_feature (1)..(341): Homolog of NCBI NO: 30689834 NR Description: flavonol synthase family [Arabidopsis thaliana]
  misc_feature (151)..(340): Homolog of NCBI NO: 15232291 NR Description: SRG1 - like protein; protein id: At3g60290.1
  misc_feature (1)..(110): Homolog of NCBI NO: 15232291 NR Description: SRG1 - like protein; protein id: At3g60290.1
  misc_feature (69)..(337): Homolog of NCBI NO: 15240797 NR Description: putative protein; protein id: At5g07480.1
  misc_feature (36)..(337): Homolog of NCBI NO: 32488371 NR Description: OSJNBa0043A12.1 [Oryza sativa (japonica
  misc_feature (64)..(337): Homolog of NCBI NO: 15228020 NR Description: putative giberellin beta-hydroxylase; protein id: [Arabidopsis thaliana] >gi|25285698|pir||E84783 probable
  misc_feature (20)..(337): Homolog of NCBI NO: 32488372 NR Description: OSJNBa0043A12.2 [Oryza sativa (japonica
  misc_feature (11)..(337): Homolog of NCBI NO: 37536444 NR Description: unknown protein [Oryza sativa (japonica
  misc_feature (11)..(337): Homolog of NCBI NO: 38345872 NR Description: OSJNBa0064M23.14 [Oryza sativa (japonica

SEQ ID NO: 72112 - protein, 283 aa, Arabidopsis thaliana
  peptide (1)..(283): Ceres Seq. ID no. 4917607
  misc_feature (132)..(231): Pfam Name: 2OG-Fe(II) oxygenase superfamily Pfam Description: 2OG-Fe(II) oxygenase superfamily
  misc_feature (1)..(283): Homolog of NCBI NO: 7433240 NR Description: probable flavonol synthase [imported] - thaliana >gi|20197022|gb|AAM14878.1| putative flavonol synthase
  misc_feature (1)..(283): Homolog of NCBI NO: 30689834 NR Description: flavonol synthase family [Arabidopsis thaliana]
  misc_feature (93)..(282): Homolog of NCBI NO: 15232291 NR Description: SRG1 - like protein; protein id: At3g60290.1
  misc_feature (1)..(52): Homolog of NCBI NO: 15232291 NR Description: SRG1 - like protein; protein id: At3g60290.1
  misc_feature (11)..(279): Homolog of NCBI NO: 15240797 NR Description: putative protein; protein id: At5g07480.1
  misc_feature (1)..(279): Homolog of NCBI NO: 32488371 NR Description: OSJNBa0043A12.1 [Oryza sativa (japonica
  misc_feature (6)..(279): Homolog of NCBI NO: 15228020 NR Description: putative giberellin beta-hydroxylase; protein id: [Arabidopsis thaliana] >gi|25285698|pir||E84783 probable
  misc_feature (1)..(279): Homolog of NCBI NO: 32488372 NR Description: OSJNBa0043A12.2 [Oryza sativa (japonica
  misc_feature (1)..(279): Homolog of NCBI NO: 37536444 NR Description: unknown protein [Oryza sativa (japonica
  misc_feature (1)..(279): Homolog of NCBI NO: 38345872 NR Description: OSJNBa0064M23.14 [Oryza sativa (japonica
MACKEFGFFQVINHGIPSSVVNDALDAATQFFDLPVEEKMLLVSANVHEPVRYGTSLNHSTDRVHYWRDFIKHYSHPLSKWIDMWPSNPPCYKDKVGKYAEATHLLHKQLIEAISESLGLEKNYLQEEIEEGSQVMAVNCYPACPEPEMALGMPPHSDFSSLTILLQSSKGLQIMDCNKNWVCVPYIEGALIVQLGDQVEVMSNGIYKSVIHRVTVNKEVKRLSFASLHSLPLHKKISPAPKLVNPNNAPAYGEFSFNDFLNYISSNDFIQERFIDTIKKSSS

SEQ ID NO: 72113 - DNA, 1035 bp, Arabidopsis thaliana
  misc_feature (1)..(1035): Ceres Seq. ID no. 4917612
  misc_feature: MA Experiment ID: 20001910 Result: Up-regulated in Transcription
  misc_feature: MA Experiment 20001910 PARAMETER Experiment Name: At_Drought_Reproduction_P Parameter: Age (day) Value: 37
  misc_feature: MA Experiment 20001910 PARAMETER Experiment Name: At_Drought_Reproduction_P Parameter: Organism Value: A. thaliana
  misc_feature: MA Experiment 20001910 PARAMETER Experiment Name: At_Drought_Reproduction_P Parameter: Plant Line Value: WS
  misc_feature: MA Experiment 20001910 PARAMETER Experiment Name: At_Drought_Reproduction_P Parameter: Timepoint (day) Value: 7
  misc_feature: MA Experiment 20001910 PARAMETER Experiment Name: At_Drought_Reproduction_P Parameter: Tissue Value: Flowers
  misc_feature: MA Experiment 20001910 PARAMETER Experiment Name: At_Drought_Reproduction_P Parameter: Treatment Value: Drought vs. No Drought
atgtctaaagcttgttggttagttgctgccatcatatttacagcggccacggtggtttacggacaacaagcgccgtgtttcttcgtttttggagactcaatgtccgataatggcaataataataacttgaaatccgaggcaaaagtcaacttttcaccttatggtaatgactttcctaaaggcccgaccggccgtttttcaaatggccgcactatccctgatattatcggtgaattatccggttttaaggattttataccgccattcgccgaagcatcacctgaacaagctcacaccgggatgaactacgcttccggtggaagtggacttcgtgaagaaactagcgaacacttgggagatagaatcagtataagaaagcaactacaaaatcacaagacgtccataacgaaagcgaatgtaccagcagaaagattgcaacaatgtctctacatgatcaacattggaagcaacgattacatcaacaattacttcatgtcaaagccgtacaacactaaacgacgctacactcctaaacaatacgcatattctctcattattatttaccgttcccacttaaagaatttgcaccgtctaggagcgaggaaggtggcagttttcggactcagccagattgggtgcacaccaaagataatgaagtcacacagtgacggtaaaatctgttcccgcgaagtgaatgaagcagtgaagatttttaataagaaccttgacgaccttgtcatggatttcaataagaaggtcagaggtgcaaagtttacctacgtcgatcttttctccggtggagatccccaagccttcattttcctaggatttaaggttggaggtaagagttgttgcacagtaaacccgggggaagaactttgtgtcccaaaccagccggtttgtgcaaacaggactgaatatgtcttttgggatgatcttcacagcacggaagccactaatatggtagtggcgaagggctcgttcgacggaatcataagtaaaccgtatagtatcgcccagcttgcgaaggaatag

SEQ ID NO: 72114 - protein, 344 aa, Arabidopsis thaliana
  peptide (1)..(344): Ceres Seq. ID no. 4917613
  misc_feature (27)..(327): Pfam Name: GDSL-like Lipase/Acylhydrolase Pfam Description: GDSL-like Lipase/Acylhydrolase
  misc_feature (1)..(344): Homolog of NCBI NO: 15224697 NR Description: putative GDSL-motif lipase hydrolase; protein id:
  misc_feature (3)..(343): Homolog of NCBI NO: 15224705 NR Description: putative GDSL-motif lipase/hydrolase; protein id:
  misc_feature (2)..(341): Homolog of NCBI NO: 15234641 NR Description: putative protein; protein id: At4g30140.1, by cDNA: 21878., supported by cDNA: gi_13877600 [Arabidopsis
  misc_feature (2)..(341): Homolog of NCBI NO: 21554289 NR Description: putative GDSL-motif lipase/hydrolase [Arabidopsis
  misc_feature (1)..(341): Homolog of NCBI NO: 15224707 NR Description: putative GDSL-motif lipase/hydrolase; protein id:
  misc_feature (7)..(343): Homolog of NCBI NO: 34909504 NR Description: putative GDSL-motif lipase/hydrolase-like protein
  misc_feature (1)..(343): Homolog of NCBI NO: 7485419 NR Description: hypothetical protein F13C5.140 - Arabidopsis >gi|2832625|emb|CAA16754.1| putative protein [Arabidopsis >gi|7268691|emb|CAB78899.1| putative protein [Arabidopsis
  misc_feature (1)..(343): Homolog of NCBI NO: 18415211 NR Description: Expressed protein; protein id: At4g18970.1, by cDNA: 42850., supported by cDNA: gi_16604576, supported by gi_21281049 [Arabidopsis thaliana] >gi|16604577|gb|AAL24090.1|
  misc_feature (1)..(343): Homolog of NCBI NO: 21618199 NR Description: GDSL-motif lipase/hydrolase-like protein
  misc_feature (23)..(343): Homolog of NCBI NO: 15220512 NR Description: lipase/hydrolase, putative; protein id: supported by cDNA: 6680., supported by cDNA: gi_15215767
MSKACWLVAAIIFTAATVVYGQQAPCFFVFGDSMSDNGNNNNLKSEAKVNFSPYGNDFPKGPTGRFSNGRTIPDIIGELSGFKDFIPPFAEASPEQAHTGMNYASGGSGLREETSEHLGDRISIRKQLQNHKTSITKANVPAERLQQCLYMINIGSNDYINNYFMSKPYNTKRRYTPKQYAYSLIIIYRSHLKNLHRLGARKVAVFGLSQIGCTPKIMKSHSDGKICSREVNEAVKIFNKNLDDLVMDFNKKVRGAKFTYVDLFSGGDPQAFIFLGFKVGGKSCCTVNPGEELCVPNQPVCANRTEYVFWDDLHSTEATNMVVAKGSFDGIISKPYSIAQLAKE

SEQ ID NO: 72115 - protein, 311 aa, Arabidopsis thaliana
  peptide (1)..(311): Ceres Seq. ID no. 4917614
  misc_feature (1)..(294): Pfam Name: GDSL-like Lipase/Acylhydrolase Pfam Description: GDSL-like Lipase/Acylhydrolase
  misc_feature (1)..(311): Homolog of NCBI NO: 15224697 NR Description: putative GDSL-motif lipase hydrolase; protein id:
  misc_feature (1)..(310): Homolog of NCBI NO: 15224705 NR Description: putative GDSL-motif lipase/hydrolase; protein id:
  misc_feature (1)..(308): Homolog of NCBI NO: 15234641 NR Description: putative protein; protein id: At4g30140.1, by cDNA: 21878., supported by cDNA: gi_13877600 [Arabidopsis
  misc_feature (1)..(308): Homolog of NCBI NO: 21554289 NR Description: putative GDSL-motif lipase/hydrolase [Arabidopsis
  misc_feature (1)..(308): Homolog of NCBI NO: 15224707 NR Description: putative GDSL-motif lipase/hydrolase; protein id:
  misc_feature (1)..(310): Homolog of NCBI NO: 34909504 NR Description: putative GDSL-motif lipase/hydrolase-like protein
  misc_feature (1)..(310): Homolog of NCBI NO: 7485419 NR Description: hypothetical protein F13C5.140 - Arabidopsis >gi|2832625|emb|CAA16754.1| putative protein [Arabidopsis >gi|7268691|emb|CAB78899.1| putative protein [Arabidopsis
  misc_feature (1)..(310): Homolog of NCBI NO: 18415211 NR Description: Expressed protein; protein id: At4g18970.1, by cDNA: 42850., supported by cDNA: gi_16604576, supported by gi_21281049 [Arabidopsis thaliana] >gi|16604577|gb|AAL24090.1|
  misc_feature (1)..(310): Homolog of NCBI NO: 21618199 NR Description: GDSL-motif lipase/hydrolase-like protein
  misc_feature (1)..(310): Homolog of NCBI NO: 15220512 NR Description: lipase/hydrolase, putative; protein id: supported by cDNA: 6680., supported by cDNA: gi_15215767
MSDNGNNNNLKSEAKVNFSPYGNDFPKGPTGRFSNGRTIPDIIGELSGFKDFIPPFAEASPEQAHTGMNYASGGSGLREETSEHLGDRISIRKQLQNHKTSITKANVPAERLQQCLYMINIGSNDYINNYFMSKPYNTKRRYTPKQYAYSLIIIYRSHLKNLHRLGARKVAVFGLSQIGCTPKIMKSHSDGKICSREVNEAVKIFNKNLDDLVMDFNKKVRGAKFTYVDLFSGGDPQAFIFLGFKVGGKSCCTVNPGEELCVPNQPVCANRTEYVFWDDLHSTEATNMVVAKGSFDGIISKPYSIAQLAKE

SEQ ID NO: 72116 - protein, 244 aa, Arabidopsis thaliana
  peptide (1)..(244): Ceres Seq. ID no. 4917615
  misc_feature (1)..(227): Pfam Name: GDSL-like Lipase/Acylhydrolase Pfam Description: GDSL-like Lipase/Acylhydrolase
  misc_feature (1)..(244): Homolog of NCBI NO: 15224697 NR Description: putative GDSL-motif lipase hydrolase; protein id:
  misc_feature (1)..(243): Homolog of NCBI NO: 15224705 NR Description: putative GDSL-motif lipase/hydrolase; protein id:
  misc_feature (1)..(241): Homolog of NCBI NO: 15234641 NR Description: putative protein; protein id: At4g30140.1, by cDNA: 21878., supported by cDNA: gi_13877600 [Arabidopsis
  misc_feature (1)..(241): Homolog of NCBI NO: 21554289 NR Description: putative GDSL-motif lipase/hydrolase [Arabidopsis
  misc_feature (1)..(241): Homolog of NCBI NO: 15224707 NR Description: putative GDSL-motif lipase/hydrolase; protein id:
  misc_feature (1)..(243): Homolog of NCBI NO: 34909504 NR Description: putative GDSL-motif lipase/hydrolase-like protein
  misc_feature (1)..(243): Homolog of NCBI NO: 7485419 NR Description: hypothetical protein F13C5.140 - Arabidopsis >gi|2832625|emb|CAA16754.1| putative protein [Arabidopsis >gi|7268691|emb|CAB78899.1| putative protein [Arabidopsis
  misc_feature (1)..(243): Homolog of NCBI NO: 18415211 NR Description: Expressed protein; protein id: At4g18970.1, by cDNA: 42850., supported by cDNA: gi_16604576, supported by gi_21281049 [Arabidopsis thaliana] >gi|16604577|gb|AAL24090.1|
  misc_feature (1)..(243): Homolog of NCBI NO: 21618199 NR Description: GDSL-motif lipase/hydrolase-like protein
  misc_feature (1)..(243): Homolog of NCBI NO: 15220512 NR Description: lipase/hydrolase, putative; protein id: supported by cDNA: 6680., supported by cDNA: gi_15215767
MNYASGGSGLREETSEHLGDRISIRKQLQNHKTSITKANVPAERLQQCLYMINIGSNDYINNYFMSKPYNTKRRYTPKQYAYSLIIIYRSHLKNLHRLGARKVAVFGLSQIGCTPKIMKSHSDGKICSREVNEAVKIFNKNLDDLVMDFNKKVRGAKFTYVDLFSGGDPQAFIFLGFKVGGKSCCTVNPGEELCVPNQPVCANRTEYVFWDDLHSTEATNMVVAKGSFDGIISKPYSIAQLAKE

SEQ ID NO: 72117 - DNA, 1110 bp, Arabidopsis thaliana
  misc_feature (1)..(1110): Ceres Seq. ID no. 4917621
  misc_feature: MA Experiment ID: 20000315 Result: Down-regulated in Transcription
  misc_feature: MA Experiment 20000315 PARAMETER Experiment Name: At_14day_Shoots-Roots_Sub_P Parameter: Age (day) Value: 14
  misc_feature: MA Experiment 20000315 PARAMETER Experiment Name: At_14day_Shoots-Roots_Sub_P Parameter: Organism Value: A. thaliana
  misc_feature: MA Experiment 20000315 PARAMETER Experiment Name: At_14day_Shoots-Roots_Sub_P Parameter: Plant Line Value: WS
  misc_feature: MA Experiment 20000315 PARAMETER Experiment Name: At_14day_Shoots-Roots_Sub_P Parameter: Tissue Value: Shoots vs. Whole Plant
  misc_feature: MA Experiment ID: 20000355 Result: Down-regulated in Transcription
  misc_feature: MA Experiment 20000355 PARAMETER Experiment Name: At_Siliques_Sub_P Parameter: Age (day) Value: 21
  misc_feature: MA Experiment 20000355 PARAMETER Experiment Name: At_Siliques_Sub_P Parameter: Organism Value: A. thaliana
  misc_feature: MA Experiment 20000355 PARAMETER Experiment Name: At_Siliques_Sub_P Parameter: Plant Line Value: WS
  misc_feature: MA Experiment 20000355 PARAMETER Experiment Name: At_Siliques_Sub_P Parameter: Tissue Value: Less Than 5mm Siliques vs. Whole Plant
atgaaaaaagaggaagcagagttagtttctgtgtgttggaatcaggattcaagttgttttgcagctggaacgagtcatggttttcgtatatataactgtgaacctttcaaagaaactttcaggcgtgagctaaaggacggtggttttaaaatcgtagagatgcttttccgtagcaatatactggcacttgttggtggtggacctaactctcagtatccttcaagcaaagtactaatttgggatgatcatcagagccgttgcattagtgaatttgcatttaggtctgagattcgtgcagtgaaattaagaagggatcggattgttgttgttcttgaacataagatttatgtttataactttatggatcttagacttcttcatcagattgaaactcaagctaatcctagaggattgtgttgcctttctcatcattctaatacgtctgtgttggcttgccctggtctcaatcgaggagagattcgtgttgaacatttcgggcttaacatggtacaaatcataaatgctcatgattcaagtattgcgtgtatgaccttgacattggatggtttgttgcttgcaactgctagtacaaagggaactctgattagaatcttcaacacaatggatggaactcgtttgcaagaggtacgaagaggagtcgacagagcagatatatatagcattgcactttcaccaaatgtgcagtggctggcggtatcaagtgacaaggggactgttcacattttctctcttagagttagggttgttggggaggattcttattccactgaaaatggagctctgttgacacaacaaaattattctaattctctgcaaggccttgtttctccaaccattggtaccaatcccggttcgtcattgtcgtttatgagaggtgttctaccaaagtatttcagctcggaatggtcatatgcacagtttcatgtatcagaagtcacacaattcttcgcagcatttggcagtaacaacacggttgctattatcggcatggatggaagtttctaccgatgcagctttgatcccgtgaacggaggagagatggggcaactggaatatatccactttatgaagatggacaaccgcccgtga

SEQ ID NO: 72118 - protein, 369 aa, Arabidopsis thaliana; identical to SEQ ID NO: 45179
  peptide (1)..(369): Ceres Seq. ID no. 4917622
  misc_feature (1)..(369): Homolog of NCBI NO: 7487233 NR Description: hypothetical protein At2g40810 [imported] - thaliana >gi|2623295|gb|AAB86441.1| hypothetical protein
  misc_feature (1)..(369): Homolog of NCBI NO: 30688413 NR Description: WD-40 repeat protein family [Arabidopsis >gi|26450478|dbj|BAC42353.1| unknown protein [Arabidopsis
  misc_feature (2)..(367): Homolog of NCBI NO: 30694449 NR Description: WD-40 repeat protein family [Arabidopsis thaliana]
  misc_feature (4)..(299): Homolog of NCBI NO: 34896164 NR Description: hypothetical protein~similar to Arabidopsis
  misc_feature (8)..(364): Homolog of NCBI NO: 14517420 NR Description: AT3g62770/F26K9_200 [Arabidopsis thaliana]
  misc_feature (2)..(298): Homolog of NCBI NO: 11288366 NR Description: hypothetical protein T5P19.90 - Arabidopsis >gi|7594522|emb|CAB88047.1| putative protein [Arabidopsis
  misc_feature (8)..(364): Homolog of NCBI NO: 11288364 NR Description: hypothetical protein F26K9.200 - Arabidopsis >gi|7362757|emb|CAB83127.1| putative protein [Arabidopsis
  misc_feature (7)..(364): Homolog of NCBI NO: 34907164 NR Description: P0423A12.19 [Oryza sativa (japonica
  misc_feature (3)..(276): Homolog of NCBI NO: 15238452 NR Description: putative protein; protein id: At5g05150.1 thaliana] >gi|9759256|dbj|BAB09691.1| contains similarity to
  misc_feature (289)..(365): Homolog of NCBI NO: 15238452 NR Description: putative protein; protein id: At5g05150.1 thaliana] >gi|9759256|dbj|BAB09691.1| contains similarity to

SEQ ID NO: 72119 - protein, 316 aa, Arabidopsis thaliana; identical to SEQ ID NO: 45180
  peptide (1)..(316): Ceres Seq. ID no. 4917623
  misc_feature (1)..(316): Homolog of NCBI NO: 7487233 NR Description: hypothetical protein At2g40810 [imported] - thaliana >gi|2623295|gb|AAB86441.1| hypothetical protein
  misc_feature (1)..(316): Homolog of NCBI NO: 30688413 NR Description: WD-40 repeat protein family [Arabidopsis >gi|26450478|dbj|BAC42353.1| unknown protein [Arabidopsis
  misc_feature (1)..(314): Homolog of NCBI NO: 30694449 NR Description: WD-40 repeat protein family [Arabidopsis thaliana]
  misc_feature (1)..(246): Homolog of NCBI NO: 34896164 NR Description: hypothetical protein~similar to Arabidopsis
  misc_feature (1)..(311): Homolog of NCBI NO: 14517420 NR Description: AT3g62770/F26K9_200 [Arabidopsis thaliana]
  misc_feature (1)..(245): Homolog of NCBI NO: 11288366 NR Description: hypothetical protein T5P19.90 - Arabidopsis >gi|7594522|emb|CAB88047.1| putative protein [Arabidopsis
  misc_feature (1)..(311): Homolog of NCBI NO: 11288364 NR Description: hypothetical protein F26K9.200 - Arabidopsis >gi|7362757|emb|CAB83127.1| putative protein [Arabidopsis
  misc_feature (1)..(311): Homolog of NCBI NO: 34907164 NR Description: P0423A12.19 [Oryza sativa (japonica
  misc_feature (1)..(223): Homolog of NCBI NO: 15238452 NR Description: putative protein; protein id: At5g05150.1 thaliana] >gi|9759256|dbj|BAB09691.1| contains similarity to
  misc_feature (236)..(312): Homolog of NCBI NO: 15238452 NR Description: putative protein; protein id: At5g05150.1 thaliana] >gi|9759256|dbj|BAB09691.1| contains similarity to

SEQ ID NO: 72120 - protein, 249 aa, Arabidopsis thaliana
  peptide (1)..(249): Ceres Seq. ID no. 4917624
  misc_feature (1)..(249): Homolog of NCBI NO: 7487233 NR Description: hypothetical protein At2g40810 [imported] - thaliana >gi|2623295|gb|AAB86441.1| hypothetical protein
  misc_feature (1)..(249): Homolog of NCBI NO: 30688413 NR Description: WD-40 repeat protein family [Arabidopsis >gi|26450478|dbj|BAC42353.1| unknown protein [Arabidopsis
  misc_feature (1)..(247): Homolog of NCBI NO: 30694449 NR Description: WD-40 repeat protein family [Arabidopsis thaliana]
  misc_feature (1)..(179): Homolog of NCBI NO: 34896164 NR Description: hypothetical protein~similar to Arabidopsis
  misc_feature (1)..(244): Homolog of NCBI NO: 14517420 NR Description: AT3g62770/F26K9_200 [Arabidopsis thaliana]
  misc_feature (1)..(178): Homolog of NCBI NO: 11288366 NR Description: hypothetical protein T5P19.90 - Arabidopsis >gi|7594522|emb|CAB88047.1| putative protein [Arabidopsis
  misc_feature (1)..(244): Homolog of NCBI NO: 11288364 NR Description: hypothetical protein F26K9.200 - Arabidopsis >gi|7362757|emb|CAB83127.1| putative protein [Arabidopsis
  misc_feature (1)..(244): Homolog of NCBI NO: 34907164 NR Description: P0423A12.19 [Oryza sativa (japonica
  misc_feature (1)..(156): Homolog of NCBI NO: 15238452 NR Description: putative protein; protein id: At5g05150.1 thaliana] >gi|9759256|dbj|BAB09691.1| contains similarity to
  misc_feature (169)..(245): Homolog of NCBI NO: 15238452 NR Description: putative protein; protein id: At5g05150.1 thaliana] >gi|9759256|dbj|BAB09691.1| contains similarity to
MDLRLLHQIETQANPRGLCCLSHHSNTSVLACPGLNRGEIRVEHFGLNMVQIINAHDSSIACMTLTLDGLLLATASTKGTLIRIFNTMDGTRLQEVRRGVDRADIYSIALSPNVQWLAVSSDKGTVHIFSLRVRVVGEDSYSTENGALLTQQNYSNSLQGLVSPTIGTNPGSSLSFMRGVLPKYFSSEWSYAQFHVSEVTQFFAAFGSNNTVAIIGMDGSFYRCSFDPVNGGEMGQLEYIHFMKMDNRP

SEQ ID NO: 72121 - DNA, 747 bp, Arabidopsis thaliana
  misc_feature (1)..(747): Ceres Seq. ID no. 4917673
  misc_feature: MA Experiment ID: 20000171 Result: Up-regulated in Transcription
  misc_feature: MA Experiment 20000171 PARAMETER Experiment Name: At_42deg_Heat_P Parameter: Age (day) Value: 14
  misc_feature: MA Experiment 20000171 PARAMETER Experiment Name: At_42deg_Heat_P Parameter: Organism Value: A. thaliana
  misc_feature: MA Experiment 20000171 PARAMETER Experiment Name: At_42deg_Heat_P Parameter: Plant Line Value: WS
  misc_feature: MA Experiment 20000171 PARAMETER Experiment Name: At_42deg_Heat_P Parameter: Temperature (deg C) Value: 42 vs. 22
  misc_feature: MA Experiment 20000171 PARAMETER Experiment Name: At_42deg_Heat_P Parameter: Timepoint (hr) Value: 1
  misc_feature: MA Experiment 20000171 PARAMETER Experiment Name: At_42deg_Heat_P Parameter: Tissue Value: Aerial
  misc_feature: MA Experiment ID: 20000573 Result: Up-regulated in Transcription
  misc_feature: MA Experiment 20000573 PARAMETER Experiment Name: At_100uM_ABA_Mutants__P Parameter: Organism Value: A. thaliana
  misc_feature: MA Experiment 20000573 PARAMETER Experiment Name: At_100uM_ABA_Mutants__P Parameter: Plant Line Value: CS22 vs. Ler wt
  misc_feature: MA Experiment 20000573 PARAMETER Experiment Name: At_100uM_ABA_Mutants__P Parameter: Timepoint (hr) Value: N/A
  misc_feature: MA Experiment 20000573 PARAMETER Experiment Name: At_100uM_ABA_Mutants__P Parameter: Tissue Value: Whole Plant
  misc_feature: MA Experiment 20000573 PARAMETER Experiment Name: At_100uM_ABA_Mutants__P Parameter: Treatment Value: None
  misc_feature: MA Experiment ID: 20000574 Result: Up-regulated in Transcription
  misc_feature: MA Experiment 20000574 PARAMETER Experiment Name: At_100uM_ABA_Mutants__P Parameter: Organism Value: A. thaliana
  misc_feature: MA Experiment 20000574 PARAMETER Experiment Name: At_100uM_ABA_Mutants__P Parameter: Plant Line Value: CS23 vs. Ler wt
  misc_feature: MA Experiment 20000574 PARAMETER Experiment Name: At_100uM_ABA_Mutants__P Parameter: Timepoint (hr) Value: N/A
  misc_feature: MA Experiment 20000574 PARAMETER Experiment Name: At_100uM_ABA_Mutants__P Parameter: Tissue Value: Whole Plant
  misc_feature: MA Experiment 20000574 PARAMETER Experiment Name: At_100uM_ABA_Mutants__P Parameter: Treatment Value: None
  misc_feature: MA Experiment ID: 20000576 Result: Up-regulated in Transcription
  misc_feature: MA Experiment 20000576 PARAMETER Experiment Name: At_100uM_ABA_Mutants__P Parameter: Organism Value: A. thaliana
  misc_feature: MA Experiment 20000576 PARAMETER Experiment Name: At_100uM_ABA_Mutants__P Parameter: Plant Line Value: CS23
  misc_feature: MA Experiment 20000576 PARAMETER Experiment Name: At_100uM_ABA_Mutants__P Parameter: Timepoint (hr) Value: 6
  misc_feature: MA Experiment 20000576 PARAMETER Experiment Name: At_100uM_ABA_Mutants__P Parameter: Tissue Value: Whole Plant
  misc_feature: MA Experiment 20000576 PARAMETER Experiment Name: At_100uM_ABA_Mutants__P Parameter: Treatment Value: 1uM ABA vs. No Treatment
  misc_feature: Pfam Name: AAA Pfam Description: ATPase family associated with various cellular activities (AAA)
atggagcctgagctcaagaacacattgatccgtgacctagacgctttctccaatggaaaagacttcttcaaaaccgtgggacgagcttggaaacgcggttatcttctttacggtccacctggaaccggaaaatcatcgcttgttgctgcaattgctaattttatgaactatagtatctatgatcttcagattcagagcgttaaagatgatgcaatgcttagacagattcttacctcaaccgagaaccgctccattcttctcattgaagatcttgattgcagtggagcagatactacttgtagaaaggaaaataaagatgaaacagagtatggtgagaatcagaacaagaagaagaagaaggatcctaaggtaactctgtctgggctactaaactttgtagacgggttatggtcaagctgtgtagaagagaggatcatcatattcacaacgaaccataaggagaaactcgatccggcattgctgagaccaggaaggatggatgttcacatcctcatggattattgcacgcctattgttttcaagaaacttgctgcattgtatcttgaaatcgaagaacacgagttgtttgaccctattgagaagatgttccttgaggtgaaagcaactccagctgagatcacagagaagcttatggtaagcaaggatccggatgttacgcttaagggtcttgttgagtttcttgaatccaagaagatgaccaaggagagtgttgattctgaaatttaa

SEQ ID NO: 72122 - protein, 248 aa, Arabidopsis thaliana
  peptide (1)..(248): Ceres Seq. ID no. 4917674
  misc_feature: Pfam Name: AAA Pfam Description: ATPase family associated with various cellular activities (AAA)
  misc_feature (1)..(248): Homolog of NCBI NO: 15235565 NR Description: putative protein; protein id: At4g05380.1
  misc_feature (1)..(248): Homolog of NCBI NO: 15218579 NR Description: unknown protein; protein id: At1g43910.1
  misc_feature (1)..(248): Homolog of NCBI NO: 39104583 NR Description: unknown protein [Arabidopsis thaliana]
  misc_feature (123)..(243): Homolog of NCBI NO: 7485704 NR Description: hypothetical protein F18B3.220 - Arabidopsis >gi|4835245|emb|CAB42923.1| putative mitochondrial protein
  misc_feature (1)..(106): Homolog of NCBI NO: 7485704 NR Description: hypothetical protein F18B3.220 - Arabidopsis >gi|4835245|emb|CAB42923.1| putative mitochondrial protein
  misc_feature (1)..(243): Homolog of NCBI NO: 30693380 NR Description: AAA-type ATPase family [Arabidopsis thaliana]
  misc_feature (1)..(243): Homolog of NCBI NO: 39104562 NR Description: putative BCS1 protein [Arabidopsis thaliana]
  misc_feature (1)..(242): Homolog of NCBI NO: 21592769 NR Description: BCS1 protein-like protein [Arabidopsis thaliana]
  misc_feature (1)..(242): Homolog of NCBI NO: 7485703 NR Description: hypothetical protein F18B3.210 - Arabidopsis >gi|4835244|emb|CAB42922.1| putative mitochondrial protein thaliana] >gi|13877697|gb|AAK43926.1|AF370607_1 putative
  misc_feature (1)..(242): Homolog of NCBI NO: 30693378 NR Description: AAA-type ATPase family [Arabidopsis thaliana] AT3g50930/F18B3_210 [Arabidopsis thaliana]
MEPELKNTLIRDLDAFSNGKDFFKTVGRAWKRGYLLYGPPGTGKSSLVAAIANFMNYSIYDLQIQSVKDDAMLRQILTSTENRSILLIEDLDCSGADTTCRKENKDETEYGENQNKKKKKDPKVTLSGLLNFVDGLWSSCVEERIIIFTTNHKEKLDPALLRPGRMDVHILMDYCTPIVFKKLAALYLEIEEHELFDPIEKMFLEVKATPAEITEKLMVSKDPDVTLKGLVEFLESKKMTKESVDSEI

SEQ ID NO: 72123 - protein, 194 aa, Arabidopsis thaliana
  peptide (1)..(194): Ceres Seq. ID no. 4917675
  misc_feature: Pfam Name: AAA Pfam Description: ATPase family associated with various cellular activities (AAA)
  misc_feature (1)..(194): Homolog of NCBI NO: 15235565 NR Description: putative protein; protein id: At4g05380.1
  misc_feature (1)..(194): Homolog of NCBI NO: 15218579 NR Description: unknown protein; protein id: At1g43910.1
  misc_feature (1)..(194): Homolog of NCBI NO: 39104583 NR Description: unknown protein [Arabidopsis thaliana]
  misc_feature (69)..(189): Homolog of NCBI NO: 7485704 NR Description: hypothetical protein F18B3.220 - Arabidopsis >gi|4835245|emb|CAB42923.1| putative mitochondrial protein
  misc_feature (1)..(52): Homolog of NCBI NO: 7485704 NR Description: hypothetical protein F18B3.220 - Arabidopsis >gi|4835245|emb|CAB42923.1| putative mitochondrial protein
  misc_feature (1)..(189): Homolog of NCBI NO: 30693380 NR Description: AAA-type ATPase family [Arabidopsis thaliana]
  misc_feature (1)..(189): Homolog of NCBI NO: 39104562 NR Description: putative BCS1 protein [Arabidopsis thaliana]
  misc_feature (1)..(188): Homolog of NCBI NO: 21592769 NR Description: BCS1 protein-like protein [Arabidopsis thaliana]
  misc_feature (1)..(188): Homolog of NCBI NO: 7485703 NR Description: hypothetical protein F18B3.210 - Arabidopsis >gi|4835244|emb|CAB42922.1| putative mitochondrial protein thaliana] >gi|13877697|gb|AAK43926.1|AF370607_1 putative
  misc_feature (1)..(188): Homolog of NCBI NO: 30693378 NR Description: AAA-type ATPase family [Arabidopsis thaliana] AT3g50930/F18B3_210 [Arabidopsis thaliana]
MNYSIYDLQIQSVKDDAMLRQILTSTENRSILLIEDLDCSGADTTCRKENKDETEYGENQNKKKKKDPKVTLSGLLNFVDGLWSSCVEERIIIFTTNHKEKLDPALLRPGRMDVHILMDYCTPIVFKKLAALYLEIEEHELFDPIEKMFLEVKATPAEITEKLMVSKDPDVTLKGLVEFLESKKMTKESVDSEI

SEQ ID NO: 72124 - protein, 177 aa, Arabidopsis thaliana
  peptide (1)..(177): Ceres Seq. ID no. 4917676
  misc_feature: Pfam Name: AAA Pfam Description: ATPase family associated with various cellular activities (AAA)
  misc_feature (1)..(177): Homolog of NCBI NO: 15235565 NR Description: putative protein; protein id: At4g05380.1
  misc_feature (1)..(177): Homolog of NCBI NO: 15218579 NR Description: unknown protein; protein id: At1g43910.1
  misc_feature (1)..(177): Homolog of NCBI NO: 39104583 NR Description: unknown protein [Arabidopsis thaliana]
  misc_feature (52)..(172): Homolog of NCBI NO: 7485704 NR Description: hypothetical protein F18B3.220 - Arabidopsis >gi|4835245|emb|CAB42923.1| putative mitochondrial protein
  misc_feature (1)..(35): Homolog of NCBI NO: 7485704 NR Description: hypothetical protein F18B3.220 - Arabidopsis >gi|4835245|emb|CAB42923.1| putative mitochondrial protein
  misc_feature (1)..(172): Homolog of NCBI NO: 30693380 NR Description: AAA-type ATPase family [Arabidopsis thaliana]
  misc_feature (1)..(172): Homolog of NCBI NO: 39104562 NR Description: putative BCS1 protein [Arabidopsis thaliana]
  misc_feature (1)..(171): Homolog of NCBI NO: 21592769 NR Description: BCS1 protein-like protein [Arabidopsis thaliana]
  misc_feature (1)..(171): Homolog of NCBI NO: 7485703 NR Description: hypothetical protein F18B3.210 - Arabidopsis >gi|4835244|emb|CAB42922.1| putative mitochondrial protein thaliana] >gi|13877697|gb|AAK43926.1|AF370607_1 putative
  misc_feature (1)..(171): Homolog of NCBI NO: 30693378 NR Description: AAA-type ATPase family [Arabidopsis thaliana] AT3g50930/F18B3_210 [Arabidopsis thaliana]
MLRQILTSTENRSILLIEDLDCSGADTTCRKENKDETEYGENQNKKKKKDPKVTLSGLLNFVDGLWSSCVEERIIIFTTNHKEKLDPALLRPGRMDVHILMDYCTPIVFKKLAALYLEIEEHELFDPIEKMFLEVKATPAEITEKLMVSKDPDVTLKGLVEFLESKKMTKESVDSEI

SEQ ID NO: 72125 - DNA, 1140 bp, Arabidopsis thaliana
  misc_feature (1)..(1140): Ceres Seq. ID no. 4917757
  misc_feature: MA Experiment ID: 20000169 Result: Up-regulated in Transcription
  misc_feature: MA Experiment 20000169 PARAMETER Experiment Name: At_100uM_ABA_P Parameter: Age (day) Value: 14
  misc_feature: MA Experiment 20000169 PARAMETER Experiment Name: At_100uM_ABA_P Parameter: Organism Value: A. thaliana
  misc_feature: MA Experiment 20000169 PARAMETER Experiment Name: At_100uM_ABA_P Parameter: Plant Line Value: WS
  misc_feature: MA Experiment 20000169 PARAMETER Experiment Name: At_100uM_ABA_P Parameter: Timepoint (hr) Value: 6
  misc_feature: MA Experiment 20000169 PARAMETER Experiment Name: At_100uM_ABA_P Parameter: Tissue Value: Aerial
  misc_feature: MA Experiment 20000169 PARAMETER Experiment Name: At_100uM_ABA_P Parameter: Treatment Value: 100uM ABA vs. No Treatment
  misc_feature: MA Experiment ID: 20000180 Result: Up-regulated in Transcription
  misc_feature: MA Experiment 20000180 PARAMETER Experiment Name: At_Germinating_Seeds_P Parameter: Age (hr) Value: 24 vs. 0
  misc_feature: MA Experiment 20000180 PARAMETER Experiment Name: At_Germinating_Seeds_P Parameter: Tissue Value: Germinating Seeds
  misc_feature: MA Experiment ID: 20000182 Result: Up-regulated in Transcription
  misc_feature: MA Experiment 20000182 PARAMETER Experiment Name: At_2mM_SA_P Parameter: Age (day) Value: 14
  misc_feature: MA Experiment 20000182 PARAMETER Experiment Name: At_2mM_SA_P Parameter: Organism Value: A. thaliana
  misc_feature: MA Experiment 20000182 PARAMETER Experiment Name: At_2mM_SA_P Parameter: Plant Line Value: WS
  misc_feature: MA Experiment 20000182 PARAMETER Experiment Name: At_2mM_SA_P Parameter: Timepoint (hr) Value: 6
  misc_feature: MA Experiment 20000182 PARAMETER Experiment Name: At_2mM_SA_P Parameter: Tissue Value: Aerial
  misc_feature: MA Experiment 20000182 PARAMETER Experiment Name: At_2mM_SA_P Parameter: Treatment Value: 2mM SA vs. No Treatment
  misc_feature: MA Experiment ID: 20000185 Result: Up-regulated in Transcription
  misc_feature: MA Experiment 20000185 PARAMETER Experiment Name: At_Roots__P Parameter: Age (day) Value: 7 vs. 21
  misc_feature: MA Experiment 20000185 PARAMETER Experiment Name: At_Roots__P Parameter: Organism Value: A. thaliana
  misc_feature: MA Experiment 20000185 PARAMETER Experiment Name: At_Roots__P Parameter: Tissue Value: Roots vs. Whole Plant
  misc_feature: MA Experiment ID: 20000265 Result: Up-regulated in Transcription
  misc_feature: MA Experiment 20000265 PARAMETER Experiment Name: At_Open_Flower_P Parameter: Age (day) Value: 21
  misc_feature: MA Experiment 20000265 PARAMETER Experiment Name: At_Open_Flower_P Parameter: Plant Line Value: WS
  misc_feature: MA Experiment 20000265 PARAMETER Experiment Name: At_Open_Flower_P Parameter: Tissue Value: Closed Flower vs. Whole Plant
  misc_feature: MA Experiment ID: 20000286 Result: Up-regulated in Transcription
  misc_feature: MA Experiment 20000286 PARAMETER Experiment Name: At_Open_Flower_P Parameter: Age (day) Value: 21
  misc_feature: MA Experiment 20000286 PARAMETER Experiment Name: At_Open_Flower_P Parameter: Plant Line Value: WS
  misc_feature: MA Experiment 20000286 PARAMETER Experiment Name: At_Open_Flower_P Parameter: Tissue Value: Half Open vs. Whole Plant
  misc_feature: MA Experiment ID: 20000439 Result: Up-regulated in Transcription
  misc_feature: MA Experiment 20000439 PARAMETER Experiment Name: At_Roots__P Parameter: Age (day) Value: 14 vs. 21
  misc_feature: MA Experiment 20000439 PARAMETER Experiment Name: At_Roots__P Parameter: Organism Value: A. thaliana
  misc_feature: MA Experiment 20000439 PARAMETER Experiment Name: At_Roots__P Parameter: Tissue Value: Roots vs. Whole Plant
  misc_feature: MA Experiment ID: 20000453 Result: Up-regulated in Transcription
  misc_feature: MA Experiment 20000453 PARAMETER Experiment Name: At_100uM_ABA_P Parameter: Age (day) Value: 15
  misc_feature: MA Experiment 20000453 PARAMETER Experiment Name: At_100uM_ABA_P Parameter: Organism Value: A. thaliana
  misc_feature: MA Experiment 20000453 PARAMETER Experiment Name: At_100uM_ABA_P Parameter: Plant Line Value: WS
  misc_feature: MA Experiment 20000453 PARAMETER Experiment Name: At_100uM_ABA_P Parameter: Timepoint (hr) Value: 24
  misc_feature: MA Experiment 20000453 PARAMETER Experiment Name: At_100uM_ABA_P Parameter: Tissue Value: Aerial
  misc_feature: MA Experiment 20000453 PARAMETER Experiment Name: At_100uM_ABA_P Parameter: Treatment Value: 100uM ABA vs. No Treatment
  misc_feature: MA Experiment ID: 20001904 Result: Up-regulated in Transcription
  misc_feature: MA Experiment 20001904 PARAMETER Experiment Name: At_Drought_Reproduction_P Parameter: Age (day) Value: 37
  misc_feature: MA Experiment 20001904 PARAMETER Experiment Name: At_Drought_Reproduction_P Parameter: Organism Value: A. thaliana
  misc_feature: MA Experiment 20001904 PARAMETER Experiment Name: At_Drought_Reproduction_P Parameter: Plant Line Value: WS
  misc_feature: MA Experiment 20001904 PARAMETER Experiment Name: At_Drought_Reproduction_P Parameter: Timepoint (day) Value: 7
  misc_feature: MA Experiment 20001904 PARAMETER Experiment Name: At_Drought_Reproduction_P Parameter: Tissue Value: Rosettes
  misc_feature: MA Experiment 20001904 PARAMETER Experiment Name: At_Drought_Reproduction_P Parameter: Treatment Value: Drought vs. No Drought
  misc_feature: MA Experiment ID: 20001905 Result: Up-regulated in Transcription
  misc_feature: MA Experiment 20001905 PARAMETER Experiment Name: At_Drought_Reproduction_P Parameter: Age (day) Value: 40
  misc_feature: MA Experiment 20001905 PARAMETER Experiment Name: At_Drought_Reproduction_P Parameter: Organism Value: A. thaliana
  misc_feature: MA Experiment 20001905 PARAMETER Experiment Name: At_Drought_Reproduction_P Parameter: Plant Line Value: WS
  misc_feature: MA Experiment 20001905 PARAMETER Experiment Name: At_Drought_Reproduction_P Parameter: Timepoint (day) Value: 10
  misc_feature: MA Experiment 20001905 PARAMETER Experiment Name: At_Drought_Reproduction_P Parameter: Tissue Value: Rosettes
  misc_feature: MA Experiment 20001905 PARAMETER Experiment Name: At_Drought_Reproduction_P Parameter: Treatment Value: Drought vs. No Drought
  misc_feature: MA Experiment ID: 20001906 Result: Up-regulated in Transcription
  misc_feature: MA Experiment 20001906 PARAMETER Experiment Name: At_Drought_Reproduction_P Parameter: Age (day) Value: 35
  misc_feature: MA Experiment 20001906 PARAMETER Experiment Name: At_Drought_Reproduction_P Parameter: Organism Value: A. thaliana
  misc_feature: MA Experiment 20001906 PARAMETER Experiment Name: At_Drought_Reproduction_P Parameter: Plant Line Value: WS
  misc_feature: MA Experiment 20001906 PARAMETER Experiment Name: At_Drought_Reproduction_P Parameter: Timepoint (day) Value: 5
  misc_feature: MA Experiment 20001906 PARAMETER Experiment Name: At_Drought_Reproduction_P Parameter: Tissue Value: Siliques
  misc_feature: MA Experiment 20001906 PARAMETER Experiment Name: At_Drought_Reproduction_P Parameter: Treatment Value: Drought vs. No Drought
atgggcaagattatcttggttgtttctcttactgctttatgcatttttatgctcaagcacgcaccgagtttcacatcaccaaccgcgttctctcgtagcgaggaaggtgtgactcatgtgttagtcactggtggtgctggatatatcggatcacatgctgcgttgaggctcttaaaagattcataccgtgtaaccattgtggacaatctttctcggggaaatcttggtgccgtcaaggttttacaaggattgttcccagaacccgggaggcttcaatttatttatgctgacttaggagatgccaaagctgttgataaaatcttctcagagaacgcgtttgatgctgttatgcattttgctgcagtagcatatgttggagagagcactctagatcctctaaagtattaccacaacattacatcaaacacattagtagttcttgaagctgtggctagacataaagtgaagaagttgatatattcaagcacatgtgccacttatggagaacctgacaagatgcctattgttgaagttactccacaggtccccattaacccttatggaaaagctaagaagatggctgaagatatgatcctggatttctctaaaaactctgacatggcagtcatgatcctaagatactttaacgtgataggttcagatccagaaggtagactaggagaagctccaaagcccgagctacgtgaacacggacggatttcgggtgcctgtttcgatgcagctcgtggcgtgattccaggccttcaggtcaaaggaacagactacaaaacaggagatggaacttgtgttcgtgactacatagatgttactgaccttgtagatgctcacgtaaaagctctcgagaaagctaagcctagaaatgtgggaatatacaatgtaggtacaggaaaaggaagatcggtgaaagagtttgtggaagcatgtaagaaagcgacaggagtagatatcaaagtagattttttgcctcgaagacctggagattacgcagaggtttacagtgatccagcaaagattctgagagatcttaattggtctgctcgttacactaatcttcaagaaagtcttgaggttgcttggaagtggcaaaagactcatccccatggatatgcttcttcttaa

SEQ ID NO: 72126 - protein, 379 aa, Arabidopsis thaliana
  peptide (1)..(379): Ceres Seq. ID no. 4917758
  misc_feature (40)..(373): Pfam Name: NAD dependent epimerase/dehydratase family Pfam Description: NAD dependent epimerase/dehydratase family
  misc_feature (1)..(379): Homolog of NCBI NO: 15237098 NR Description: UDP-glucose 4-epimerase - like protein; protein
  misc_feature (2)..(378): Homolog of NCBI NO: 15241503 NR Description: putative protein; protein id: At5g44480.1
  misc_feature (1)..(376): Homolog of NCBI NO: 22329866 NR Description: UDP-galactose 4-epimerase-like protein; protein At1g30620.1, supported by cDNA: gi_13272474, supported by cDNA: [Arabidopsis thaliana] >gi|25292360|pir||E86431 T5I8.7 Strong
  misc_feature (1)..(376): Homolog of NCBI NO: 24417398 NR Description: unknown [Arabidopsis thaliana]
  misc_feature (1)..(379): Homolog of NCBI NO: 7437275 NR Description: probable UDPglucose 4-epimerase (EC 5.1.3.2)
  misc_feature (1)..(379): Homolog of NCBI NO: 27529690 NR Description: UDP-galactose 4-epimerase-like protein [Oryza
  misc_feature (1)..(379): Homolog of NCBI NO: 26106016 NR Description: UDP-galactose 4-epimerase-like protein [Oryza
  misc_feature (1)..(376): Homolog of NCBI NO: 27260937 NR Description: OJ1417_E01.21 [Oryza sativa (japonica
  misc_feature (1)..(376): Homolog of NCBI NO: 25553524 NR Description: UDP-galactose 4-epimerase-like protein [Oryza
  misc_feature (212)..(375): Homolog of NCBI NO: 5852089 NR Description: zwh12.1 [Oryza sativa (indica cultivar-group)]
MGKIILVVSLTALCIFMLKHAPSFTSPTAFSRSEEGVTHVLVTGGAGYIGSHAALRLLKDSYRVTIVDNLSRGNLGAVKVLQGLFPEPGRLQFIYADLGDAKAVDKIFSENAFDAVMHFAAVAYVGESTLDPLKYYHNITSNTLVVLEAVARHKVKKLIYSSTCATYGEPDKMPIVEVTPQVPINPYGKAKKMAEDMILDFSKNSDMAVMILRYFNVIGSDPEGRLGEAPKPELREHGRISGACFDAARGVIPGLQVKGTDYKTGDGTCVRDYIDVTDLVDAHVKALEKAKPRNVGIYNVGTGKGRSVKEFVEACKKATGVDIKVDFLPRRPGDYAEVYSDPAKILRDLNWSARYTNLQESLEVAWKWQKTHPHGYASS

SEQ ID NO: 72127 - protein, 363 aa, Arabidopsis thaliana
  peptide (1)..(363): Ceres Seq. ID no. 4917759
  misc_feature (24)..(357): Pfam Name: NAD dependent epimerase/dehydratase family Pfam Description: NAD dependent epimerase/dehydratase family
  misc_feature (1)..(363): Homolog of NCBI NO: 15237098 NR Description: UDP-glucose 4-epimerase - like protein; protein
  misc_feature (1)..(362): Homolog of NCBI NO: 15241503 NR Description: putative protein; protein id: At5g44480.1
  misc_feature (1)..(360): Homolog of NCBI NO: 22329866 NR Description: UDP-galactose 4-epimerase-like protein; protein At1g30620.1, supported by cDNA: gi_13272474, supported by cDNA: [Arabidopsis thaliana] >gi|25292360|pir||E86431 T5I8.7 Strong
  misc_feature (1)..(360): Homolog of NCBI NO: 24417398 NR Description: unknown [Arabidopsis thaliana]
  misc_feature (1)..(363): Homolog of NCBI NO: 7437275 NR Description: probable UDPglucose 4-epimerase (EC 5.1.3.2)
  misc_feature (1)..(363): Homolog of NCBI NO: 27529690 NR Description: UDP-galactose 4-epimerase-like protein [Oryza
  misc_feature (1)..(363): Homolog of NCBI NO: 26106016 NR Description: UDP-galactose 4-epimerase-like protein [Oryza
  misc_feature (1)..(360): Homolog of NCBI NO: 27260937 NR Description: OJ1417_E01.21 [Oryza sativa (japonica
  misc_feature (1)..(360): Homolog of NCBI NO: 25553524 NR Description: UDP-galactose 4-epimerase-like protein [Oryza
  misc_feature (196)..(359): Homolog of NCBI NO: 5852089 NR Description: zwh12.1 [Oryza sativa (indica cultivar-group)]
MLKHAPSFTSPTAFSRSEEGVTHVLVTGGAGYIGSHAALRLLKDSYRVTIVDNLSRGNLGAVKVLQGLFPEPGRLQFIYADLGDAKAVDKIFSENAFDAVMHFAAVAYVGESTLDPLKYYHNITSNTLVVLEAVARHKVKKLIYSSTCATYGEPDKMPIVEVTPQVPINPYGKAKKMAEDMILDFSKNSDMAVMILRYFNVIGSDPEGRLGEAPKPELREHGRISGACFDAARGVIPGLQVKGTDYKTGDGTCVRDYIDVTDLVDAHVKALEKAKPRNVGIYNVGTGKGRSVKEFVEACKKATGVDIKVDFLPRRPGDYAEVYSDPAKILRDLNWSARYTNLQESLEVAWKWQKTHPHGYASS

SEQ ID NO: 72128 - protein, 263 aa, Arabidopsis thaliana
  peptide (1)..(263): Ceres Seq. ID no. 4917760
  misc_feature (1)..(257): Pfam Name: NAD dependent epimerase/dehydratase family Pfam Description: NAD dependent epimerase/dehydratase family
  misc_feature (1)..(263): Homolog of NCBI NO: 15237098 NR Description: UDP-glucose 4-epimerase - like protein; protein
  misc_feature (1)..(262): Homolog of NCBI NO: 15241503 NR Description: putative protein; protein id: At5g44480.1
  misc_feature (1)..(260): Homolog of NCBI NO: 22329866 NR Description: UDP-galactose 4-epimerase-like protein; protein At1g30620.1, supported by cDNA: gi_13272474, supported by cDNA: [Arabidopsis thaliana] >gi|25292360|pir||E86431 T5I8.7 Strong
  misc_feature (1)..(260): Homolog of NCBI NO: 24417398 NR Description: unknown [Arabidopsis thaliana]
  misc_feature (1)..(263): Homolog of NCBI NO: 7437275 NR Description: probable UDPglucose 4-epimerase (EC 5.1.3.2)
  misc_feature (1)..(263): Homolog of NCBI NO: 27529690 NR Description: UDP-galactose 4-epimerase-like protein [Oryza
  misc_feature (1)..(263): Homolog of NCBI NO: 26106016 NR Description: UDP-galactose 4-epimerase-like protein [Oryza
  misc_feature (1)..(260): Homolog of NCBI NO: 27260937 NR Description: OJ1417_E01.21 [Oryza sativa (japonica
  misc_feature (1)..(260): Homolog of NCBI NO: 25553524 NR Description: UDP-galactose 4-epimerase-like protein [Oryza
  misc_feature (96)..(259): Homolog of NCBI NO: 5852089 NR Description: zwh12.1 [Oryza sativa (indica cultivar-group)]
MHFAAVAYVGESTLDPLKYYHNITSNTLVVLEAVARHKVKKLIYSSTCATYGEPDKMPIVEVTPQVPINPYGKAKKMAEDMILDFSKNSDMAVMILRYFNVIGSDPEGRLGEAPKPELREHGRISGACFDAARGVIPGLQVKGTDYKTGDGTCVRDYIDVTDLVDAHVKALEKAKPRNVGIYNVGTGKGRSVKEFVEACKKATGVDIKVDFLPRRPGDYAEVYSDPAKILRDLNWSARYTNLQESLEVAWKWQKTHPHGYASS

SEQ ID NO: 72129 - DNA, 1464 bp, Arabidopsis thaliana
  misc_feature (1)..(1464): Ceres Seq. ID no. 4917893
  misc_feature: MA Experiment ID: 20000180 Result: Down-regulated in Transcription
  misc_feature: MA Experiment 20000180 PARAMETER Experiment Name: At_Germinating_Seeds_P Parameter: Age (hr) Value: 24 vs. 0
  misc_feature: MA Experiment 20000180 PARAMETER Experiment Name: At_Germinating_Seeds_P Parameter: Tissue Value: Germinating Seeds
  misc_feature: MA Experiment ID: 20000227 Result: Up-regulated in Transcription
  misc_feature: MA Experiment 20000227 PARAMETER Experiment Name: At_Root-Tips-vs-Tops_P Parameter: Tissue Value: Root Tips vs. Root Tops
  misc_feature: MA Experiment ID: 20000439 Result: Up-regulated in Transcription
  misc_feature: MA Experiment 20000439 PARAMETER Experiment Name: At_Roots__P Parameter: Age (day) Value: 14 vs. 21
  misc_feature: MA Experiment 20000439 PARAMETER Experiment Name: At_Roots__P Parameter: Organism Value: A. thaliana
  misc_feature: MA Experiment 20000439 PARAMETER Experiment Name: At_Roots__P Parameter: Tissue Value: Roots vs. Whole Plant
  misc_feature: Pfam Name: p450 Pfam Description: Cytochrome P450
atggtttcactctttttagtgaagatatttcattgggtctatcagtggagaaatccaaaaactaatggaaaactacctccagggtctatgggctttccgttcattggagagacttttgagttctttaagcctcatgacgctcttcaattttcaacattcatcaaagacagagtccttaggttttttgctgatttctctagcattcatttgtcattttttcggacaagcttatttggagacaaagctataatctcaatggatatggaattgaatctcgagatggcgaaggcaaattccgtccctggtgtcacgaagagcgtaatacgactatttggggagaacaacttgtttttgcagagcaaggagtcccataaacatgttcggaacttgacgttccagttgttgggtccacaaggtttaaaatcaaggatgattgaagacgtggatctcttggctcgcacgtacatggaggaaggagctaggaacggctaccttgacgtaaaggaaacatcaagcaagattttaattggatgccttgcgaagaaagttatgggcgagatggaaccagaggcggcgaaagaactcgccctctgctggagatattttcagagtggctggtttagattctttctcaaccttcctgggacaggtgtctataaaatgatgaaggtgctttttgtgcaatacactgaggctgatatttcgtggcaggcaagaaagaggatgatgaagttactaaggaagacagtgttgacgaagagagcatcaggagaggagttaggggagttcttcaacatcatatttggagaaatggaaggagaaggagaaacgatgagcgtagagaatgcggtcgagtacatatataccttctttttggttgctaatgaaacaacaccaaggattcttgcggctacagtaaagtttataagcgaccaccctaaagtcaagcaagagttacaaagagaacatgaagaaattgttcggggtaaggcagagaaggaaggcggcctaacatgggaagactacaaatcaatgcatttcactcagatggttatcaatgagtcgcttagaatcataagcacagcaccaacagttcttagagtacttgaacatgatttccaagttggtgattatacaattccagctggttggacctttatgggatatcctcatatccatttcaattcagaaaaatacgaagacccttacgcatttaatccatggcgctgggagggaaaggatttgggcgcgatcgtctccaagactttcattcccttcggtgcaggtcgtagactttgtgtaggggctgagtttgctaagatgcagatggccgtttttatccatcatttgtttagatacaggtggtctatgaagtcagggacaacaataattcgaagctttatgcttatgtttccaggtgggtgtgatgttcaaatttcagaagacactgaagtcgataagtga

SEQ ID NO: 72130 - protein, 487 aa, Arabidopsis thaliana
  peptide (1)..(487): Ceres Seq. ID no. 4917894
  misc_feature: Pfam Name: p450 Pfam Description: Cytochrome P450
  misc_feature (1)..(487): Homolog of NCBI NO: 15233767 NR Description: steroid 22-alpha-hydroxylase(cytochrome p450), protein id: At4g15300.1 [Arabidopsis thaliana]
  misc_feature (1)..(268): Homolog of NCBI NO: 15218776 NR Description: cytochrome P450, putative; protein id:
  misc_feature (237)..(486): Homolog of NCBI NO: 15218776 NR Description: cytochrome P450, putative; protein id:
  misc_feature (1)..(268): Homolog of NCBI NO: 2190554 NR Description: Similar to Arabidopsis cytochrome P450 CYP90
  misc_feature (1)..(268): Homolog of NCBI NO: 6686409 NR Description: F1E22.5 [Arabidopsis thaliana]
  misc_feature (237)..(452): Homolog of NCBI NO: 2190554 NR Description: Similar to Arabidopsis cytochrome P450 CYP90
  misc_feature (237)..(452): Homolog of NCBI NO: 6686409 NR Description: F1E22.5 [Arabidopsis thaliana]
  misc_feature (1)..(484): Homolog of NCBI NO: 9294334 NR Description: cytochrome P450-like protein [Arabidopsis
  misc_feature (72)..(484): Homolog of NCBI NO: 15230741 NR Description: cytochrome P450, putative; protein id:
  misc_feature (69)..(484): Homolog of NCBI NO: 18700149 NR Description: At4g15396 [Arabidopsis thaliana]
MVSLFLVKIFHWVYQWRNPKTNGKLPPGSMGFPFIGETFEFFKPHDALQFSTFIKDRVLRFFADFSSIHLSFFRTSLFGDKAIISMDMELNLEMAKANSVPGVTKSVIRLFGENNLFLQSKESHKHVRNLTFQLLGPQGLKSRMIEDVDLLARTYMEEGARNGYLDVKETSSKILIGCLAKKVMGEMEPEAAKELALCWRYFQSGWFRFFLNLPGTGVYKMMKVLFVQYTEADISWQARKRMMKLLRKTVLTKRASGEELGEFFNIIFGEMEGEGETMSVENAVEYIYTFFLVANETTPRILAATVKFISDHPKVKQELQREHEEIVRGKAEKEGGLTWEDYKSMHFTQMVINESLRIISTAPTVLRVLEHDFQVGDYTIPAGWTFMGYPHIHFNSEKYEDPYAFNPWRWEGKDLGAIVSKTFIPFGAGRRLCVGAEFAKMQMAVFIHHLFRYRWSMKSGTTIIRSFMLMFPGGCDVQISEDTEVDK

SEQ ID NO: 72131 - protein, 458 aa, Arabidopsis thaliana
  peptide (1)..(458): Ceres Seq. ID no. 4917895
  misc_feature: Pfam Name: p450 Pfam Description: Cytochrome P450
  misc_feature (1)..(458): Homolog of NCBI NO: 15233767 NR Description: steroid 22-alpha-hydroxylase(cytochrome p450), protein id: At4g15300.1 [Arabidopsis thaliana]
  misc_feature (1)..(239): Homolog of NCBI NO: 15218776 NR Description: cytochrome P450, putative; protein id:
  misc_feature (208)..(457): Homolog of NCBI NO: 15218776 NR Description: cytochrome P450, putative; protein id:
  misc_feature (1)..(239): Homolog of NCBI NO: 2190554 NR Description: Similar to Arabidopsis cytochrome P450 CYP90
  misc_feature (1)..(239): Homolog of NCBI NO: 6686409 NR Description: F1E22.5 [Arabidopsis thaliana]
  misc_feature (208)..(423): Homolog of NCBI NO: 2190554 NR Description: Similar to Arabidopsis cytochrome P450 CYP90
  misc_feature (208)..(423): Homolog of NCBI NO: 6686409 NR Description: F1E22.5 [Arabidopsis thaliana]
  misc_feature (1)..(455): Homolog of NCBI NO: 9294334 NR Description: cytochrome P450-like protein [Arabidopsis
  misc_feature (43)..(455): Homolog of NCBI NO: 15230741 NR Description: cytochrome P450, putative; protein id:
  misc_feature (40)..(455): Homolog of NCBI NO: 18700149 NR Description: At4g15396 [Arabidopsis thaliana]
MGFPFIGETFEFFKPHDALQFSTFIKDRVLRFFADFSSIHLSFFRTSLFGDKAIISMDMELNLEMAKANSVPGVTKSVIRLFGENNLFLQSKESHKHVRNLTFQLLGPQGLKSRMIEDVDLLARTYMEEGARNGYLDVKETSSKILIGCLAKKVMGEMEPEAAKELALCWRYFQSGWFRFFLNLPGTGVYKMMKVLFVQYTEADISWQARKRMMKLLRKTVLTKRASGEELGEFFNIIFGEMEGEGETMSVENAVEYIYTFFLVANETTPRILAATVKFISDHPKVKQELQREHEEIVRGKAEKEGGLTWEDYKSMHFTQMVINESLRIISTAPTVLRVLEHDFQVGDYTIPAGWTFMGYPHIHFNSEKYEDPYAFNPWRWEGKDLGAIVSKTFIPFGAGRRLCVGAEFAKMQMAVFIHHLFRYRWSMKSGTTIIRSFMLMFPGGCDVQISEDTEVDK

SEQ ID NO: 72132 - protein, 402 aa, Arabidopsis thaliana
  peptide (1)..(402): Ceres Seq. ID no. 4917896
  misc_feature: Pfam Name: p450 Pfam Description: Cytochrome P450
  misc_feature (1)..(402): Homolog of NCBI NO: 15233767 NR Description: steroid 22-alpha-hydroxylase(cytochrome p450), protein id: At4g15300.1 [Arabidopsis thaliana]
  misc_feature (1)..(183): Homolog of NCBI NO: 15218776 NR Description: cytochrome P450, putative; protein id:
  misc_feature (152)..(401): Homolog of NCBI NO: 15218776 NR Description: cytochrome P450, putative; protein id:
  misc_feature (1)..(183): Homolog of NCBI NO: 2190554 NR Description: Similar to Arabidopsis cytochrome P450 CYP90
  misc_feature (1)..(183): Homolog of NCBI NO: 6686409 NR Description: F1E22.5 [Arabidopsis thaliana]
  misc_feature (152)..(367): Homolog of NCBI NO: 2190554 NR Description: Similar to Arabidopsis cytochrome P450 CYP90
  misc_feature (152)..(367): Homolog of NCBI NO: 6686409 NR Description: F1E22.5 [Arabidopsis thaliana]
  misc_feature (1)..(399): Homolog of NCBI NO: 9294334 NR Description: cytochrome P450-like protein [Arabidopsis
  misc_feature (1)..(399): Homolog of NCBI NO: 15230741 NR Description: cytochrome P450, putative; protein id:
  misc_feature (1)..(399): Homolog of NCBI NO: 18700149 NR Description: At4g15396 [Arabidopsis thaliana]
MDMELNLEMAKANSVPGVTKSVIRLFGENNLFLQSKESHKHVRNLTFQLLGPQGLKSRMIEDVDLLARTYMEEGARNGYLDVKETSSKILIGCLAKKVMGEMEPEAAKELALCWRYFQSGWFRFFLNLPGTGVYKMMKVLFVQYTEADISWQARKRMMKLLRKTVLTKRASGEELGEFFNIIFGEMEGEGETMSVENAVEYIYTFFLVANETTPRILAATVKFISDHPKVKQELQREHEEIVRGKAEKEGGLTWEDYKSMHFTQMVINESLRIISTAPTVLRVLEHDFQVGDYTIPAGWTFMGYPHIHFNSEKYEDPYAFNPWRWEGKDLGAIVSKTFIPFGAGRRLCVGAEFAKMQMAVFIHHLFRYRWSMKSGTTIIRSFMLMFPGGCDVQISEDTEVDK

SEQ ID NO: 72133 - DNA, 2481 bp, Arabidopsis thaliana
  misc_feature (1)..(2481): Ceres Seq. ID no. 4917964
  misc_feature: MA Experiment ID: 20000184 Result: Down-regulated in Transcription
  misc_feature: MA Experiment 20000184 PARAMETER Experiment Name: At_Shoots__P Parameter: Age (day) Value: 7
  misc_feature: MA Experiment 20000184 PARAMETER Experiment Name: At_Shoots__P Parameter: Tissue Value: Shoots vs. Whole Plant
  misc_feature: MA Experiment ID: 20000227 Result: Down-regulated in Transcription
  misc_feature: MA Experiment 20000227 PARAMETER Experiment Name: At_Root-Tips-vs-Tops_P Parameter: Tissue Value: Root Tips vs. Root Tops
  misc_feature: MA Experiment ID: 20000234 Result: Down-regulated in Transcription
  misc_feature: MA Experiment 20000234 PARAMETER Experiment Name: At_Siliques_P Parameter: Age (day) Value: 21
  misc_feature: MA Experiment 20000234 PARAMETER Experiment Name: At_Siliques_P Parameter: Organism Value: A. thaliana
  misc_feature: MA Experiment 20000234 PARAMETER Experiment Name: At_Siliques_P Parameter: Plant Line Value: WS
  misc_feature: MA Experiment 20000234 PARAMETER Experiment Name: At_Siliques_P Parameter: Tissue Value: Less Than 5mm Siliques vs. Whole Plant
  misc_feature: MA Experiment ID: 20000235 Result: Down-regulated in Transcription
  misc_feature: MA Experiment 20000235 PARAMETER Experiment Name: At_Siliques_P Parameter: Age (day) Value: 21
  misc_feature: MA Experiment 20000235 PARAMETER Experiment Name: At_Siliques_P Parameter: Organism Value: A. thaliana
  misc_feature: MA Experiment 20000235 PARAMETER Experiment Name: At_Siliques_P Parameter: Plant Line Value: WS
  misc_feature: MA Experiment 20000235 PARAMETER Experiment Name: At_Siliques_P Parameter: Tissue Value: 5-10mm Siliques vs. Whole Plant
  misc_feature: MA Experiment ID: 20000264 Result: Down-regulated in Transcription
  misc_feature: MA Experiment 20000264 PARAMETER Experiment Name: At_Open_Flower_P Parameter: Age (day) Value: 21
  misc_feature: MA Experiment 20000264 PARAMETER Experiment Name: At_Open_Flower_P Parameter: Plant Line Value: WS
  misc_feature: MA Experiment 20000264 PARAMETER Experiment Name: At_Open_Flower_P Parameter: Tissue Value: Open Flower vs. Whole Plant
  misc_feature: MA Experiment ID: 20000265 Result: Down-regulated in Transcription
  misc_feature: MA Experiment 20000265 PARAMETER Experiment Name: At_Open_Flower_P Parameter: Age (day) Value: 21
  misc_feature: MA Experiment 20000265 PARAMETER Experiment Name: At_Open_Flower_P Parameter: Plant Line Value: WS
  misc_feature: MA Experiment 20000265 PARAMETER Experiment Name: At_Open_Flower_P Parameter: Tissue Value: Closed Flower vs. Whole Plant
  misc_feature: MA Experiment ID: 20000268 Result: Down-regulated in Transcription
  misc_feature: MA Experiment 20000268 PARAMETER Experiment Name: At_100mM_NaCl__P Parameter: Age (day) Value: 14
  misc_feature: MA Experiment 20000268 PARAMETER Experiment Name: At_100mM_NaCl__P Parameter: Organism Value: A. thaliana
  misc_feature: MA Experiment 20000268 PARAMETER Experiment Name: At_100mM_NaCl__P Parameter: Plant Line Value: WS
  misc_feature: MA Experiment 20000268 PARAMETER Experiment Name: At_100mM_NaCl__P Parameter: Timepoint (hr) Value: 6
  misc_feature: MA Experiment 20000268 PARAMETER Experiment Name: At_100mM_NaCl__P Parameter: Tissue Value: Whole Plant
  misc_feature: MA Experiment 20000268 PARAMETER Experiment Name: At_100mM_NaCl__P Parameter: Treatment Value: 100mM NaCl vs. No Treatment
  misc_feature: MA Experiment ID: 20000269 Result: Down-regulated in Transcription
  misc_feature: MA Experiment 20000269 PARAMETER Experiment Name: At_1mM_KNO3_L-vs-H_Roots_P Parameter: Age (day) Value: 7,10,12
  misc_feature: MA Experiment 20000269 PARAMETER Experiment Name: At_1mM_KNO3_L-vs-H_Roots_P Parameter: Organism Value: A. thaliana
  misc_feature: MA Experiment 20000269 PARAMETER Experiment Name: At_1mM_KNO3_L-vs-H_Roots_P Parameter: Plant Line Value: WS
  misc_feature: MA Experiment 20000269 PARAMETER Experiment Name: At_1mM_KNO3_L-vs-H_Roots_P Parameter: Timepoint (day) Value: 7,10,12
  misc_feature: MA Experiment 20000269 PARAMETER Experiment Name: At_1mM_KNO3_L-vs-H_Roots_P Parameter: Tissue Value: Roots
  misc_feature: MA Experiment 20000269 PARAMETER Experiment Name: At_1mM_KNO3_L-vs-H_Roots_P Parameter: Treatment Value: 1mM KNO3 vs. 50mM KNO3
  misc_feature: MA Experiment ID: 20000286 Result: Down-regulated in Transcription
  misc_feature: MA Experiment 20000286 PARAMETER Experiment Name: At_Open_Flower_P Parameter: Age (day) Value: 21
  misc_feature: MA Experiment 20000286 PARAMETER Experiment Name: At_Open_Flower_P Parameter: Plant Line Value: WS
  misc_feature: MA Experiment 20000286 PARAMETER Experiment Name: At_Open_Flower_P Parameter: Tissue Value: Half Open vs. Whole Plant
  misc_feature: MA Experiment ID: 20000308 Result: Down-regulated in Transcription
  misc_feature: MA Experiment 20000308 PARAMETER Experiment Name: At_100mM_NaCl__P Parameter: Age (day) Value: 17
  misc_feature: MA Experiment 20000308 PARAMETER Experiment Name: At_100mM_NaCl__P Parameter: Organism Value: A. thaliana
  misc_feature: MA Experiment 20000308 PARAMETER Experiment Name: At_100mM_NaCl__P Parameter: Plant Line Value: WS
  misc_feature: MA Experiment 20000308 PARAMETER Experiment Name: At_100mM_NaCl__P Parameter: Timepoint (hr) Value: 72
  misc_feature: MA Experiment 20000308 PARAMETER Experiment Name: At_100mM_NaCl__P Parameter: Tissue Value: Whole Plant
  misc_feature: MA Experiment 20000308 PARAMETER Experiment Name: At_100mM_NaCl__P Parameter: Treatment Value: 100mM NaCl vs. No Treatment
  misc_feature: MA Experiment ID: 20000439 Result: Down-regulated in Transcription
  misc_feature: MA Experiment 20000439 PARAMETER Experiment Name: At_Roots__P Parameter: Age (day) Value: 14 vs. 21
  misc_feature: MA Experiment 20000439 PARAMETER Experiment Name: At_Roots__P Parameter: Organism Value: A. thaliana
  misc_feature: MA Experiment 20000439 PARAMETER Experiment Name: At_Roots__P Parameter: Tissue Value: Roots vs. Whole Plant
  misc_feature: MA Experiment ID: 20000441 Result: Up-regulated in Transcription
  misc_feature: MA Experiment 20000441 PARAMETER Experiment Name: At_1uM_BR-BRZ__P Parameter: Tissue Value: Shoot Apices
  misc_feature: MA Experiment 20000441 PARAMETER Experiment Name: At_1uM_BR-BRZ__P Parameter: Treatment Value: 1uM BR vs. No Treatment
  misc_feature: MA Experiment ID: 20000443 Result: Up-regulated in Transcription
  misc_feature: MA Experiment 20000443 PARAMETER Experiment Name: At_1uM_BR-BRZ__P Parameter: Tissue Value: Shoot Apices
  misc_feature: MA Experiment 20000443 PARAMETER Experiment Name: At_1uM_BR-BRZ__P Parameter: Treatment Value: 1uM BRZ vs. No Treatment
  misc_feature: MA Experiment ID: 20000451 Result: Down-regulated in Transcription
  misc_feature: MA Experiment 20000451 PARAMETER Experiment Name: At_CS6879_Shoots-Roots_P Parameter: Age (day) Value: 14
  misc_feature: MA Experiment 20000451 PARAMETER Experiment Name: At_CS6879_Shoots-Roots_P Parameter: Organism Value: A. thaliana
  misc_feature: MA Experiment 20000451 PARAMETER Experiment Name: At_CS6879_Shoots-Roots_P Parameter: Plant Line Value: CS6879 vs. WS
  misc_feature: MA Experiment 20000451 PARAMETER Experiment Name: At_CS6879_Shoots-Roots_P Parameter: Tissue Value: Roots
  misc_feature: MA Experiment ID: 20001247 Result: Up-regulated in Transcription
  misc_feature: MA Experiment 20001247 PARAMETER Experiment Name: At_Far-red-induction_P Parameter: Age (day) Value: 7
  misc_feature: MA Experiment 20001247 PARAMETER Experiment Name: At_Far-red-induction_P Parameter: Light Value: Far-red vs. White
  misc_feature: MA Experiment 20001247 PARAMETER Experiment Name: At_Far-red-induction_P Parameter: Organism Value: A. thaliana
  misc_feature: MA Experiment 20001247 PARAMETER Experiment Name: At_Far-red-induction_P Parameter: Plant Line Value: Columbia
  misc_feature: MA Experiment 20001247 PARAMETER Experiment Name: At_Far-red-induction_P Parameter: Timepoint (hr) Value: 1
  misc_feature: MA Experiment 20001247 PARAMETER Experiment Name: At_Far-red-induction_P Parameter: Tissue Value: Whole Plant
  misc_feature: MA Experiment ID: 20001248 Result: Up-regulated in Transcription
  misc_feature: MA Experiment 20001248 PARAMETER Experiment Name: At_Far-red-induction_P Parameter: Age (day) Value: 7
  misc_feature: MA Experiment 20001248 PARAMETER Experiment Name: At_Far-red-induction_P Parameter: Light Value: Far-red vs. White
  misc_feature: MA Experiment 20001248 PARAMETER Experiment Name: At_Far-red-induction_P Parameter: Organism Value: A. thaliana
  misc_feature: MA Experiment 20001248 PARAMETER Experiment Name: At_Far-red-induction_P Parameter: Plant Line Value: Columbia
  misc_feature: MA Experiment 20001248 PARAMETER Experiment Name: At_Far-red-induction_P Parameter: Timepoint (hr) Value: 4
  misc_feature: MA Experiment 20001248 PARAMETER Experiment Name: At_Far-red-induction_P Parameter: Tissue Value: Whole Plant
  misc_feature: MA Experiment ID: 20001450 Result: Up-regulated in Transcription
  misc_feature: MA Experiment 20001450 PARAMETER Experiment Name: At_Far-red-induction_P Parameter: Age (day) Value: 7
  misc_feature: MA Experiment 20001450 PARAMETER Experiment Name: At_Far-red-induction_P Parameter: Light Value: Far-red vs. White
  misc_feature: MA Experiment 20001450 PARAMETER Experiment Name: At_Far-red-induction_P Parameter: Organism Value: A. thaliana
  misc_feature: MA Experiment 20001450 PARAMETER Experiment Name: At_Far-red-induction_P Parameter: Plant Line Value: Columbia
  misc_feature: MA Experiment 20001450 PARAMETER Experiment Name: At_Far-red-induction_P Parameter: Timepoint (hr) Value: 8
  misc_feature: MA Experiment 20001450 PARAMETER Experiment Name: At_Far-red-induction_P Parameter: Tissue Value: Whole Plant
  misc_feature: MA Experiment ID: 20001451 Result: Up-regulated in Transcription
  misc_feature: MA Experiment 20001451 PARAMETER Experiment Name: At_Far-red-induction_P Parameter: Age (day) Value: 7
  misc_feature: MA Experiment 20001451 PARAMETER Experiment Name: At_Far-red-induction_P Parameter: Light Value: Far-red vs. White
  misc_feature: MA Experiment 20001451 PARAMETER Experiment Name: At_Far-red-induction_P Parameter: Organism Value: A. thaliana
  misc_feature: MA Experiment 20001451 PARAMETER Experiment Name: At_Far-red-induction_P Parameter: Plant Line Value: Columbia
  misc_feature: MA Experiment 20001451 PARAMETER Experiment Name: At_Far-red-induction_P Parameter: Timepoint (hr) Value: 24
  misc_feature: MA Experiment 20001451 PARAMETER Experiment Name: At_Far-red-induction_P Parameter: Tissue Value: Whole Plant
  misc_feature: MA Experiment ID: 20001555 Result: Down-regulated in Transcription
  misc_feature: MA Experiment 20001555 PARAMETER Experiment Name: At_Drought_Soil_Dry_P Parameter: Age (day) Value: 24
  misc_feature: MA Experiment 20001555 PARAMETER Experiment Name: At_Drought_Soil_Dry_P Parameter: Organism Value: A. thaliana
  misc_feature: MA Experiment 20001555 PARAMETER Experiment Name: At_Drought_Soil_Dry_P Parameter: Plant Line Value: WS
  misc_feature: MA Experiment 20001555 PARAMETER Experiment Name: At_Drought_Soil_Dry_P Parameter: Post Timepoint (hr) Value: None
  misc_feature: MA Experiment 20001555 PARAMETER Experiment Name: At_Drought_Soil_Dry_P Parameter: Post-Treatment Value: None
  misc_feature: MA Experiment 20001555 PARAMETER Experiment Name: At_Drought_Soil_Dry_P Parameter: Timepoint (day) Value: 10
  misc_feature: MA Experiment 20001555 PARAMETER Experiment Name: At_Drought_Soil_Dry_P Parameter: Treatment Value: Drought vs. No Drought
  misc_feature: MA Experiment ID: 20001560 Result: Down-regulated in Transcription
  misc_feature: MA Experiment 20001560 PARAMETER Experiment Name: At_Drought_Soil_Dry_P Parameter: Age (day) Value: 28
  misc_feature: MA Experiment 20001560 PARAMETER Experiment Name: At_Drought_Soil_Dry_P Parameter: Organism Value: A. thaliana
  misc_feature: MA Experiment 20001560 PARAMETER Experiment Name: At_Drought_Soil_Dry_P Parameter: Plant Line Value: WS
  misc_feature: MA Experiment 20001560 PARAMETER Experiment Name: At_Drought_Soil_Dry_P Parameter: Post Timepoint (hr) Value: None
  misc_feature: MA Experiment 20001560 PARAMETER Experiment Name: At_Drought_Soil_Dry_P Parameter: Post-Treatment Value: None
  misc_feature: MA Experiment 20001560 PARAMETER Experiment Name: At_Drought_Soil_Dry_P Parameter: Timepoint (day) Value: 14
  misc_feature: MA Experiment 20001560 PARAMETER Experiment Name: At_Drought_Soil_Dry_P Parameter: Treatment Value: Drought vs. No Drought
atgactgttccgggaatcatcaccgacgtagacggtgatacaacctccgaagtaacttctacctccggtggttcacgtgagaggaagatcattgtagctaacatgttaccactccaatctaaaagagatgcagaaactggtaaatggtgttttaactgggacgaagactctctccagttacaacttagagatgggttctcttcagaaacagagtttctctacgttggatcacttaacgtagacatcgaaactaacgaacaagaagaagtttcacagaagcttttagaggaatttaactgcgttgcaacgtttttgtctcaagagttgcaagaaatgttctatcttggtttctgtaaacatcagttatggccactctttcattacatgcttccaatgtttcctgatcatggtgatcgttttgatcgacgtctatggcaagcttatgtatcagccaacaagatattttcagatagagttatggaagttatcaaccctgaggatgattacgtttggattcaagattatcatcttatggttcttcctactttcttgaggaaacgttttaataggatcaaactcggtttcttccttcatagtccgtttccttcttcagagatttaccgcacattgcctgttcgtgacgagattttgagaggtttgttgaattgtgatctcattggtttccatacgtttgattacgcgaggcatttcttgtcttgttgtagtagaatgcttggtcttgattacgagtctaagcgcggtcacataggtcttgattactttggtaggactgtgtatatcaaaatacttcctgttggtgttcatatgggtagattggagtctgttttgagtcttgattctactgcggcgaagacgaaagagattcaagaacagtttaaagggaagaagcttgttcttggtatcgatgatatggatatatttaaagggataagcttaaagcttatagcaatggaacatctctttgagacttattggcatttgaaagggaaagttgttcttgttcagatagtgaaccctgcaagatcttctggtaaagatgttgaagaagcgaagagggagacgtatgagactgcgaggaggatcaatgagcgttacggtacttctgactataagccgatagttttgatcgatcgtcttgttccacgttctgagaaaaccgcgtattatgctgcagcagattgttgcttagtgaatgcagtgagagatggtatgaacttagttccttataagtatatcgtctgcaggcaggggactcgaagtaataaggccgttgtggattcatcgcctcgcacaagcactcttgtcgtgtctgagtttattggatgctcaccttctttgagtggtgccattagggtgaatccatgggatgtggatgctgttgctgaagcggtaaactcggctcttaaaatgagtgagactgagaagcaactacggcatgagaaacattatcattatattagcactcatgatgttggttattgggcaaagagctttatgcaggatcttgagagagcgtgccgagatcattatagtaaacgttgttgggggattggttttggtttggggttcagagttttgtcactctctccaagttttaggaagctatctgtggaacacattgttccagtttatagaaaaacacagagaagagctatatttcttgattatgatggtactcttgttcctgaaagctccattgttcaagatccaagcaacgaggttgtctctgttctgaaagctctctgtgaagatccgaataacacggtgtttattgttagtggaagaggtagagagtctctgagcaattggctatctccttgtgaaaatcttggaatagcagctgaacatggatacttcattagatggaagagcaaagatgagtgggagacttgttattcgcctacggatacagagtggaggtcaatggtggaaccggttatgagatcgtatatggaggcaacagatgggacgagtatagagtttaaagaaagtgctttggtgtggcaccatcaagacgcagatcctgactttggatcatgtcaagctaaggagatgcttgatcatctagagagtgttctcgccaatgagcctgtggttgtcaagagaggtcaacacatcgttgaagtcaaaccacaaggtgtaagcaaaggtctagctgcggagaaagtaatccgagaaatggtagaacgcggggagccaccggaaatggtgatgtgcataggagacgatagatcagacgaagacatgtttgagagcatattaagcacagtgacaaatccggaacttcttgtgcagccagaggtttttgcatgcacggttggaagaaaaccaagcaaagctaaatacttcttggacgatgaagccgacgtgcttaagctcctaagaggtcttggagactcatcatcgagcttaaaacctagttcttctcacacacaagttgcatttgaaagcatcgtttaa

SEQ ID NO: 72134 - protein, 826 aa, Arabidopsis thaliana; identical to SEQ ID NO: 71102
  peptide (1)..(826): Ceres Seq. ID no. 4917965
  misc_feature (27)..(511): Pfam Name: Glycosyltransferase family 20 Pfam Description: Glycosyltransferase family 20
  misc_feature (1)..(813): Homolog of NCBI NO: 25347119 NR Description: hypothetical protein T23K23.13 [imported] -
  misc_feature (1)..(810): Homolog of NCBI NO: 19568935 NR Description: putative trehalose synthase [Solanum tuberosum]
  misc_feature (1)..(810): Homolog of NCBI NO: 15221478 NR Description: trehalose-6-phosphate synthase, putative; protein At1g06410.1 [Arabidopsis thaliana] >gi|25347117|pir||A86200
  misc_feature (2)..(818): Homolog of NCBI NO: 18414960 NR Description: trehalose-6-phosphate synthase like protein;
  misc_feature (140)..(818): Homolog of NCBI NO: 34909526 NR Description: putative trehalose-6-phosphate synthase homolog
  misc_feature (1)..(131): Homolog of NCBI NO: 34909526 NR Description: putative trehalose-6-phosphate synthase homolog
  misc_feature (3)..(822): Homolog of NCBI NO: 15224213 NR Description: putative trehalose-6-phosphate synthase; protein
  misc_feature (74)..(512): Homolog of NCBI NO: 25347125 NR Description: trehalose-6-phosphate synthase homolog [imported] Arabidopsis thaliana >gi|5734770|gb|AAD50035.1|AC007651_30 Very
  misc_feature (604)..(769): Homolog of NCBI NO: 25347125 NR Description: trehalose-6-phosphate synthase homolog [imported] Arabidopsis thaliana >gi|5734770|gb|AAD50035.1|AC007651_30 Very
  misc_feature (86)..(512): Homolog of NCBI NO: 15219985 NR Description: trehalose-6-phosphate synthase, putative; protein

SEQ ID NO: 72135 - protein, 792 aa, Arabidopsis thaliana; identical to SEQ ID NO: 71103
  peptide (1)..(792): Ceres Seq. ID no. 4917966
  misc_feature (1)..(477): Pfam Name: Glycosyltransferase family 20 Pfam Description: Glycosyltransferase family 20
  misc_feature (1)..(779): Homolog of NCBI NO: 25347119 NR Description: hypothetical protein T23K23.13 [imported] -
  misc_feature (1)..(776): Homolog of NCBI NO: 19568935 NR Description: putative trehalose synthase [Solanum tuberosum]
  misc_feature (1)..(776): Homolog of NCBI NO: 15221478 NR Description: trehalose-6-phosphate synthase, putative; protein At1g06410.1 [Arabidopsis thaliana] >gi|25347117|pir||A86200
  misc_feature (1)..(784): Homolog of NCBI NO: 18414960 NR Description: trehalose-6-phosphate synthase like protein;
  misc_feature (106)..(784): Homolog of NCBI NO: 34909526 NR Description: putative trehalose-6-phosphate synthase homolog
  misc_feature (1)..(97): Homolog of NCBI NO: 34909526 NR Description: putative trehalose-6-phosphate synthase homolog
  misc_feature (1)..(788): Homolog of NCBI NO: 15224213 NR Description: putative trehalose-6-phosphate synthase; protein
  misc_feature (40)..(478): Homolog of NCBI NO: 25347125 NR Description: trehalose-6-phosphate synthase homolog [imported] Arabidopsis thaliana >gi|5734770|gb|AAD50035.1|AC007651_30 Very
  misc_feature (570)..(735): Homolog of NCBI NO: 25347125 NR Description: trehalose-6-phosphate synthase homolog [imported] Arabidopsis thaliana >gi|5734770|gb|AAD50035.1|AC007651_30 Very
  misc_feature (52)..(478): Homolog of NCBI NO: 15219985 NR Description: trehalose-6-phosphate synthase, putative; protein

SEQ ID NO: 72136 - protein, 715 aa, Arabidopsis thaliana
  peptide (1)..(715): Ceres Seq. ID no. 4917967
  misc_feature (1)..(400): Pfam Name: Glycosyltransferase family 20 Pfam Description: Glycosyltransferase family 20
  misc_feature (1)..(702): Homolog of NCBI NO: 25347119 NR Description: hypothetical protein T23K23.13 [imported] -
  misc_feature (1)..(699): Homolog of NCBI NO: 19568935 NR Description: putative trehalose synthase [Solanum tuberosum]
  misc_feature (1)..(699): Homolog of NCBI NO: 15221478 NR Description: trehalose-6-phosphate synthase, putative; protein At1g06410.1 [Arabidopsis thaliana] >gi|25347117|pir||A86200
  misc_feature (1)..(707): Homolog of NCBI NO: 18414960 NR Description: trehalose-6-phosphate synthase like protein;
  misc_feature (29)..(707): Homolog of NCBI NO: 34909526 NR Description: putative trehalose-6-phosphate synthase homolog
  misc_feature (1)..(20): Homolog of NCBI NO: 34909526 NR Description: putative trehalose-6-phosphate synthase homolog
  misc_feature (1)..(711): Homolog of NCBI NO: 15224213 NR Description: putative trehalose-6-phosphate synthase; protein
  misc_feature (1)..(401): Homolog of NCBI NO: 25347125 NR Description: trehalose-6-phosphate synthase homolog [imported] Arabidopsis thaliana >gi|5734770|gb|AAD50035.1|AC007651_30 Very
  misc_feature (493)..(658): Homolog of NCBI NO: 25347125 NR Description: trehalose-6-phosphate synthase homolog [imported] Arabidopsis thaliana >gi|5734770|gb|AAD50035.1|AC007651_30 Very
  misc_feature (1)..(401): Homolog of NCBI NO: 15219985 NR Description: trehalose-6-phosphate synthase, putative; protein
MFYLGFCKHQLWPLFHYMLPMFPDHGDRFDRRLWQAYVSANKIFSDRVMEVINPEDDYVWIQDYHLMVLPTFLRKRFNRIKLGFFLHSPFPSSEIYRTLPVRDEILRGLLNCDLIGFHTFDYARHFLSCCSRMLGLDYESKRGHIGLDYFGRTVYIKILPVGVHMGRLESVLSLDSTAAKTKEIQEQFKGKKLVLGIDDMDIFKGISLKLIAMEHLFETYWHLKGKVVLVQIVNPARSSGKDVEEAKRETYETARRINERYGTSDYKPIVLIDRLVPRSEKTAYYAAADCCLVNAVRDGMNLVPYKYIVCRQGTRSNKAVVDSSPRTSTLVVSEFIGCSPSLSGAIRVNPWDVDAVAEAVNSALKMSETEKQLRHEKHYHYISTHDVGYWAKSFMQDLERACRDHYSKRCWGIGFGLGFRVLSLSPSFRKLSVEHIVPVYRKTQRRAIFLDYDGTLVPESSIVQDPSNEVVSVLKALCEDPNNTVFIVSGRGRESLSNWLSPCENLGIAAEHGYFIRWKSKDEWETCYSPTDTEWRSMVEPVMRSYMEATDGTSIEFKESALVWHHQDADPDFGSCQAKEMLDHLESVLANEPVVVKRGQHIVEVKPQGVSKGLAAEKVIREMVERGEPPEMVMCIGDDRSDEDMFESILSTVTNPELLVQPEVFACTVGRKPSKAKYFLDDEADVLKLLRGLGDSSSSLKPSSSHTQVAFESIV

SEQ ID NO: 72137 - DNA, 1443 bp, Arabidopsis thaliana
  misc_feature (1)..(1443): Ceres Seq. ID no. 4917972
  misc_feature: MA Experiment ID: 20000171 Result: Down-regulated in Transcription
  misc_feature: MA Experiment 20000171 PARAMETER Experiment Name: At_42deg_Heat_P Parameter: Age (day) Value: 14
  misc_feature: MA Experiment 20000171 PARAMETER Experiment Name: At_42deg_Heat_P Parameter: Organism Value: A. thaliana
  misc_feature: MA Experiment 20000171 PARAMETER Experiment Name: At_42deg_Heat_P Parameter: Plant Line Value: WS
  misc_feature: MA Experiment 20000171 PARAMETER Experiment Name: At_42deg_Heat_P Parameter: Temperature (deg C) Value: 42 vs. 22
  misc_feature: MA Experiment 20000171 PARAMETER Experiment Name: At_42deg_Heat_P Parameter: Timepoint (hr) Value: 1
  misc_feature: MA Experiment 20000171 PARAMETER Experiment Name: At_42deg_Heat_P Parameter: Tissue Value: Aerial
  misc_feature: MA Experiment ID: 20000173 Result: Down-regulated in Transcription
  misc_feature: MA Experiment 20000173 PARAMETER Experiment Name: At_42deg_Heat_P Parameter: Age (day) Value: 14
  misc_feature: MA Experiment 20000173 PARAMETER Experiment Name: At_42deg_Heat_P Parameter: Organism Value: A. thaliana
  misc_feature: MA Experiment 20000173 PARAMETER Experiment Name: At_42deg_Heat_P Parameter: Plant Line Value: WS
  misc_feature: MA Experiment 20000173 PARAMETER Experiment Name: At_42deg_Heat_P Parameter: Temperature (deg C) Value: 42 vs. 22
  misc_feature: MA Experiment 20000173 PARAMETER Experiment Name: At_42deg_Heat_P Parameter: Timepoint (hr) Value: 6
  misc_feature: MA Experiment 20000173 PARAMETER Experiment Name: At_42deg_Heat_P Parameter: Tissue Value: Aerial
  misc_feature: MA Experiment ID: 20000180 Result: Up-regulated in Transcription
  misc_feature: MA Experiment 20000180 PARAMETER Experiment Name: At_Germinating_Seeds_P Parameter: Age (hr) Value: 24 vs. 0
  misc_feature: MA Experiment 20000180 PARAMETER Experiment Name: At_Germinating_Seeds_P Parameter: Tissue Value: Germinating Seeds
  misc_feature: MA Experiment ID: 20000182 Result: Up-regulated in Transcription
  misc_feature: MA Experiment 20000182 PARAMETER Experiment Name: At_2mM_SA_P Parameter: Age (day) Value: 14
  misc_feature: MA Experiment 20000182 PARAMETER Experiment Name: At_2mM_SA_P Parameter: Organism Value: A. thaliana
  misc_feature: MA Experiment 20000182 PARAMETER Experiment Name: At_2mM_SA_P Parameter: Plant Line Value: WS
  misc_feature: MA Experiment 20000182 PARAMETER Experiment Name: At_2mM_SA_P Parameter: Timepoint (hr) Value: 6
  misc_feature: MA Experiment 20000182 PARAMETER Experiment Name: At_2mM_SA_P Parameter: Tissue Value: Aerial
  misc_feature: MA Experiment 20000182 PARAMETER Experiment Name: At_2mM_SA_P Parameter: Treatment Value: 2mM SA vs. No Treatment
  misc_feature: MA Experiment ID: 20000185 Result: Up-regulated in Transcription
  misc_feature: MA Experiment 20000185 PARAMETER Experiment Name: At_Roots__P Parameter: Age (day) Value: 7 vs. 21
  misc_feature: MA Experiment 20000185 PARAMETER Experiment Name: At_Roots__P Parameter: Organism Value: A. thaliana
  misc_feature: MA Experiment 20000185 PARAMETER Experiment Name: At_Roots__P Parameter: Tissue Value: Roots vs. Whole Plant
  misc_feature: MA Experiment ID: 20000234 Result: Down-regulated in Transcription
  misc_feature: MA Experiment 20000234 PARAMETER Experiment Name: At_Siliques_P Parameter: Age (day) Value: 21
  misc_feature: MA Experiment 20000234 PARAMETER Experiment Name: At_Siliques_P Parameter: Organism Value: A. thaliana
  misc_feature: MA Experiment 20000234 PARAMETER Experiment Name: At_Siliques_P Parameter: Plant Line Value: WS
  misc_feature: MA Experiment 20000234 PARAMETER Experiment Name: At_Siliques_P Parameter: Tissue Value: Less Than 5mm Siliques vs. Whole Plant
  misc_feature: MA Experiment ID: 20000235 Result: Down-regulated in Transcription
  misc_feature: MA Experiment 20000235 PARAMETER Experiment Name: At_Siliques_P Parameter: Age (day) Value: 21
  misc_feature: MA Experiment 20000235 PARAMETER Experiment Name: At_Siliques_P Parameter: Organism Value: A. thaliana
  misc_feature: MA Experiment 20000235 PARAMETER Experiment Name: At_Siliques_P Parameter: Plant Line Value: WS
  misc_feature: MA Experiment 20000235 PARAMETER Experiment Name: At_Siliques_P Parameter: Tissue Value: 5-10mm Siliques vs. Whole Plant
  misc_feature: MA Experiment ID: 20000264 Result: Down-regulated in Transcription
  misc_feature: MA Experiment 20000264 PARAMETER Experiment Name: At_Open_Flower_P Parameter: Age (day) Value: 21
  misc_feature: MA Experiment 20000264 PARAMETER Experiment Name: At_Open_Flower_P Parameter: Plant Line Value: WS
  misc_feature: MA Experiment 20000264 PARAMETER Experiment Name: At_Open_Flower_P Parameter: Tissue Value: Open Flower vs. Whole Plant
  misc_feature: MA Experiment ID: 20000438 Result: Up-regulated in Transcription
  misc_feature: MA Experiment 20000438 PARAMETER Experiment Name: At_Shoots__P Parameter: Age (day) Value: 14
  misc_feature: MA Experiment 20000438 PARAMETER Experiment Name: At_Shoots__P Parameter: Tissue Value: Shoots vs. Whole Plant
  misc_feature: MA Experiment ID: 20000439 Result: Up-regulated in Transcription
  misc_feature: MA Experiment 20000439 PARAMETER Experiment Name: At_Roots__P Parameter: Age (day) Value: 14 vs. 21
  misc_feature: MA Experiment 20000439 PARAMETER Experiment Name: At_Roots__P Parameter: Organism Value: A. thaliana
  misc_feature: MA Experiment 20000439 PARAMETER Experiment Name: At_Roots__P Parameter: Tissue Value: Roots vs. Whole Plant
  misc_feature: MA Experiment ID: 20001247 Result: Up-regulated in Transcription
  misc_feature: MA Experiment 20001247 PARAMETER Experiment Name: At_Far-red-induction_P Parameter: Age (day) Value: 7
  misc_feature: MA Experiment 20001247 PARAMETER Experiment Name: At_Far-red-induction_P Parameter: Light Value: Far-red vs. White
  misc_feature: MA Experiment 20001247 PARAMETER Experiment Name: At_Far-red-induction_P Parameter: Organism Value: A. thaliana
  misc_feature: MA Experiment 20001247 PARAMETER Experiment Name: At_Far-red-induction_P Parameter: Plant Line Value: Columbia
  misc_feature: MA Experiment 20001247 PARAMETER Experiment Name: At_Far-red-induction_P Parameter: Timepoint (hr) Value: 1
  misc_feature: MA Experiment 20001247 PARAMETER Experiment Name: At_Far-red-induction_P Parameter: Tissue Value: Whole Plant
  misc_feature: MA Experiment ID: 20001451 Result: Up-regulated in Transcription
  misc_feature: MA Experiment 20001451 PARAMETER Experiment Name: At_Far-red-induction_P Parameter: Age (day) Value: 7
  misc_feature: MA Experiment 20001451 PARAMETER Experiment Name: At_Far-red-induction_P Parameter: Light Value: Far-red vs. White
  misc_feature: MA Experiment 20001451 PARAMETER Experiment Name: At_Far-red-induction_P Parameter: Organism Value: A. thaliana
  misc_feature: MA Experiment 20001451 PARAMETER Experiment Name: At_Far-red-induction_P Parameter: Plant Line Value: Columbia
  misc_feature: MA Experiment 20001451 PARAMETER Experiment Name: At_Far-red-induction_P Parameter: Timepoint (hr) Value: 24
  misc_feature: MA Experiment 20001451 PARAMETER Experiment Name: At_Far-red-induction_P Parameter: Tissue Value: Whole Plant
  misc_feature: MA Experiment ID: 20001554 Result: Down-regulated in Transcription
  misc_feature: MA Experiment 20001554 PARAMETER Experiment Name: At_Drought_Soil_Dry_P Parameter: Age (day) Value: 21
  misc_feature: MA Experiment 20001554 PARAMETER Experiment Name: At_Drought_Soil_Dry_P Parameter: Organism Value: A. thaliana
  misc_feature: MA Experiment 20001554 PARAMETER Experiment Name: At_Drought_Soil_Dry_P Parameter: Plant Line Value: WS
  misc_feature: MA Experiment 20001554 PARAMETER Experiment Name: At_Drought_Soil_Dry_P Parameter: Post Timepoint (hr) Value: None
  misc_feature: MA Experiment 20001554 PARAMETER Experiment Name: At_Drought_Soil_Dry_P Parameter: Post-Treatment Value: None
  misc_feature: MA Experiment 20001554 PARAMETER Experiment Name: At_Drought_Soil_Dry_P Parameter: Timepoint (day) Value: 7
  misc_feature: MA Experiment 20001554 PARAMETER Experiment Name: At_Drought_Soil_Dry_P Parameter: Treatment Value: Drought vs. No Drought
  misc_feature: MA Experiment ID: 20001555 Result: Down-regulated in Transcription
  misc_feature: MA Experiment 20001555 PARAMETER Experiment Name: At_Drought_Soil_Dry_P Parameter: Age (day) Value: 24
  misc_feature: MA Experiment 20001555 PARAMETER Experiment Name: At_Drought_Soil_Dry_P Parameter: Organism Value: A. thaliana
  misc_feature: MA Experiment 20001555 PARAMETER Experiment Name: At_Drought_Soil_Dry_P Parameter: Plant Line Value: WS
  misc_feature: MA Experiment 20001555 PARAMETER Experiment Name: At_Drought_Soil_Dry_P Parameter: Post Timepoint (hr) Value: None
  misc_feature: MA Experiment 20001555 PARAMETER Experiment Name: At_Drought_Soil_Dry_P Parameter: Post-Treatment Value: None
  misc_feature: MA Experiment 20001555 PARAMETER Experiment Name: At_Drought_Soil_Dry_P Parameter: Timepoint (day) Value: 10
  misc_feature: MA Experiment 20001555 PARAMETER Experiment Name: At_Drought_Soil_Dry_P Parameter: Treatment Value: Drought vs. No Drought
  misc_feature: MA Experiment ID: 20001556 Result: Down-regulated in Transcription
  misc_feature: MA Experiment 20001556 PARAMETER Experiment Name: At_Drought_Soil_Dry_P Parameter: Age (day) Value: 26
  misc_feature: MA Experiment 20001556 PARAMETER Experiment Name: At_Drought_Soil_Dry_P Parameter: Organism Value: A. thaliana
  misc_feature: MA Experiment 20001556 PARAMETER Experiment Name: At_Drought_Soil_Dry_P Parameter: Plant Line Value: WS
  misc_feature: MA Experiment 20001556 PARAMETER Experiment Name: At_Drought_Soil_Dry_P Parameter: Post Timepoint (hr) Value: None
  misc_feature: MA Experiment 20001556 PARAMETER Experiment Name: At_Drought_Soil_Dry_P Parameter: Post-Treatment Value: None
  misc_feature: MA Experiment 20001556 PARAMETER Experiment Name: At_Drought_Soil_Dry_P Parameter: Timepoint (day) Value: 12
  misc_feature: MA Experiment 20001556 PARAMETER Experiment Name: At_Drought_Soil_Dry_P Parameter: Treatment Value: Drought vs. No Drought
  misc_feature: MA Experiment ID: 20001557 Result: Down-regulated in Transcription
  misc_feature: MA Experiment 20001557 PARAMETER Experiment Name: At_Drought_Soil_Dry_P Parameter: Age (day) Value: 27
  misc_feature: MA Experiment 20001557 PARAMETER Experiment Name: At_Drought_Soil_Dry_P Parameter: Organism Value: A. thaliana
  misc_feature: MA Experiment 20001557 PARAMETER Experiment Name: At_Drought_Soil_Dry_P Parameter: Plant Line Value: WS
  misc_feature: MA Experiment 20001557 PARAMETER Experiment Name: At_Drought_Soil_Dry_P Parameter: Post Timepoint (hr) Value: 3
  misc_feature: MA Experiment 20001557 PARAMETER Experiment Name: At_Drought_Soil_Dry_P Parameter: Post-Treatment Value: Re-Water vs. No Drought
  misc_feature: MA Experiment 20001557 PARAMETER Experiment Name: At_Drought_Soil_Dry_P Parameter: Timepoint (day) Value: 13
  misc_feature: MA Experiment 20001557 PARAMETER Experiment Name: At_Drought_Soil_Dry_P Parameter: Treatment Value: Drought vs. No Drought
  misc_feature: MA Experiment ID: 20001560 Result: Down-regulated in Transcription
  misc_feature: MA Experiment 20001560 PARAMETER Experiment Name: At_Drought_Soil_Dry_P Parameter: Age (day) Value: 28
  misc_feature: MA Experiment 20001560 PARAMETER Experiment Name: At_Drought_Soil_Dry_P Parameter: Organism Value: A. thaliana
  misc_feature: MA Experiment 20001560 PARAMETER Experiment Name: At_Drought_Soil_Dry_P Parameter: Plant Line Value: WS
  misc_feature: MA Experiment 20001560 PARAMETER Experiment Name: At_Drought_Soil_Dry_P Parameter: Post Timepoint (hr) Value: None
  misc_feature: MA Experiment 20001560 PARAMETER Experiment Name: At_Drought_Soil_Dry_P Parameter: Post-Treatment Value: None
  misc_feature: MA Experiment 20001560 PARAMETER Experiment Name: At_Drought_Soil_Dry_P Parameter: Timepoint (day) Value: 14
  misc_feature: MA Experiment 20001560 PARAMETER Experiment Name: At_Drought_Soil_Dry_P Parameter: Treatment Value: Drought vs. No Drought
  misc_feature: MA Experiment ID: 20001906 Result: Down-regulated in Transcription
  misc_feature: MA Experiment 20001906 PARAMETER Experiment Name: At_Drought_Reproduction_P Parameter: Age (day) Value: 35
  misc_feature: MA Experiment 20001906 PARAMETER Experiment Name: At_Drought_Reproduction_P Parameter: Organism Value: A. thaliana
  misc_feature: MA Experiment 20001906 PARAMETER Experiment Name: At_Drought_Reproduction_P Parameter: Plant Line Value: WS
  misc_feature: MA Experiment 20001906 PARAMETER Experiment Name: At_Drought_Reproduction_P Parameter: Timepoint (day) Value: 5
  misc_feature: MA Experiment 20001906 PARAMETER Experiment Name: At_Drought_Reproduction_P Parameter: Tissue Value: Siliques
  misc_feature: MA Experiment 20001906 PARAMETER Experiment Name: At_Drought_Reproduction_P Parameter: Treatment Value: Drought vs. No Drought
atggggtataaagatgtcaaaatcgcccctttgattgagaggaaagactcaggtcgacgatcaaacctagagagattctcccactatgttgcaaggcagctcggatttgaggatccaaatgaatacccacaactatgcaaattagcaaatggatatttgttgaaaacaaaagggtatgatgagaatgtggatgagtatttggagaatgaagctgagcgtgattctctctatgttcatctccttgaagaatttgatagatgcattctcacttatttttctttcaattggacccaatcttccaacctcatctctcaggctttaagcgatgagtcggatcagaaagttccaaaactcaaggatttcgtgatggcagcaacaaggaaacagaggtttgagagagtaacaaaagatctcaaggtgaaaagggtaatttcgacattagtagaagagatgagagtcattgggagcggaagcagtgagccacactgtacggaagtaatgtctccggtggctcataacaaacgaagtcccgtccttctccttatgggcggaggaatgggcgcaggaaagagcaccgtcctcaaagatatcttcctagagtcgttttggtcggaggcacaggccgacgcggtggttatagaggcagacgcgtttaaggagacggatgtaatttatagagctcttagctctagaggtcaccacgatgatatgcttcaaactgctgaattggttcatcaatcatcaacggatgctgcatcgtccttactagtaacagcattgaacgacggacgtgatgtgataatggatggaacattgtcatgggagccattcgtcgaacaaatgatcgaaatggcaagaaacgtccacaaacaaaaatatcgaatgggcgaaggctacaaggtgtccgaagaggggacgataaccgaaaaatattgggaagaagaagaagaagaaacgaaagaaaatggcaaacaacaaaatctgaaaccttacagaatcgagctggtcggtgtggtttgtgacgcttatcttgccgtagcaagaggcatacggagagctctaatggtgaagagagcagtgagagtgaaaccacaattgaattcacacaagagatttgctaatgcattcccaaagtattgtgagcttgttgataacgctaggctttattgcaccaatgctgttggtggtcctccaaggcttatagcgtggaaagacggaaatagtaagcttctggtggatccagaggatattgattgtctaaaacgggtcagcagtctcaacccggatgcagaatccatttacgagctttatccggatccaagccaattaagcaaacccggttctgtttggaatgatgttgtgttagttccatcgaggcccaaggtccagaaggaacttagcgatgcaatcaggagaatcgaaaaggcccaaccaaaaaattga

SEQ ID NO: 72138 - protein, 480 aa, Arabidopsis thaliana; identical to SEQ ID NO: 69986
  peptide (1)..(480): Ceres Seq. ID no. 4917973
  misc_feature (1)..(480): Homolog of NCBI NO: 99733 NR Description: hypothetical protein H1flk - Arabidopsis thaliana
  misc_feature (1)..(480): Homolog of NCBI NO: 15219698 NR Description: unknown protein; protein id: At1g04280.1
  misc_feature (4)..(475): Homolog of NCBI NO: 15222183 NR Description: unknown protein; protein id: At1g06750.1
  misc_feature (14)..(475): Homolog of NCBI NO: 15224537 NR Description: unknown protein; protein id: At2g30630.1
  misc_feature (14)..(475): Homolog of NCBI NO: 28207050 NR Description: hypothetical protein [Arabidopsis thaliana]
  misc_feature (105)..(475): Homolog of NCBI NO: 28207052 NR Description: hypothetical protein [Arabidopsis thaliana]
  misc_feature (14)..(148): Homolog of NCBI NO: 28207052 NR Description: hypothetical protein [Arabidopsis thaliana]
  misc_feature (194)..(478): Homolog of NCBI NO: 34909990 NR Description: P0490D09.19 [Oryza sativa (japonica
  misc_feature (32)..(127): Homolog of NCBI NO: 34909990 NR Description: P0490D09.19 [Oryza sativa (japonica
  misc_feature (209)..(475): Homolog of NCBI NO: 1076336 NR Description: hypothetical protein H1.1flk - Arabidopsis

SEQ ID NO: 72139 - protein, 358 aa, Arabidopsis thaliana; identical to SEQ ID NO: 69987
  peptide (1)..(358): Ceres Seq. ID no. 4917974
  misc_feature (1)..(358): Homolog of NCBI NO: 99733 NR Description: hypothetical protein H1flk - Arabidopsis thaliana
  misc_feature (1)..(358): Homolog of NCBI NO: 15219698 NR Description: unknown protein; protein id: At1g04280.1
  misc_feature (1)..(353): Homolog of NCBI NO: 15222183 NR Description: unknown protein; protein id: At1g06750.1
  misc_feature (1)..(353): Homolog of NCBI NO: 15224537 NR Description: unknown protein; protein id: At2g30630.1
  misc_feature (1)..(353): Homolog of NCBI NO: 28207050 NR Description: hypothetical protein [Arabidopsis thaliana]
  misc_feature (1)..(353): Homolog of NCBI NO: 28207052 NR Description: hypothetical protein [Arabidopsis thaliana]
  misc_feature (1)..(26): Homolog of NCBI NO: 28207052 NR Description: hypothetical protein [Arabidopsis thaliana]
  misc_feature (72)..(356): Homolog of NCBI NO: 34909990 NR Description: P0490D09.19 [Oryza sativa (japonica
  misc_feature (87)..(353): Homolog of NCBI NO: 1076336 NR Description: hypothetical protein H1.1flk - Arabidopsis
  misc_feature (88)..(353): Homolog of NCBI NO: 388260 NR Description: H1-1flk [Arabidopsis thaliana]

SEQ ID NO: 72140 - protein, 330 aa, Arabidopsis thaliana
  peptide (1)..(330): Ceres Seq. ID no. 4917975
  misc_feature (1)..(330): Homolog of NCBI NO: 99733 NR Description: hypothetical protein H1flk - Arabidopsis thaliana
  misc_feature (1)..(330): Homolog of NCBI NO: 15219698 NR Description: unknown protein; protein id: At1g04280.1
  misc_feature (1)..(325): Homolog of NCBI NO: 15222183 NR Description: unknown protein; protein id: At1g06750.1
  misc_feature (1)..(325): Homolog of NCBI NO: 15224537 NR Description: unknown protein; protein id: At2g30630.1
  misc_feature (1)..(325): Homolog of NCBI NO: 28207050 NR Description: hypothetical protein [Arabidopsis thaliana]
  misc_feature (1)..(325): Homolog of NCBI NO: 28207052 NR Description: hypothetical protein [Arabidopsis thaliana]
  misc_feature (44)..(328): Homolog of NCBI NO: 34909990 NR Description: P0490D09.19 [Oryza sativa (japonica
  misc_feature (59)..(325): Homolog of NCBI NO: 1076336 NR Description: hypothetical protein H1.1flk - Arabidopsis
  misc_feature (60)..(325): Homolog of NCBI NO: 388260 NR Description: H1-1flk [Arabidopsis thaliana]
  misc_feature (1)..(51): Homolog of NCBI NO: 25406934 NR Description: hypothetical protein [imported] - Arabidopsis >gi|7523704|gb|AAF63143.1|AC011001_13 Hypothetical protein
MRVIGSGSSEPHCTEVMSPVAHNKRSPVLLLMGGGMGAGKSTVLKDIFLESFWSEAQADAVVIEADAFKETDVIYRALSSRGHHDDMLQTAELVHQSSTDAASSLLVTALNDGRDVIMDGTLSWEPFVEQMIEMARNVHKQKYRMGEGYKVSEEGTITEKYWEEEEEETKENGKQQNLKPYRIELVGVVCDAYLAVARGIRRALMVKRAVRVKPQLNSHKRFANAFPKYCELVDNARLYCTNAVGGPPRLIAWKDGNSKLLVDPEDIDCLKRVSSLNPDAESIYELYPDPSQLSKPGSVWNDVVLVPSRPKVQKELSDAIRRIEKAQPKN

SEQ ID NO: 72141 - DNA, 597 bp, Arabidopsis thaliana
  misc_feature (1)..(597): Ceres Seq. ID no. 4918573
  misc_feature: MA Experiment ID: 20000439 Result: Up-regulated in Transcription
  misc_feature: MA Experiment 20000439 PARAMETER Experiment Name: At_Roots__P Parameter: Age (day) Value: 14 vs. 21
  misc_feature: MA Experiment 20000439 PARAMETER Experiment Name: At_Roots__P Parameter: Organism Value: A. thaliana
  misc_feature: MA Experiment 20000439 PARAMETER Experiment Name: At_Roots__P Parameter: Tissue Value: Roots vs. Whole Plant
atggtggctccggtggtgaatttccggtggccgtctattccaaagagtctgatgccaaaagactacagaagagaagtggcgaaatggtctgtttggatagctaactattttccgggacttttgcaatggttggtgactcagaacatgttctctacaacttccatgctagagaaaaaccctgtctacttcaacgaccaagacattgaagtccttaagcacatcaaaggcttcccaatgctcactaaggagaagttacgggagcgcggcgtcttcgggacgctgagaagcgattttttggtagcattcggcgactgggacttcgatccggcagacctacctgacccgtctctgtctggaccggaaaagggctcttcttctgttcacatatggcaaggctacgaagacaaagtgatgccatttcagctgcaaagatgtttgtgccgcaagctaccatggattaggtaccatgaggtccctaaaggaggccacctgatcgtgcactacgacggcatatgtgatgcgattttgaaatcacttcttttaggagaagatctcccaatgtacaaaccaaaagctgtgatcactgagccagcttag

SEQ ID NO: 72142 - protein, 198 aa, Arabidopsis thaliana
  peptide (1)..(198): Ceres Seq. ID no. 4918574
  misc_feature (1)..(184): Pfam Name: alpha/beta hydrolase fold Pfam Description: alpha/beta hydrolase fold
  misc_feature (1)..(198): Homolog of NCBI NO: 15229984 NR Description: putative protein; protein id: At3g44510.1
  misc_feature (2)..(189): Homolog of NCBI NO: 15223177 NR Description: unknown protein; protein id: At1g08310.1
  misc_feature (2)..(184): Homolog of NCBI NO: 25407040 NR Description: protein T23G18.18 [imported] - Arabidopsis >gi|6579201|gb|AAF18244.1|AC011438_6 T23G18.18 [Arabidopsis
  misc_feature (83)..(189): Homolog of NCBI NO: 6664302 NR Description: T27G7.1 [Arabidopsis thaliana]
  misc_feature (2)..(68): Homolog of NCBI NO: 6664302 NR Description: T27G7.1 [Arabidopsis thaliana]
  misc_feature (1)..(184): Homolog of NCBI NO: 15228377 NR Description: putative protein; protein id: At3g48410.1, by cDNA: gi_17529095 [Arabidopsis thaliana]
  misc_feature (1)..(180): Homolog of NCBI NO: 11357595 NR Description: hypothetical protein F24B22.200 - Arabidopsis (fragment) >gi|6822070|emb|CAB70998.1| putative protein
  misc_feature (1)..(180): Homolog of NCBI NO: 15232465 NR Description: putative protein (fragment); protein id:
  misc_feature (1)..(186): Homolog of NCBI NO: 38346334 NR Description: OSJNBa0073L04.5 [Oryza sativa (japonica
  misc_feature (1)..(181): Homolog of NCBI NO: 15242253 NR Description: putative protein; protein id: At5g22460.1, by cDNA: gi_15292740, supported by cDNA: gi_20465594 [Arabidopsis
MVAPVVNFRWPSIPKSLMPKDYRREVAKWSVWIANYFPGLLQWLVTQNMFSTTSMLEKNPVYFNDQDIEVLKHIKGFPMLTKEKLRERGVFGTLRSDFLVAFGDWDFDPADLPDPSLSGPEKGSSSVHIWQGYEDKVMPFQLQRCLCRKLPWIRYHEVPKGGHLIVHYDGICDAILKSLLLGEDLPMYKPKAVITEPA

SEQ ID NO: 72143 - protein, 181 aa, Arabidopsis thaliana
  peptide (1)..(181): Ceres Seq. ID no. 4918575
  misc_feature (1)..(167): Pfam Name: alpha/beta hydrolase fold Pfam Description: alpha/beta hydrolase fold
  misc_feature (1)..(181): Homolog of NCBI NO: 15229984 NR Description: putative protein; protein id: At3g44510.1
  misc_feature (1)..(172): Homolog of NCBI NO: 15223177 NR Description: unknown protein; protein id: At1g08310.1
  misc_feature (1)..(167): Homolog of NCBI NO: 25407040 NR Description: protein T23G18.18 [imported] - Arabidopsis >gi|6579201|gb|AAF18244.1|AC011438_6 T23G18.18 [Arabidopsis
  misc_feature (66)..(172): Homolog of NCBI NO: 6664302 NR Description: T27G7.1 [Arabidopsis thaliana]
  misc_feature (1)..(51): Homolog of NCBI NO: 6664302 NR Description: T27G7.1 [Arabidopsis thaliana]
  misc_feature (1)..(167): Homolog of NCBI NO: 15228377 NR Description: putative protein; protein id: At3g48410.1, by cDNA: gi_17529095 [Arabidopsis thaliana]
  misc_feature (1)..(163): Homolog of NCBI NO: 11357595 NR Description: hypothetical protein F24B22.200 - Arabidopsis (fragment) >gi|6822070|emb|CAB70998.1| putative protein
  misc_feature (1)..(163): Homolog of NCBI NO: 15232465 NR Description: putative protein (fragment); protein id:
  misc_feature (1)..(169): Homolog of NCBI NO: 38346334 NR Description: OSJNBa0073L04.5 [Oryza sativa (japonica
  misc_feature (1)..(164): Homolog of NCBI NO: 15242253 NR Description: putative protein; protein id: At5g22460.1, by cDNA: gi_15292740, supported by cDNA: gi_20465594 [Arabidopsis
MPKDYRREVAKWSVWIANYFPGLLQWLVTQNMFSTTSMLEKNPVYFNDQDIEVLKHIKGFPMLTKEKLRERGVFGTLRSDFLVAFGDWDFDPADLPDPSLSGPEKGSSSVHIWQGYEDKVMPFQLQRCLCRKLPWIRYHEVPKGGHLIVHYDGICDAILKSLLLGEDLPMYKPKAVITEPA

SEQ ID NO: 72144 - protein, 150 aa, Arabidopsis thaliana
  peptide (1)..(150): Ceres Seq. ID no. 4918576
  misc_feature (1)..(136): Pfam Name: alpha/beta hydrolase fold Pfam Description: alpha/beta hydrolase fold
  misc_feature (1)..(150): Homolog of NCBI NO: 15229984 NR Description: putative protein; protein id: At3g44510.1
  misc_feature (1)..(141): Homolog of NCBI NO: 15223177 NR Description: unknown protein; protein id: At1g08310.1
  misc_feature (1)..(136): Homolog of NCBI NO: 25407040 NR Description: protein T23G18.18 [imported] - Arabidopsis >gi|6579201|gb|AAF18244.1|AC011438_6 T23G18.18 [Arabidopsis
  misc_feature (35)..(141): Homolog of NCBI NO: 6664302 NR Description: T27G7.1 [Arabidopsis thaliana]
  misc_feature (1)..(20): Homolog of NCBI NO: 6664302 NR Description: T27G7.1 [Arabidopsis thaliana]
  misc_feature (1)..(136): Homolog of NCBI NO: 15228377 NR Description: putative protein; protein id: At3g48410.1, by cDNA: gi_17529095 [Arabidopsis thaliana]
  misc_feature (1)..(132): Homolog of NCBI NO: 11357595 NR Description: hypothetical protein F24B22.200 - Arabidopsis (fragment) >gi|6822070|emb|CAB70998.1| putative protein
  misc_feature (1)..(132): Homolog of NCBI NO: 15232465 NR Description: putative protein (fragment); protein id:
  misc_feature (1)..(138): Homolog of NCBI NO: 38346334 NR Description: OSJNBa0073L04.5 [Oryza sativa (japonica
  misc_feature (1)..(133): Homolog of NCBI NO: 15242253 NR Description: putative protein; protein id: At5g22460.1, by cDNA: gi_15292740, supported by cDNA: gi_20465594 [Arabidopsis
MFSTTSMLEKNPVYFNDQDIEVLKHIKGFPMLTKEKLRERGVFGTLRSDFLVAFGDWDFDPADLPDPSLSGPEKGSSSVHIWQGYEDKVMPFQLQRCLCRKLPWIRYHEVPKGGHLIVHYDGICDAILKSLLLGEDLPMYKPKAVITEPA

SEQ ID NO: 72145 - DNA, 1791 bp, Arabidopsis thaliana
  misc_feature (1)..(1791): Ceres Seq. ID no. 4918992
  misc_feature: MA Experiment ID: 20000171 Result: Down-regulated in Transcription
  misc_feature: MA Experiment 20000171 PARAMETER Experiment Name: At_42deg_Heat_P Parameter: Age (day) Value: 14
  misc_feature: MA Experiment 20000171 PARAMETER Experiment Name: At_42deg_Heat_P Parameter: Organism Value: A. thaliana
  misc_feature: MA Experiment 20000171 PARAMETER Experiment Name: At_42deg_Heat_P Parameter: Plant Line Value: WS
  misc_feature: MA Experiment 20000171 PARAMETER Experiment Name: At_42deg_Heat_P Parameter: Temperature (deg C) Value: 42 vs. 22
  misc_feature: MA Experiment 20000171 PARAMETER Experiment Name: At_42deg_Heat_P Parameter: Timepoint (hr) Value: 1
  misc_feature: MA Experiment 20000171 PARAMETER Experiment Name: At_42deg_Heat_P Parameter: Tissue Value: Aerial
  misc_feature: MA Experiment ID: 20000173 Result: Down-regulated in Transcription
  misc_feature: MA Experiment 20000173 PARAMETER Experiment Name: At_42deg_Heat_P Parameter: Age (day) Value: 14
  misc_feature: MA Experiment 20000173 PARAMETER Experiment Name: At_42deg_Heat_P Parameter: Organism Value: A. thaliana
  misc_feature: MA Experiment 20000173 PARAMETER Experiment Name: At_42deg_Heat_P Parameter: Plant Line Value: WS
  misc_feature: MA Experiment 20000173 PARAMETER Experiment Name: At_42deg_Heat_P Parameter: Temperature (deg C) Value: 42 vs. 22
  misc_feature: MA Experiment 20000173 PARAMETER Experiment Name: At_42deg_Heat_P Parameter: Timepoint (hr) Value: 6
  misc_feature: MA Experiment 20000173 PARAMETER Experiment Name: At_42deg_Heat_P Parameter: Tissue Value: Aerial
  misc_feature: MA Experiment ID: 20000182 Result: Down-regulated in Transcription
  misc_feature: MA Experiment 20000182 PARAMETER Experiment Name: At_2mM_SA_P Parameter: Age (day) Value: 14
  misc_feature: MA Experiment 20000182 PARAMETER Experiment Name: At_2mM_SA_P Parameter: Organism Value: A. thaliana
  misc_feature: MA Experiment 20000182 PARAMETER Experiment Name: At_2mM_SA_P Parameter: Plant Line Value: WS
  misc_feature: MA Experiment 20000182 PARAMETER Experiment Name: At_2mM_SA_P Parameter: Timepoint (hr) Value: 6
  misc_feature: MA Experiment 20000182 PARAMETER Experiment Name: At_2mM_SA_P Parameter: Tissue Value: Aerial
  misc_feature: MA Experiment 20000182 PARAMETER Experiment Name: At_2mM_SA_P Parameter: Treatment Value: 2mM SA vs. No Treatment
  misc_feature: MA Experiment ID: 20000265 Result: Up-regulated in Transcription
  misc_feature: MA Experiment 20000265 PARAMETER Experiment Name: At_Open_Flower_P Parameter: Age (day) Value: 21
  misc_feature: MA Experiment 20000265 PARAMETER Experiment Name: At_Open_Flower_P Parameter: Plant Line Value: WS
  misc_feature: MA Experiment 20000265 PARAMETER Experiment Name: At_Open_Flower_P Parameter: Tissue Value: Closed Flower vs. Whole Plant
  misc_feature: MA Experiment ID: 20000286 Result: Up-regulated in Transcription
  misc_feature: MA Experiment 20000286 PARAMETER Experiment Name: At_Open_Flower_P Parameter: Age (day) Value: 21
  misc_feature: MA Experiment 20000286 PARAMETER Experiment Name: At_Open_Flower_P Parameter: Plant Line Value: WS
  misc_feature: MA Experiment 20000286 PARAMETER Experiment Name: At_Open_Flower_P Parameter: Tissue Value: Half Open vs. Whole Plant
  misc_feature: MA Experiment ID: 20000436 Result: Down-regulated in Transcription
  misc_feature: MA Experiment 20000436 PARAMETER Experiment Name: At_Drought_P Parameter: Age (day) Value: 7
  misc_feature: MA Experiment 20000436 PARAMETER Experiment Name: At_Drought_P Parameter: Organism Value: A. thaliana
  misc_feature: MA Experiment 20000436 PARAMETER Experiment Name: At_Drought_P Parameter: Plant Line Value: WS
  misc_feature: MA Experiment 20000436 PARAMETER Experiment Name: At_Drought_P Parameter: Timepoint (hr) Value: 12
  misc_feature: MA Experiment 20000436 PARAMETER Experiment Name: At_Drought_P Parameter: Tissue Value: Whole Plant
  misc_feature: MA Experiment 20000436 PARAMETER Experiment Name: At_Drought_P Parameter: Treatment Value: Drought vs. No Drought
  misc_feature: MA Experiment ID: 20000437 Result: Down-regulated in Transcription
  misc_feature: MA Experiment 20000437 PARAMETER Experiment Name: At_Drought_P Parameter: Age (day) Value: 8
  misc_feature: MA Experiment 20000437 PARAMETER Experiment Name: At_Drought_P Parameter: Organism Value: A. thaliana
  misc_feature: MA Experiment 20000437 PARAMETER Experiment Name: At_Drought_P Parameter: Plant Line Value: WS
  misc_feature: MA Experiment 20000437 PARAMETER Experiment Name: At_Drought_P Parameter: Timepoint (hr) Value: 24
  misc_feature: MA Experiment 20000437 PARAMETER Experiment Name: At_Drought_P Parameter: Tissue Value: Whole Plant
  misc_feature: MA Experiment 20000437 PARAMETER Experiment Name: At_Drought_P Parameter: Treatment Value: Drought vs. No Drought
  misc_feature: MA Experiment ID: 20000794 Result: Up-regulated in Transcription
  misc_feature: MA Experiment 20000794 PARAMETER Experiment Name: At_Petals_P Parameter: Age (day) Value: 23-25 days
  misc_feature: MA Experiment 20000794 PARAMETER Experiment Name: At_Petals_P Parameter: Plant Line Value: WS
  misc_feature: MA Experiment 20000794 PARAMETER Experiment Name: At_Petals_P Parameter: Tissue Value: Petals vs. Whole plant
  misc_feature: MA Experiment ID: 20001248 Result: Down-regulated in Transcription
  misc_feature: MA Experiment 20001248 PARAMETER Experiment Name: At_Far-red-induction_P Parameter: Age (day) Value: 7
  misc_feature: MA Experiment 20001248 PARAMETER Experiment Name: At_Far-red-induction_P Parameter: Light Value: Far-red vs. White
  misc_feature: MA Experiment 20001248 PARAMETER Experiment Name: At_Far-red-induction_P Parameter: Organism Value: A. thaliana
  misc_feature: MA Experiment 20001248 PARAMETER Experiment Name: At_Far-red-induction_P Parameter: Plant Line Value: Columbia
  misc_feature: MA Experiment 20001248 PARAMETER Experiment Name: At_Far-red-induction_P Parameter: Timepoint (hr) Value: 4
  misc_feature: MA Experiment 20001248 PARAMETER Experiment Name: At_Far-red-induction_P Parameter: Tissue Value: Whole Plant
  misc_feature: MA Experiment ID: 20001450 Result: Down-regulated in Transcription
  misc_feature: MA Experiment 20001450 PARAMETER Experiment Name: At_Far-red-induction_P Parameter: Age (day) Value: 7
  misc_feature: MA Experiment 20001450 PARAMETER Experiment Name: At_Far-red-induction_P Parameter: Light Value: Far-red vs. White
  misc_feature: MA Experiment 20001450 PARAMETER Experiment Name: At_Far-red-induction_P Parameter: Organism Value: A. thaliana
  misc_feature: MA Experiment 20001450 PARAMETER Experiment Name: At_Far-red-induction_P Parameter: Plant Line Value: Columbia
  misc_feature: MA Experiment 20001450 PARAMETER Experiment Name: At_Far-red-induction_P Parameter: Timepoint (hr) Value: 8
  misc_feature: MA Experiment 20001450 PARAMETER Experiment Name: At_Far-red-induction_P Parameter: Tissue Value: Whole Plant
  misc_feature: MA Experiment ID: 20001451 Result: Down-regulated in Transcription
  misc_feature: MA Experiment 20001451 PARAMETER Experiment Name: At_Far-red-induction_P Parameter: Age (day) Value: 7
  misc_feature: MA Experiment 20001451 PARAMETER Experiment Name: At_Far-red-induction_P Parameter: Light Value: Far-red vs. White
  misc_feature: MA Experiment 20001451 PARAMETER Experiment Name: At_Far-red-induction_P Parameter: Organism Value: A. thaliana
  misc_feature: MA Experiment 20001451 PARAMETER Experiment Name: At_Far-red-induction_P Parameter: Plant Line Value: Columbia
  misc_feature: MA Experiment 20001451 PARAMETER Experiment Name: At_Far-red-induction_P Parameter: Timepoint (hr) Value: 24
  misc_feature: MA Experiment 20001451 PARAMETER Experiment Name: At_Far-red-induction_P Parameter: Tissue Value: Whole Plant
  misc_feature: MA Experiment ID: 20001558 Result: Up-regulated in Transcription
  misc_feature: MA Experiment 20001558 PARAMETER Experiment Name: At_Drought_Soil_Dry_P Parameter: Age (day) Value: 27
  misc_feature: MA Experiment 20001558 PARAMETER Experiment Name: At_Drought_Soil_Dry_P Parameter: Organism Value: A. thaliana
  misc_feature: MA Experiment 20001558 PARAMETER Experiment Name: At_Drought_Soil_Dry_P Parameter: Plant Line Value: WS
  misc_feature: MA Experiment 20001558 PARAMETER Experiment Name: At_Drought_Soil_Dry_P Parameter: Post Timepoint (hr) Value: 6
  misc_feature: MA Experiment 20001558 PARAMETER Experiment Name: At_Drought_Soil_Dry_P Parameter: Post-Treatment Value: Re-Water vs. No Drought
  misc_feature: MA Experiment 20001558 PARAMETER Experiment Name: At_Drought_Soil_Dry_P Parameter: Timepoint (day) Value: 13
  misc_feature: MA Experiment 20001558 PARAMETER Experiment Name: At_Drought_Soil_Dry_P Parameter: Treatment Value: Drought vs. No Drought
  misc_feature: MA Experiment ID: 20001906 Result: Down-regulated in Transcription
  misc_feature: MA Experiment 20001906 PARAMETER Experiment Name: At_Drought_Reproduction_P Parameter: Age (day) Value: 35
  misc_feature: MA Experiment 20001906 PARAMETER Experiment Name: At_Drought_Reproduction_P Parameter: Organism Value: A. thaliana
  misc_feature: MA Experiment 20001906 PARAMETER Experiment Name: At_Drought_Reproduction_P Parameter: Plant Line Value: WS
  misc_feature: MA Experiment 20001906 PARAMETER Experiment Name: At_Drought_Reproduction_P Parameter: Timepoint (day) Value: 5
  misc_feature: MA Experiment 20001906 PARAMETER Experiment Name: At_Drought_Reproduction_P Parameter: Tissue Value: Siliques
  misc_feature: MA Experiment 20001906 PARAMETER Experiment Name: At_Drought_Reproduction_P Parameter: Treatment Value: Drought vs. No Drought
  misc_feature: MA Experiment ID: 20001911 Result: Down-regulated in Transcription
  misc_feature: MA Experiment 20001911 PARAMETER Experiment Name: At_Drought_Reproduction_P Parameter: Age (day) Value: 40
  misc_feature: MA Experiment 20001911 PARAMETER Experiment Name: At_Drought_Reproduction_P Parameter: Organism Value: A. thaliana
  misc_feature: MA Experiment 20001911 PARAMETER Experiment Name: At_Drought_Reproduction_P Parameter: Plant Line Value: WS
  misc_feature: MA Experiment 20001911 PARAMETER Experiment Name: At_Drought_Reproduction_P Parameter: Timepoint (day) Value: 10
  misc_feature: MA Experiment 20001911 PARAMETER Experiment Name: At_Drought_Reproduction_P Parameter: Tissue Value: Flowers
  misc_feature: MA Experiment 20001911 PARAMETER Experiment Name: At_Drought_Reproduction_P Parameter: Treatment Value: Drought vs. No Drought
atgtttcgtggtattctgaaatctgcaaaggatgagaagaagaagatggagtctcaaggcaatggagctgttgctaattcaggaaaatctctggttaatcgccgacgagctaacaaagaaaagaaaatggatttgctacaagatgttgataagcttaagaggaagctgagacaggaggagaatgttcatagagcattggagagagcttttactagacctttaggagctttacctcgtcttccgtcttacctccctcgacatacattggagcttcttgctgaagtagctgttcttgaagaggaagtggttcggttagaggagcaagttgtaaactttagacaaggtttataccaagaagctgtttacatatcttcaaagaggaatctggagagtcctaataacaacagtttgaatgagaattcgcccgttagaagcactaaacaccagagatcgaaatcaatgtcgcaacacgagttcaattctatgatcactcccactaaaaagcatcaacagtctcttagcagaagcatctcaagtaggaaactcttctcctctgatcaaacagttaatgaccgaagtggtcagagagtggtaagtggcaaacaagcgtcgcctaaatcaaatctaagcagtgttactaatactaagccagtagatgtgagagggaaagagaatcagacctctagtaatgcttcaaaagacaagaaaaataaagaatcacctgagaagaagcttggcagattcttgacatctgtgaagaagaagaaacctttgattaagccggaggctgcagcggataaacactcagaatcaaccaaattgcagctagatgatagattagcagatcaggacaaagctcaagagagtgtgtcaggatcatcttcggaagacaagacactgcaaagtggaaatgtagcaaacagagtttcagaggatttactgaaatgtcttgtgactattatcttgaggattagctcgtccaaggacattgtgttggatccatataataactgctcagagtggagaacaagagaacttggtgcatacaagcatttttcgtcggtcgatacatcttcagttgatcttggacgaagaatcaatgcttcatttctgatccatcgtctcaagttcctgcttaataagctttctgttgtcaatctagacggtcttagccaccagcagaagcttgcattctggataaatacttataattcctgcgttatgaatgcattcttggagcacgggatcccggcgactcctgaaatggttgtagcgctgatgcagaaggcaacaataattgtgggaggacactcgctaaatgcaatcacaatcgaacatttcatcttgagacttccataccacttgaaattcacttgtcccaaaactgcaacacatgaagaaatgagagctcatagcacatttggattggaatggtcagagcccttggtcacattcgctctcgcctgtggaagctggtcctctcctgctgtaagggtctacacagcagctaatgtagaggaagagctagaagctgcaaagagagattatctgcaagcatcagttgggatatcaaagaacaacaaactaatgcttccaaaggtattagattggtacttactcgactttgccaaggatttggaatcgttactggattgggtttgccttcagttacctgataaactaagagaagaagcaactaagtgtatggagagaaagaacaaagaatcactaatggaattggttcaagtagtaccatatgacttcagtttcagattgcttttgcatcaatga

SEQ ID NO: 72146 - protein, 596 aa, Arabidopsis thaliana
  peptide (1)..(596): Ceres Seq. ID no. 4918993
  misc_feature (376)..(517): Pfam Name: Protein of unknown function, DUF547 Pfam Description: Protein of unknown function, DUF547
  misc_feature (1)..(596): Homolog of NCBI NO: 25407787 NR Description: hypothetical protein AT4g37080 [imported] - thaliana >gi|4006868|emb|CAB16786.1| putative protein thaliana] >gi|7270657|emb|CAB80374.1| putative protein
  misc_feature (1)..(596): Homolog of NCBI NO: 30690854 NR Description: expressed protein [Arabidopsis thaliana] AT4g37080/C7A10_280 [Arabidopsis thaliana]
  misc_feature (213)..(593): Homolog of NCBI NO: 15239037 NR Description: putative protein; protein id: At5g42690.1 thaliana] >gi|10177272|dbj|BAB10625.1|
  misc_feature (332)..(594): Homolog of NCBI NO: 15225527 NR Description: hypothetical protein; protein id: At2g39690.1
  misc_feature (143)..(594): Homolog of NCBI NO: 31193902 NR Description: unknown protein [Oryza sativa (japonica
  misc_feature (332)..(594): Homolog of NCBI NO: 9294368 NR Description: gb|AAB97123.1~gene_id:T16H11.2~similar to unknown
  misc_feature (344)..(594): Homolog of NCBI NO: 34895788 NR Description: P0434B04.9 [Oryza sativa (japonica
  misc_feature (31)..(119): Homolog of NCBI NO: 34895788 NR Description: P0434B04.9 [Oryza sativa (japonica
  misc_feature (290)..(594): Homolog of NCBI NO: 15983811 NR Description: AT5g60720/mup24_130 [Arabidopsis thaliana]
  misc_feature (290)..(594): Homolog of NCBI NO: 30697420 NR Description: expressed protein [Arabidopsis thaliana]
MFRGILKSAKDEKKKMESQGNGAVANSGKSLVNRRRANKEKKMDLLQDVDKLKRKLRQEENVHRALERAFTRPLGALPRLPSYLPRHTLELLAEVAVLEEEVVRLEEQVVNFRQGLYQEAVYISSKRNLESPNNNSLNENSPVRSTKHQRSKSMSQHEFNSMITPTKKHQQSLSRSISSRKLFSSDQTVNDRSGQRVVSGKQASPKSNLSSVTNTKPVDVRGKENQTSSNASKDKKNKESPEKKLGRFLTSVKKKKPLIKPEAAADKHSESTKLQLDDRLADQDKAQESVSGSSSEDKTLQSGNVANRVSEDLLKCLVTIILRISSSKDIVLDPYNNCSEWRTRELGAYKHFSSVDTSSVDLGRRINASFLIHRLKFLLNKLSVVNLDGLSHQQKLAFWINTYNSCVMNAFLEHGIPATPEMVVALMQKATIIVGGHSLNAITIEHFILRLPYHLKFTCPKTATHEEMRAHSTFGLEWSEPLVTFALACGSWSSPAVRVYTAANVEEELEAAKRDYLQASVGISKNNKLMLPKVLDWYLLDFAKDLESLLDWVCLQLPDKLREEATKCMERKNKESLMELVQVVPYDFSFRLLLHQ

SEQ ID NO: 72147 - protein, 581 aa, Arabidopsis thaliana
  peptide (1)..(581): Ceres Seq. ID no. 4918994
  misc_feature (361)..(502): Pfam Name: Protein of unknown function, DUF547 Pfam Description: Protein of unknown function, DUF547
  misc_feature (1)..(581): Homolog of NCBI NO: 25407787 NR Description: hypothetical protein AT4g37080 [imported] - thaliana >gi|4006868|emb|CAB16786.1| putative protein thaliana] >gi|7270657|emb|CAB80374.1| putative protein
  misc_feature (1)..(581): Homolog of NCBI NO: 30690854 NR Description: expressed protein [Arabidopsis thaliana] AT4g37080/C7A10_280 [Arabidopsis thaliana]
  misc_feature (198)..(578): Homolog of NCBI NO: 15239037 NR Description: putative protein; protein id: At5g42690.1 thaliana] >gi|10177272|dbj|BAB10625.1|
  misc_feature (317)..(579): Homolog of NCBI NO: 15225527 NR Description: hypothetical protein; protein id: At2g39690.1
  misc_feature (128)..(579): Homolog of NCBI NO: 31193902 NR Description: unknown protein [Oryza sativa (japonica
  misc_feature (317)..(579): Homolog of NCBI NO: 9294368 NR Description: gb|AAB97123.1~gene_id:T16H11.2~similar to unknown
  misc_feature (329)..(579): Homolog of NCBI NO: 34895788 NR Description: P0434B04.9 [Oryza sativa (japonica
  misc_feature (16)..(104): Homolog of NCBI NO: 34895788 NR Description: P0434B04.9 [Oryza sativa (japonica
  misc_feature (275)..(579): Homolog of NCBI NO: 15983811 NR Description: AT5g60720/mup24_130 [Arabidopsis thaliana]
  misc_feature (275)..(579): Homolog of NCBI NO: 30697420 NR Description: expressed protein [Arabidopsis thaliana]
MESQGNGAVANSGKSLVNRRRANKEKKMDLLQDVDKLKRKLRQEENVHRALERAFTRPLGALPRLPSYLPRHTLELLAEVAVLEEEVVRLEEQVVNFRQGLYQEAVYISSKRNLESPNNNSLNENSPVRSTKHQRSKSMSQHEFNSMITPTKKHQQSLSRSISSRKLFSSDQTVNDRSGQRVVSGKQASPKSNLSSVTNTKPVDVRGKENQTSSNASKDKKNKESPEKKLGRFLTSVKKKKPLIKPEAAADKHSESTKLQLDDRLADQDKAQESVSGSSSEDKTLQSGNVANRVSEDLLKCLVTIILRISSSKDIVLDPYNNCSEWRTRELGAYKHFSSVDTSSVDLGRRINASFLIHRLKFLLNKLSVVNLDGLSHQQKLAFWINTYNSCVMNAFLEHGIPATPEMVVALMQKATIIVGGHSLNAITIEHFILRLPYHLKFTCPKTATHEEMRAHSTFGLEWSEPLVTFALACGSWSSPAVRVYTAANVEEELEAAKRDYLQASVGISKNNKLMLPKVLDWYLLDFAKDLESLLDWVCLQLPDKLREEATKCMERKNKESLMELVQVVPYDFSFRLLLHQ

SEQ ID NO: 72148 - protein, 554 aa, Arabidopsis thaliana
  peptide (1)..(554): Ceres Seq. ID no. 4918995
  misc_feature (334)..(475): Pfam Name: Protein of unknown function, DUF547 Pfam Description: Protein of unknown function, DUF547
  misc_feature (1)..(554): Homolog of NCBI NO: 25407787 NR Description: hypothetical protein AT4g37080 [imported] - thaliana >gi|4006868|emb|CAB16786.1| putative protein thaliana] >gi|7270657|emb|CAB80374.1| putative protein
  misc_feature (1)..(554): Homolog of NCBI NO: 30690854 NR Description: expressed protein [Arabidopsis thaliana] AT4g37080/C7A10_280 [Arabidopsis thaliana]
  misc_feature (171)..(551): Homolog of NCBI NO: 15239037 NR Description: putative protein; protein id: At5g42690.1 thaliana] >gi|10177272|dbj|BAB10625.1|
  misc_feature (290)..(552): Homolog of NCBI NO: 15225527 NR Description: hypothetical protein; protein id: At2g39690.1
  misc_feature (101)..(552): Homolog of NCBI NO: 31193902 NR Description: unknown protein [Oryza sativa (japonica
  misc_feature (290)..(552): Homolog of NCBI NO: 9294368 NR Description: gb|AAB97123.1~gene_id:T16H11.2~similar to unknown
  misc_feature (302)..(552): Homolog of NCBI NO: 34895788 NR Description: P0434B04.9 [Oryza sativa (japonica
  misc_feature (1)..(77): Homolog of NCBI NO: 34895788 NR Description: P0434B04.9 [Oryza sativa (japonica
  misc_feature (248)..(552): Homolog of NCBI NO: 15983811 NR Description: AT5g60720/mup24_130 [Arabidopsis thaliana]
  misc_feature (248)..(552): Homolog of NCBI NO: 30697420 NR Description: expressed protein [Arabidopsis thaliana]
MDLLQDVDKLKRKLRQEENVHRALERAFTRPLGALPRLPSYLPRHTLELLAEVAVLEEEVVRLEEQVVNFRQGLYQEAVYISSKRNLESPNNNSLNENSPVRSTKHQRSKSMSQHEFNSMITPTKKHQQSLSRSISSRKLFSSDQTVNDRSGQRVVSGKQASPKSNLSSVTNTKPVDVRGKENQTSSNASKDKKNKESPEKKLGRFLTSVKKKKPLIKPEAAADKHSESTKLQLDDRLADQDKAQESVSGSSSEDKTLQSGNVANRVSEDLLKCLVTIILRISSSKDIVLDPYNNCSEWRTRELGAYKHFSSVDTSSVDLGRRINASFLIHRLKFLLNKLSVVNLDGLSHQQKLAFWINTYNSCVMNAFLEHGIPATPEMVVALMQKATIIVGGHSLNAITIEHFILRLPYHLKFTCPKTATHEEMRAHSTFGLEWSEPLVTFALACGSWSSPAVRVYTAANVEEELEAAKRDYLQASVGISKNNKLMLPKVLDWYLLDFAKDLESLLDWVCLQLPDKLREEATKCMERKNKESLMELVQVVPYDFSFRLLLHQ

SEQ ID NO: 72149 - DNA, 2688 bp, Arabidopsis thaliana
  misc_feature (1)..(2688): Ceres Seq. ID no. 4919129
  misc_feature: MA Experiment ID: 20000307 Result: Up-regulated in Transcription
  misc_feature: MA Experiment 20000307 PARAMETER Experiment Name: At_Germinating_Seeds_Sub_P Parameter: Age (hr) Value: 24 vs. 0
  misc_feature: MA Experiment 20000307 PARAMETER Experiment Name: At_Germinating_Seeds_Sub_P Parameter: Organism Value: A. thaliana
  misc_feature: MA Experiment 20000307 PARAMETER Experiment Name: At_Germinating_Seeds_Sub_P Parameter: Plant Line Value: WS
  misc_feature: MA Experiment 20000307 PARAMETER Experiment Name: At_Germinating_Seeds_Sub_P Parameter: Tissue Value: Germinating Seeds
  misc_feature: MA Experiment ID: 20000314 Result: Up-regulated in Transcription
  misc_feature: MA Experiment 20000314 PARAMETER Experiment Name: At_14day_Shoots-Roots_Sub_P Parameter: Age (day) Value: 14
  misc_feature: MA Experiment 20000314 PARAMETER Experiment Name: At_14day_Shoots-Roots_Sub_P Parameter: Organism Value: A. thaliana
  misc_feature: MA Experiment 20000314 PARAMETER Experiment Name: At_14day_Shoots-Roots_Sub_P Parameter: Plant Line Value: WS
  misc_feature: MA Experiment 20000314 PARAMETER Experiment Name: At_14day_Shoots-Roots_Sub_P Parameter: Tissue Value: Roots vs. Whole Plant
atggttgctgcgtcttatgagccctacacgtatagctcaccaccaccaccattgtatgactctcctacaccaaaggttgactataagtctccaccacctccatacgtttacagttctccaccacctccactatcgtattcgccatctcccaaggtagactacaagtctccaccacctccatatgtttacagctctccaccaccaccatattactcaccatcccctaaagtcgaatacaaatccccaccacctccatatgtttatagttctccaccaccaccatattactcaccctcacctaaagtagattacaagtctccaccaccaccgtatgtttacagctccccaccaccaccatactattcaccttctccaaagcccacatacaaatcaccaccacctccatatgtttacaattctccaccaccaccatactactcaccatcccctaaggtcgaatacaaatctccaccacctccatacgtctatagctctccacccccaccatactactcaccctcacctaaagtagattataagtctccaccaccaccgtatgtttacaactctccaccaccaccatactattcaccttctccaaaacccacatacaagtccccaccaccaccatatatttacagctctccaccaccaccatactattctccttctcctaaaccagtatacaaatctccaccaccaccatacgtctattcctctccaccaccaccatactattcaccttctcctaaaccagcatacaaatctccaccaccaccgtatgtttatagctctccacctcctccatactactcgccttctcctaaacccatatacaagtctccaccaccaccgtacgtctacaactctcctccaccaccatactactctccttctccaaaaccggcatacaaatctccaccaccaccatacgtatacagctttccacctcctccatactactcgccttctcctaaacccgtatacaagtctccaccaccaccatacgtctacaactctcctccaccaccatactactctccttctccaaaaccggcatacaaatctccaccaccaccatacgtatacagctctccaccaccaccatactactcgccttctcctaaaccaacatacaaatctccaccaccaccatatgtttatagctctccacctcctccatactactcgccttctcctaaacccgtatacaagtctccaccaccaccgtacatctacaactctccaccaccaccatactactccccttcacctaaaccatcatacaaatccccaccaccaccatatgtttacagctctccaccaccaccatattactcgccttctcctaagcttacatacaaatcctcaccaccaccctatgtttacagctctccaccaccaccatattactctccttctcctaaggttgtatacaaatctccaccaccaccatatgtttacagctctccaccaccaccatactactccccttcacctaaaccatcatacaaatccccaccaccaccgtacgtctataactctccacctcctccttactactctccttcacctaaggtcatatacaaatcgccaccacacccacatgtatgtgtttgtcccccacctccaccatgctactctcattctccaaagattgagtacaaatccccaccaacaccatatgtttaccactcaccacctcccccaccttattattcgccttcgcctaaacctgcatataaatcttcaccaccaccttacgtctacagctctccaccaccaccatattactcacctgctcctaagcccgtatacaaatctccaccaccaccatacgtgtacaactccccaccaccaccatattactcaccatcccctaaacctacatacaaatctccaccaccaccatatgtatacagctctccaccaccaccatattactcacctactcctaaacctacatacaaatctccaccacccccatatgtctacagttccccaccaccaccatattactcgccttctcctaagccaacatacaaatccccaccaccaccatacgtctacagttctccaccaccaccatattactcacctgctcctaagcccacatacaaatctccaccaccaccatacgtttacagctccccaccaccaccatactactcgccttcccctaagcctacatacaaatctccaccacctccatatgtatatagctctccacctccaccaccttattactctccttctccaaaggttgagtacaaatctccgccaccaccatatgtctacagttctcctcccccaccatattactctccttctccaaaggttgagtacaaatctcctcctccaccgtatgtttatagttctccacctccaccaccatattactctccttctccaaaggttgagtacaaatcccctccaccaccgtatgtctacagctccccaccaccacccacgtattattctccttctccaaaggttgaatacaaatctccaccacctccatatgtctacaactctccacctccaccggcgtattactctccatctccaaagattgagtacaaatctccacctccaccatatgtctacagttctccaccaccaccatcatattctccttctccaaaagctgaatacaaatctcctcctcccccatccttatattactaa

SEQ ID NO: 72150 - protein, 895 aa, Arabidopsis thaliana
  peptide (1)..(895): Ceres Seq. ID no. 4919130
  misc_feature (2)..(321): Pfam Name: Extensin-like region Pfam Description: Extensin-like region
  misc_feature (35)..(623): Homolog of NCBI NO: 15239790 NR Description: putative protein; protein id: At5g49080.1 thaliana] >gi|10176941|dbj|BAB10090.1|
  misc_feature (86)..(673): Homolog of NCBI NO: 15239790 NR Description: putative protein; protein id: At5g49080.1 thaliana] >gi|10176941|dbj|BAB10090.1|
  misc_feature (61)..(648): Homolog of NCBI NO: 15239790 NR Description: putative protein; protein id: At5g49080.1 thaliana] >gi|10176941|dbj|BAB10090.1|
  misc_feature (7)..(567): Homolog of NCBI NO: 15239790 NR Description: putative protein; protein id: At5g49080.1 thaliana] >gi|10176941|dbj|BAB10090.1|
  misc_feature (111)..(698): Homolog of NCBI NO: 15239790 NR Description: putative protein; protein id: At5g49080.1 thaliana] >gi|10176941|dbj|BAB10090.1|
  misc_feature (304)..(894): Homolog of NCBI NO: 15239790 NR Description: putative protein; protein id: At5g49080.1 thaliana] >gi|10176941|dbj|BAB10090.1|
  misc_feature (261)..(846): Homolog of NCBI NO: 15239790 NR Description: putative protein; protein id: At5g49080.1 thaliana] >gi|10176941|dbj|BAB10090.1|
  misc_feature (286)..(872): Homolog of NCBI NO: 15239790 NR Description: putative protein; protein id: At5g49080.1 thaliana] >gi|10176941|dbj|BAB10090.1|
  misc_feature (136)..(723): Homolog of NCBI NO: 15239790 NR Description: putative protein; protein id: At5g49080.1 thaliana] >gi|10176941|dbj|BAB10090.1|
  misc_feature (236)..(820): Homolog of NCBI NO: 15239790 NR Description: putative protein; protein id: At5g49080.1 thaliana] >gi|10176941|dbj|BAB10090.1|
MVAASYEPYTYSSPPPPLYDSPTPKVDYKSPPPPYVYSSPPPPLSYSPSPKVDYKSPPPPYVYSSPPPPYYSPSPKVEYKSPPPPYVYSSPPPPYYSPSPKVDYKSPPPPYVYSSPPPPYYSPSPKPTYKSPPPPYVYNSPPPPYYSPSPKVEYKSPPPPYVYSSPPPPYYSPSPKVDYKSPPPPYVYNSPPPPYYSPSPKPTYKSPPPPYIYSSPPPPYYSPSPKPVYKSPPPPYVYSSPPPPYYSPSPKPAYKSPPPPYVYSSPPPPYYSPSPKPIYKSPPPPYVYNSPPPPYYSPSPKPAYKSPPPPYVYSFPPPPYYSPSPKPVYKSPPPPYVYNSPPPPYYSPSPKPAYKSPPPPYVYSSPPPPYYSPSPKPTYKSPPPPYVYSSPPPPYYSPSPKPVYKSPPPPYIYNSPPPPYYSPSPKPSYKSPPPPYVYSSPPPPYYSPSPKLTYKSSPPPYVYSSPPPPYYSPSPKVVYKSPPPPYVYSSPPPPYYSPSPKPSYKSPPPPYVYNSPPPPYYSPSPKVIYKSPPHPHVCVCPPPPPCYSHSPKIEYKSPPTPYVYHSPPPPPYYSPSPKPAYKSSPPPYVYSSPPPPYYSPAPKPVYKSPPPPYVYNSPPPPYYSPSPKPTYKSPPPPYVYSSPPPPYYSPTPKPTYKSPPPPYVYSSPPPPYYSPSPKPTYKSPPPPYVYSSPPPPYYSPAPKPTYKSPPPPYVYSSPPPPYYSPSPKPTYKSPPPPYVYSSPPPPPYYSPSPKVEYKSPPPPYVYSSPPPPYYSPSPKVEYKSPPPPYVYSSPPPPPYYSPSPKVEYKSPPPPYVYSSPPPPTYYSPSPKVEYKSPPPPYVYNSPPPPAYYSPSPKIEYKSPPPPYVYSSPPPPSYSPSPKAEYKSPPPPSLYY

SEQ ID NO: 72151 - protein, 710 aa, Arabidopsis thaliana
  peptide (1)..(710): Ceres Seq. ID no. 4919131
  misc_feature (1)..(62): Pfam Name: Plasmodium histidine-rich protein (HRPII/III) Pfam Description: Plasmodium histidine-rich protein (HRPII/III)
  misc_feature (268)..(338): Homolog of NCBI NO: 30699212 NR Description: extensin family protein [Arabidopsis thaliana]
  misc_feature (228)..(291): Homolog of NCBI NO: 30699212 NR Description: extensin family protein [Arabidopsis thaliana]
  misc_feature (176)..(229): Homolog of NCBI NO: 30699212 NR Description: extensin family protein [Arabidopsis thaliana]
  misc_feature (233)..(330): Homolog of NCBI NO: 30699212 NR Description: extensin family protein [Arabidopsis thaliana]
  misc_feature (93)..(158): Homolog of NCBI NO: 30699212 NR Description: extensin family protein [Arabidopsis thaliana]
  misc_feature (218)..(271): Homolog of NCBI NO: 30699212 NR Description: extensin family protein [Arabidopsis thaliana]
  misc_feature (405)..(435): Homolog of NCBI NO: 30699212 NR Description: extensin family protein [Arabidopsis thaliana]
  misc_feature (494)..(544): Homolog of NCBI NO: 30699212 NR Description: extensin family protein [Arabidopsis thaliana]
  misc_feature (55)..(114): Homolog of NCBI NO: 30699212 NR Description: extensin family protein [Arabidopsis thaliana]
  misc_feature (193)..(239): Homolog of NCBI NO: 30699212 NR Description: extensin family protein [Arabidopsis thaliana]
MFTTLHHHHTIHLLQNPHTSPHHHHIFTALHHHHTILLLLNQYTNLHHHHTSIPLHHHHTIHLLLNQHTNLHHHRMFIALHLLHTTRLLLNPYTSLHHHRTSTTLLHHHTTLLLQNRHTNLHHHHTYTAFHLLHTTRLLLNPYTSLHHHHTSTTLLHHHTTLLLQNRHTNLHHHHTYTALHHHHTTRLLLNQHTNLHHHHMFIALHLLHTTRLLLNPYTSLHHHRTSTTLHHHHTTPLHLNHHTNPHHHHMFTALHHHHITRLLLSLHTNPHHHPMFTALHHHHITLLLLRLYTNLHHHHMFTALHHHHTTPLHLNHHTNPHHHRTSITLHLLLTTLLHLRSYTNRHHTHMYVFVPHLHHATLILQRLSTNPHQHHMFTTHHLPHLIIRLRLNLHINLHHHLTSTALHHHHITHLLLSPYTNLHHHHTCTTPHHHHITHHPLNLHTNLHHHHMYTALHHHHITHLLLNLHTNLHHPHMSTVPHHHHITRLLLSQHTNPHHHHTSTVLHHHHITHLLLSPHTNLHHHHTFTAPHHHHTTRLPLSLHTNLHHLHMYIALHLHHLITLLLQRLSTNLRHHHMSTVLLPHHITLLLQRLSTNLLLHRMFIVLHLHHHITLLLQRLSTNPLHHRMSTAPHHHPRIILLLQRLNTNLHHLHMSTTLHLHRRITLHLQRLSTNLHLHHMSTVLHHHHHILLLQKLNTNLLLPHPYIT

SEQ ID NO: 72152 - protein, 635 aa, Arabidopsis thaliana
  peptide (1)..(635): Ceres Seq. ID no. 4919132
  misc_feature (57)..(251): Pfam Name: Plasmodium histidine-rich protein (HRPII/III) Pfam Description: Plasmodium histidine-rich protein (HRPII/III)
  misc_feature (193)..(263): Homolog of NCBI NO: 30699212 NR Description: extensin family protein [Arabidopsis thaliana]
  misc_feature (153)..(216): Homolog of NCBI NO: 30699212 NR Description: extensin family protein [Arabidopsis thaliana]
  misc_feature (101)..(154): Homolog of NCBI NO: 30699212 NR Description: extensin family protein [Arabidopsis thaliana]
  misc_feature (158)..(255): Homolog of NCBI NO: 30699212 NR Description: extensin family protein [Arabidopsis thaliana]
  misc_feature (18)..(83): Homolog of NCBI NO: 30699212 NR Description: extensin family protein [Arabidopsis thaliana]
  misc_feature (143)..(196): Homolog of NCBI NO: 30699212 NR Description: extensin family protein [Arabidopsis thaliana]
  misc_feature (330)..(360): Homolog of NCBI NO: 30699212 NR Description: extensin family protein [Arabidopsis thaliana]
  misc_feature (419)..(469): Homolog of NCBI NO: 30699212 NR Description: extensin family protein [Arabidopsis thaliana]
  misc_feature (1)..(39): Homolog of NCBI NO: 30699212 NR Description: extensin family protein [Arabidopsis thaliana]
  misc_feature (118)..(164): Homolog of NCBI NO: 30699212 NR Description: extensin family protein [Arabidopsis thaliana]
MFIALHLLHTTRLLLNPYTSLHHHRTSTTLLHHHTTLLLQNRHTNLHHHHTYTAFHLLHTTRLLLNPYTSLHHHHTSTTLLHHHTTLLLQNRHTNLHHHHTYTALHHHHTTRLLLNQHTNLHHHHMFIALHLLHTTRLLLNPYTSLHHHRTSTTLHHHHTTPLHLNHHTNPHHHHMFTALHHHHITRLLLSLHTNPHHHPMFTALHHHHITLLLLRLYTNLHHHHMFTALHHHHTTPLHLNHHTNPHHHRTSITLHLLLTTLLHLRSYTNRHHTHMYVFVPHLHHATLILQRLSTNPHQHHMFTTHHLPHLIIRLRLNLHINLHHHLTSTALHHHHITHLLLSPYTNLHHHHTCTTPHHHHITHHPLNLHTNLHHHHMYTALHHHHITHLLLNLHTNLHHPHMSTVPHHHHITRLLLSQHTNPHHHHTSTVLHHHHITHLLLSPHTNLHHHHTFTAPHHHHTTRLPLSLHTNLHHLHMYIALHLHHLITLLLQRLSTNLRHHHMSTVLLPHHITLLLQRLSTNLLLHRMFIVLHLHHHITLLLQRLSTNPLHHRMSTAPHHHPRIILLLQRLNTNLHHLHMSTTLHLHRRITLHLQRLSTNLHLHHMSTVLHHHHHILLLQKLNTNLLLPHPYIT

SEQ ID NO: 72153 - DNA, 1188 bp, Arabidopsis thaliana
  misc_feature (1)..(1188): Ceres Seq. ID no. 4919394
  misc_feature: MA Experiment ID: 20000264 Result: Down-regulated in Transcription
  misc_feature: MA Experiment 20000264 PARAMETER Experiment Name: At_Open_Flower_P Parameter: Age (day) Value: 21
  misc_feature: MA Experiment 20000264 PARAMETER Experiment Name: At_Open_Flower_P Parameter: Plant Line Value: WS
  misc_feature: MA Experiment 20000264 PARAMETER Experiment Name: At_Open_Flower_P Parameter: Tissue Value: Open Flower vs. Whole Plant
  misc_feature: MA Experiment ID: 20001773 Result: Up-regulated in Transcription
  misc_feature: MA Experiment 20001773 PARAMETER Experiment Name: At_Far-red-enriched-adult_P Parameter: Age (day) Value: 30
  misc_feature: MA Experiment 20001773 PARAMETER Experiment Name: At_Far-red-enriched-adult_P Parameter: Light Value: Far-red enriched vs. White
  misc_feature: MA Experiment 20001773 PARAMETER Experiment Name: At_Far-red-enriched-adult_P Parameter: Organism Value: A. thaliana
  misc_feature: MA Experiment 20001773 PARAMETER Experiment Name: At_Far-red-enriched-adult_P Parameter: Plant Line Value: Columbia
  misc_feature: MA Experiment 20001773 PARAMETER Experiment Name: At_Far-red-enriched-adult_P Parameter: Timepoint (hr) Value: 48
  misc_feature: MA Experiment 20001773 PARAMETER Experiment Name: At_Far-red-enriched-adult_P Parameter: Tissue Value: Aerial
  misc_feature: MA Experiment ID: 20001906 Result: Down-regulated in Transcription
  misc_feature: MA Experiment 20001906 PARAMETER Experiment Name: At_Drought_Reproduction_P Parameter: Age (day) Value: 35
  misc_feature: MA Experiment 20001906 PARAMETER Experiment Name: At_Drought_Reproduction_P Parameter: Organism Value: A. thaliana
  misc_feature: MA Experiment 20001906 PARAMETER Experiment Name: At_Drought_Reproduction_P Parameter: Plant Line Value: WS
  misc_feature: MA Experiment 20001906 PARAMETER Experiment Name: At_Drought_Reproduction_P Parameter: Timepoint (day) Value: 5
  misc_feature: MA Experiment 20001906 PARAMETER Experiment Name: At_Drought_Reproduction_P Parameter: Tissue Value: Siliques
  misc_feature: MA Experiment 20001906 PARAMETER Experiment Name: At_Drought_Reproduction_P Parameter: Treatment Value: Drought vs. No Drought
atgtcctggacggcagatggctatgtggctacggtaactatgaacaacttccaaatctaccggcacatacaaaaccctggttggacattaggttggacatgggcaaagaaagaggtgatttggtcaatggttggtgcacaaacaacagaacaaggagactgttccaagtttaagggaaatgtacctcattgctgtaagaaaacccctacagttgttgatctcttgccaggtgtgccttataatcaacagttctcaaactgttgcaaaggaggtgtaattggagcttggggtcaagatccatcagccgctgtatcccagtttcaggttagtgctggtttagctggaactacaaacaagactgtcaagcttcctaagaacttcactttgcttggtcccggccctggttacacttgcggtcctgccaaaatcgtgccctctaccgtttttctcacaactgacaaacggcgaaaaacacaagctttgatgacatggaatgttacctgcacatactcacagtttttagcaagaaagcatccaagctgttgtgtctccttctcttctttctacaacgacaccataactccttgcccgtcttgtgcctgtggctgcgagaacaaaaagagctgcgtcaaggctgattctaagattctaaccaagaaaggtctcaacacaccaaaaaaggacaacactcctttgttgcaatgcacacatcacatgtgccctgttagagtccactggcacgttaaaactaactacaaagactattggcgagtgaagatagcaatcacaaatttcaattaccggatgaatcatacactctggactttagcaattcagcatccaaatctcaacaatgtgactcaagttttcagctttgactacaaaccagtctctccttacggatccataaatgatactggaatgttctatggaacgaagttttacaatgatttattaatggaagctggaccttcagggaatgtgcaatcagaggttttgctacagaaagatcaaaagacttttactttcaagcaaggttgggcttttcctagaaaagtttactttaatggtgatgaatgtatgttacctccaccagattcatacccttttctaccaaactctgcacaagggaactttgcttcgttctcactcaccattcttcttctcctattcatctcaatatggtga

SEQ ID NO: 72154 - protein, 395 aa, Arabidopsis thaliana; identical to SEQ ID NO: 71459
  peptide (1)..(395): Ceres Seq. ID no. 4919395
  misc_feature (1)..(395): Homolog of NCBI NO: 11358657 NR Description: probable phytochelatin synthetase - Arabidopsis >gi|9755608|emb|CAC01762.1| putative phytochelatin synthetase
  misc_feature (1)..(395): Homolog of NCBI NO: 30685446 NR Description: phytochelatin synthetase -related [Arabidopsis
  misc_feature (1)..(392): Homolog of NCBI NO: 18424412 NR Description: phytochelatin synthetase - like protein; protein At5g60920.1, supported by cDNA: 17250., supported by cDNA: [Arabidopsis thaliana] >gi|14193657|gb|AAK56072.1|AF319663_1
  misc_feature (1)..(392): Homolog of NCBI NO: 21553837 NR Description: phytochelatin synthetase-like protein
  misc_feature (1)..(394): Homolog of NCBI NO: 13477083 NR Description: phytochelatin synthetase-like protein
  misc_feature (1)..(394): Homolog of NCBI NO: 21618129 NR Description: phytochelatin synthetase-like protein
  misc_feature (1)..(394): Homolog of NCBI NO: 18406342 NR Description: phytochelatin synthetase-like protein; protein
  misc_feature (1)..(390): Homolog of NCBI NO: 15232863 NR Description: unknown protein; protein id: At3g02210.1 thaliana] >gi|6041808|gb|AAF02128.1|AC009755_21 unknown protein
  misc_feature (1)..(391): Homolog of NCBI NO: 30090026 NR Description: phytochelatin synthetase-like protein 2 [Sorghum
  misc_feature (1)..(388): Homolog of NCBI NO: 30090032 NR Description: phytochelatin synthetase [Triticum monococcum]

SEQ ID NO: 72155 - protein, 382 aa, Arabidopsis thaliana
  peptide (1)..(382): Ceres Seq. ID no. 4919396
  misc_feature (1)..(382): Homolog of NCBI NO: 11358657 NR Description: probable phytochelatin synthetase - Arabidopsis >gi|9755608|emb|CAC01762.1| putative phytochelatin synthetase
  misc_feature (1)..(382): Homolog of NCBI NO: 30685446 NR Description: phytochelatin synthetase -related [Arabidopsis
  misc_feature (1)..(379): Homolog of NCBI NO: 18424412 NR Description: phytochelatin synthetase - like protein; protein At5g60920.1, supported by cDNA: 17250., supported by cDNA: [Arabidopsis thaliana] >gi|14193657|gb|AAK56072.1|AF319663_1
  misc_feature (1)..(379): Homolog of NCBI NO: 21553837 NR Description: phytochelatin synthetase-like protein
  misc_feature (1)..(381): Homolog of NCBI NO: 13477083 NR Description: phytochelatin synthetase-like protein
  misc_feature (1)..(381): Homolog of NCBI NO: 21618129 NR Description: phytochelatin synthetase-like protein
  misc_feature (1)..(381): Homolog of NCBI NO: 18406342 NR Description: phytochelatin synthetase-like protein; protein
  misc_feature (1)..(377): Homolog of NCBI NO: 15232863 NR Description: unknown protein; protein id: At3g02210.1 thaliana] >gi|6041808|gb|AAF02128.1|AC009755_21 unknown protein
  misc_feature (1)..(378): Homolog of NCBI NO: 30090026 NR Description: phytochelatin synthetase-like protein 2 [Sorghum
  misc_feature (1)..(375): Homolog of NCBI NO: 30090032 NR Description: phytochelatin synthetase [Triticum monococcum]
MNNFQIYRHIQNPGWTLGWTWAKKEVIWSMVGAQTTEQGDCSKFKGNVPHCCKKTPTVVDLLPGVPYNQQFSNCCKGGVIGAWGQDPSAAVSQFQVSAGLAGTTNKTVKLPKNFTLLGPGPGYTCGPAKIVPSTVFLTTDKRRKTQALMTWNVTCTYSQFLARKHPSCCVSFSSFYNDTITPCPSCACGCENKKSCVKADSKILTKKGLNTPKKDNTPLLQCTHHMCPVRVHWHVKTNYKDYWRVKIAITNFNYRMNHTLWTLAIQHPNLNNVTQVFSFDYKPVSPYGSINDTGMFYGTKFYNDLLMEAGPSGNVQSEVLLQKDQKTFTFKQGWAFPRKVYFNGDECMLPPPDSYPFLPNSAQGNFASFSLTILLLLFISIW

SEQ ID NO: 72156 - protein, 353 aa, Arabidopsis thaliana
  peptide (1)..(353): Ceres Seq. ID no. 4919397
  misc_feature (1)..(353): Homolog of NCBI NO: 11358657 NR Description: probable phytochelatin synthetase - Arabidopsis >gi|9755608|emb|CAC01762.1| putative phytochelatin synthetase
  misc_feature (1)..(353): Homolog of NCBI NO: 30685446 NR Description: phytochelatin synthetase -related [Arabidopsis
  misc_feature (1)..(350): Homolog of NCBI NO: 18424412 NR Description: phytochelatin synthetase - like protein; protein At5g60920.1, supported by cDNA: 17250., supported by cDNA: [Arabidopsis thaliana] >gi|14193657|gb|AAK56072.1|AF319663_1
  misc_feature (1)..(350): Homolog of NCBI NO: 21553837 NR Description: phytochelatin synthetase-like protein
  misc_feature (1)..(352): Homolog of NCBI NO: 13477083 NR Description: phytochelatin synthetase-like protein
  misc_feature (1)..(352): Homolog of NCBI NO: 21618129 NR Description: phytochelatin synthetase-like protein
  misc_feature (1)..(352): Homolog of NCBI NO: 18406342 NR Description: phytochelatin synthetase-like protein; protein
  misc_feature (1)..(348): Homolog of NCBI NO: 15232863 NR Description: unknown protein; protein id: At3g02210.1 thaliana] >gi|6041808|gb|AAF02128.1|AC009755_21 unknown protein
  misc_feature (1)..(349): Homolog of NCBI NO: 30090026 NR Description: phytochelatin synthetase-like protein 2 [Sorghum
  misc_feature (1)..(346): Homolog of NCBI NO: 30090032 NR Description: phytochelatin synthetase [Triticum monococcum]
MVGAQTTEQGDCSKFKGNVPHCCKKTPTVVDLLPGVPYNQQFSNCCKGGVIGAWGQDPSAAVSQFQVSAGLAGTTNKTVKLPKNFTLLGPGPGYTCGPAKIVPSTVFLTTDKRRKTQALMTWNVTCTYSQFLARKHPSCCVSFSSFYNDTITPCPSCACGCENKKSCVKADSKILTKKGLNTPKKDNTPLLQCTHHMCPVRVHWHVKTNYKDYWRVKIAITNFNYRMNHTLWTLAIQHPNLNNVTQVFSFDYKPVSPYGSINDTGMFYGTKFYNDLLMEAGPSGNVQSEVLLQKDQKTFTFKQGWAFPRKVYFNGDECMLPPPDSYPFLPNSAQGNFASFSLTILLLLFISIW

SEQ ID NO: 72157 - DNA, 912 bp, Arabidopsis thaliana
  misc_feature (1)..(912): Ceres Seq. ID no. 4919864
  misc_feature: MA Experiment ID: 20000182 Result: Down-regulated in Transcription
  misc_feature: MA Experiment 20000182 PARAMETER Experiment Name: At_2mM_SA_P Parameter: Age (day) Value: 14
  misc_feature: MA Experiment 20000182 PARAMETER Experiment Name: At_2mM_SA_P Parameter: Organism Value: A. thaliana
  misc_feature: MA Experiment 20000182 PARAMETER Experiment Name: At_2mM_SA_P Parameter: Plant Line Value: WS
  misc_feature: MA Experiment 20000182 PARAMETER Experiment Name: At_2mM_SA_P Parameter: Timepoint (hr) Value: 6
  misc_feature: MA Experiment 20000182 PARAMETER Experiment Name: At_2mM_SA_P Parameter: Tissue Value: Aerial
  misc_feature: MA Experiment 20000182 PARAMETER Experiment Name: At_2mM_SA_P Parameter: Treatment Value: 2mM SA vs. No Treatment
  misc_feature: MA Experiment ID: 20000265 Result: Up-regulated in Transcription
  misc_feature: MA Experiment 20000265 PARAMETER Experiment Name: At_Open_Flower_P Parameter: Age (day) Value: 21
  misc_feature: MA Experiment 20000265 PARAMETER Experiment Name: At_Open_Flower_P Parameter: Plant Line Value: WS
  misc_feature: MA Experiment 20000265 PARAMETER Experiment Name: At_Open_Flower_P Parameter: Tissue Value: Closed Flower vs. Whole Plant
  misc_feature: MA Experiment ID: 20000286 Result: Up-regulated in Transcription
  misc_feature: MA Experiment 20000286 PARAMETER Experiment Name: At_Open_Flower_P Parameter: Age (day) Value: 21
  misc_feature: MA Experiment 20000286 PARAMETER Experiment Name: At_Open_Flower_P Parameter: Plant Line Value: WS
  misc_feature: MA Experiment 20000286 PARAMETER Experiment Name: At_Open_Flower_P Parameter: Tissue Value: Half Open vs. Whole Plant
  misc_feature: MA Experiment ID: 20000438 Result: Down-regulated in Transcription
  misc_feature: MA Experiment 20000438 PARAMETER Experiment Name: At_Shoots__P Parameter: Age (day) Value: 14
  misc_feature: MA Experiment 20000438 PARAMETER Experiment Name: At_Shoots__P Parameter: Tissue Value: Shoots vs. Whole Plant
  misc_feature: MA Experiment ID: 20001555 Result: Down-regulated in Transcription
  misc_feature: MA Experiment 20001555 PARAMETER Experiment Name: At_Drought_Soil_Dry_P Parameter: Age (day) Value: 24
  misc_feature: MA Experiment 20001555 PARAMETER Experiment Name: At_Drought_Soil_Dry_P Parameter: Organism Value: A. thaliana
  misc_feature: MA Experiment 20001555 PARAMETER Experiment Name: At_Drought_Soil_Dry_P Parameter: Plant Line Value: WS
  misc_feature: MA Experiment 20001555 PARAMETER Experiment Name: At_Drought_Soil_Dry_P Parameter: Post Timepoint (hr) Value: None
  misc_feature: MA Experiment 20001555 PARAMETER Experiment Name: At_Drought_Soil_Dry_P Parameter: Post-Treatment Value: None
  misc_feature: MA Experiment 20001555 PARAMETER Experiment Name: At_Drought_Soil_Dry_P Parameter: Timepoint (day) Value: 10
  misc_feature: MA Experiment 20001555 PARAMETER Experiment Name: At_Drought_Soil_Dry_P Parameter: Treatment Value: Drought vs. No Drought
  misc_feature: MA Experiment ID: 20001773 Result: Up-regulated in Transcription
  misc_feature: MA Experiment 20001773 PARAMETER Experiment Name: At_Far-red-enriched-adult_P Parameter: Age (day) Value: 30
  misc_feature: MA Experiment 20001773 PARAMETER Experiment Name: At_Far-red-enriched-adult_P Parameter: Light Value: Far-red enriched vs. White
  misc_feature: MA Experiment 20001773 PARAMETER Experiment Name: At_Far-red-enriched-adult_P Parameter: Organism Value: A. thaliana
  misc_feature: MA Experiment 20001773 PARAMETER Experiment Name: At_Far-red-enriched-adult_P Parameter: Plant Line Value: Columbia
  misc_feature: MA Experiment 20001773 PARAMETER Experiment Name: At_Far-red-enriched-adult_P Parameter: Timepoint (hr) Value: 48
  misc_feature: MA Experiment 20001773 PARAMETER Experiment Name: At_Far-red-enriched-adult_P Parameter: Tissue Value: Aerial
  misc_feature: MA Experiment ID: 20001910 Result: Down-regulated in Transcription
  misc_feature: MA Experiment 20001910 PARAMETER Experiment Name: At_Drought_Reproduction_P Parameter: Age (day) Value: 37
  misc_feature: MA Experiment 20001910 PARAMETER Experiment Name: At_Drought_Reproduction_P Parameter: Organism Value: A. thaliana
  misc_feature: MA Experiment 20001910 PARAMETER Experiment Name: At_Drought_Reproduction_P Parameter: Plant Line Value: WS
  misc_feature: MA Experiment 20001910 PARAMETER Experiment Name: At_Drought_Reproduction_P Parameter: Timepoint (day) Value: 7
  misc_feature: MA Experiment 20001910 PARAMETER Experiment Name: At_Drought_Reproduction_P Parameter: Tissue Value: Flowers
  misc_feature: MA Experiment 20001910 PARAMETER Experiment Name: At_Drought_Reproduction_P Parameter: Treatment Value: Drought vs. No Drought
atggccagagccaattttgagccttacggtcgtgacttccctggtggtcgcgccaccggacgcttttgtaacggccgtctctcctccgatttcacttccgaggcttatggccttaaaccgaccgtgccagcctacctagatccgtcctataatatatctgattttgctaccggagtttgttttgcctccgccggcaccggttatgataattccacagccgatgtgcttggcgtgattccgttatggaaagaggtcgagtacttcaaggaataccaaagcaacctttccgcctatctcggccatcggagagctgccaaaatcatcagagaatctctgtacatagtaagcataggcaccaacgatttccttgagaactactacacattaccggacaggagatctcaattcagcatcagtcagtaccaagacttcctggtcgagattgctgaggtgttcttaaaggacatttacagacttggagctcggaaaatgtctttcactggaatctcacctatggggtgtctaccgctggagagagtgacaaatcttgacgacccttttagctgtgctcggagttataatgatttggctgtagatttcaatgggagattgagaagattggtgacaaaactgaatagagagcttactggaataaagatttatttcgctaatccttacgatatcatgtgggatattgttaccaaacctaatctttacggtctagagatatcaagttctgcctgttgcggtactggattgttcgagatgggatttctttgcggccaggacaatccgttaacttgcagtgatgccaataagttcgttttctgggacgcatttcacccgaccgagaggactaatcagattgtgtctgatcacttcttcaagcatctcaagaatctgtttcattga

SEQ ID NO: 72158 - protein, 303 aa, Arabidopsis thaliana; identical to SEQ ID NO: 43214
  peptide (1)..(303): Ceres Seq. ID no. 4919865
  misc_feature (1)..(294): Pfam Name: GDSL-like Lipase/Acylhydrolase Pfam Description: GDSL-like Lipase/Acylhydrolase
  misc_feature (1)..(303): Homolog of NCBI NO: 15224201 NR Description: putative APG isolog protein; protein id:
  misc_feature (1)..(292): Homolog of NCBI NO: 21593518 NR Description: putative GDSL-motif lipase/hydrolase [Arabidopsis
  misc_feature (1)..(292): Homolog of NCBI NO: 15228157 NR Description: putative GDSL-motif lipase/hydrolase; protein id:
  misc_feature (3)..(297): Homolog of NCBI NO: 18416824 NR Description: putative APG protein; protein id: At4g26790.1, by cDNA: 2574., supported by cDNA: gi_18252232 [Arabidopsis >gi|18252233|gb|AAL61949.1| putative APG protein [Arabidopsis
  misc_feature (3)..(297): Homolog of NCBI NO: 7485330 NR Description: hypothetical protein F10M23.130 - Arabidopsis >gi|4455202|emb|CAB36525.1| putative APG protein [Arabidopsis >gi|7269531|emb|CAB79534.1| putative APG protein [Arabidopsis
  misc_feature (1)..(302): Homolog of NCBI NO: 18406327 NR Description: proline-rich protein, putative; protein id:
  misc_feature (3)..(303): Homolog of NCBI NO: 18390708 NR Description: expressed protein; protein id: At1g06990.1,
  misc_feature (3)..(303): Homolog of NCBI NO: 25336267 NR Description: hypothetical protein [imported] - Arabidopsis
  misc_feature (3)..(303): Homolog of NCBI NO: 21554186 NR Description: Contains similarity to proline-rich protein APG
  misc_feature (1)..(302): Homolog of NCBI NO: 15217977 NR Description: proline-rich protein, putative; protein id:

SEQ ID NO: 72159 - DNA, 600 bp, Arabidopsis thaliana
  misc_feature (1)..(600): Ceres Seq. ID no. 4920385
  misc_feature: MA Experiment ID: 20000182 Result: Up-regulated in Transcription
  misc_feature: MA Experiment 20000182 PARAMETER Experiment Name: At_2mM_SA_P Parameter: Age (day) Value: 14
  misc_feature: MA Experiment 20000182 PARAMETER Experiment Name: At_2mM_SA_P Parameter: Organism Value: A. thaliana
  misc_feature: MA Experiment 20000182 PARAMETER Experiment Name: At_2mM_SA_P Parameter: Plant Line Value: WS
  misc_feature: MA Experiment 20000182 PARAMETER Experiment Name: At_2mM_SA_P Parameter: Timepoint (hr) Value: 6
  misc_feature: MA Experiment 20000182 PARAMETER Experiment Name: At_2mM_SA_P Parameter: Tissue Value: Aerial
  misc_feature: MA Experiment 20000182 PARAMETER Experiment Name: At_2mM_SA_P Parameter: Treatment Value: 2mM SA vs. No Treatment
  misc_feature: MA Experiment ID: 20000234 Result: Down-regulated in Transcription
  misc_feature: MA Experiment 20000234 PARAMETER Experiment Name: At_Siliques_P Parameter: Age (day) Value: 21
  misc_feature: MA Experiment 20000234 PARAMETER Experiment Name: At_Siliques_P Parameter: Organism Value: A. thaliana
  misc_feature: MA Experiment 20000234 PARAMETER Experiment Name: At_Siliques_P Parameter: Plant Line Value: WS
  misc_feature: MA Experiment 20000234 PARAMETER Experiment Name: At_Siliques_P Parameter: Tissue Value: Less Than 5mm Siliques vs. Whole Plant
  misc_feature: MA Experiment ID: 20000437 Result: Up-regulated in Transcription
  misc_feature: MA Experiment 20000437 PARAMETER Experiment Name: At_Drought_P Parameter: Age (day) Value: 8
  misc_feature: MA Experiment 20000437 PARAMETER Experiment Name: At_Drought_P Parameter: Organism Value: A. thaliana
  misc_feature: MA Experiment 20000437 PARAMETER Experiment Name: At_Drought_P Parameter: Plant Line Value: WS
  misc_feature: MA Experiment 20000437 PARAMETER Experiment Name: At_Drought_P Parameter: Timepoint (hr) Value: 24
  misc_feature: MA Experiment 20000437 PARAMETER Experiment Name: At_Drought_P Parameter: Tissue Value: Whole Plant
  misc_feature: MA Experiment 20000437 PARAMETER Experiment Name: At_Drought_P Parameter: Treatment Value: Drought vs. No Drought
  misc_feature: MA Experiment ID: 20000438 Result: Down-regulated in Transcription
  misc_feature: MA Experiment 20000438 PARAMETER Experiment Name: At_Shoots__P Parameter: Age (day) Value: 14
  misc_feature: MA Experiment 20000438 PARAMETER Experiment Name: At_Shoots__P Parameter: Tissue Value: Shoots vs. Whole Plant
  misc_feature: MA Experiment ID: 20000709 Result: Up-regulated in Transcription
  misc_feature: MA Experiment 20000709 PARAMETER Experiment Name: At_15mM_NH4NO3_L-to-H_P Parameter: Age (hr) Value: 14
  misc_feature: MA Experiment 20000709 PARAMETER Experiment Name: At_15mM_NH4NO3_L-to-H_P Parameter: Organism Value: A. thaliana
  misc_feature: MA Experiment 20000709 PARAMETER Experiment Name: At_15mM_NH4NO3_L-to-H_P Parameter: Plant Line Value: WS
  misc_feature: MA Experiment 20000709 PARAMETER Experiment Name: At_15mM_NH4NO3_L-to-H_P Parameter: Timepoint (hr) Value: 4
  misc_feature: MA Experiment 20000709 PARAMETER Experiment Name: At_15mM_NH4NO3_L-to-H_P Parameter: Tissue Value: Aerial
  misc_feature: MA Experiment 20000709 PARAMETER Experiment Name: At_15mM_NH4NO3_L-to-H_P Parameter: Treatment Value: 15mM NH4NO3 vs. 30mM Mannitol
  misc_feature: MA Experiment ID: 20001905 Result: Up-regulated in Transcription
  misc_feature: MA Experiment 20001905 PARAMETER Experiment Name: At_Drought_Reproduction_P Parameter: Age (day) Value: 40
  misc_feature: MA Experiment 20001905 PARAMETER Experiment Name: At_Drought_Reproduction_P Parameter: Organism Value: A. thaliana
  misc_feature: MA Experiment 20001905 PARAMETER Experiment Name: At_Drought_Reproduction_P Parameter: Plant Line Value: WS
  misc_feature: MA Experiment 20001905 PARAMETER Experiment Name: At_Drought_Reproduction_P Parameter: Timepoint (day) Value: 10
  misc_feature: MA Experiment 20001905 PARAMETER Experiment Name: At_Drought_Reproduction_P Parameter: Tissue Value: Rosettes
  misc_feature: MA Experiment 20001905 PARAMETER Experiment Name: At_Drought_Reproduction_P Parameter: Treatment Value: Drought vs. No Drought
atggaaacggatgatcacaacggtgatgttttagcgccgccgtcgaatttctcgatggttgaagatggaatttatcgatctgggtttcctcgacctgagaatttcagtttccttaaaaccctaaatcttcgttccatcatttatctgtgtcctgaaccatacccagaggagaatctcaagtttcttgaggctaacaacattaagctttaccaatttggaatcgaaggcaaaacggatcctccaactcctatgccaaaagatacagttttggatgctctcaaagttttagttgatgtgagaaaccatccaattctcatacattgcaaacgcgggaagcataggacaggttgtctagtgggatgcttaagaaaagttcagagctggtgtttatcatcggtgctcgaggagtaccagaagaacgcgggtttaaaatggagacaaagggacttgaattttatagaggcatttgatatagtgagcttgagacagtgtctcttgagcatcatgtatcagtatcacggttatggcttcaagaggagaaggttggcatatgaagaagagaatgtcaagacaccaaaaccgcaggctgctagagtttaa

SEQ ID NO: 72160 - protein, 199 aa, Arabidopsis thaliana; identical to SEQ ID NO: 71634
  peptide (1)..(199): Ceres Seq. ID no. 4920386
  misc_feature (11)..(174): Pfam Name: Tyrosine phosphatase family Pfam Description: Tyrosine phosphatase family
  misc_feature (1)..(199): Homolog of NCBI NO: 15232985 NR Description: unknown protein; protein id: At3g02800.1 thaliana] >gi|6728982|gb|AAF26980.1|AC018363_25 unknown protein
  misc_feature (4)..(198): Homolog of NCBI NO: 21553927 NR Description: unknown [Arabidopsis thaliana]
  misc_feature (4)..(198): Homolog of NCBI NO: 15237359 NR Description: putative protein; protein id: At5g16480.1, by cDNA: 18232. [Arabidopsis thaliana] contains similarity to tyrosine phosphatase~gene_id:MQK4.21
  misc_feature (11)..(167): Homolog of NCBI NO: 15220383 NR Description: unkown protein; protein id: At1g05000.1
  misc_feature (11)..(167): Homolog of NCBI NO: 15225761 NR Description: unknown protein; protein id: At2g32960.1
  misc_feature (70)..(167): Homolog of NCBI NO: 30102538 NR Description: At2g32960 [Arabidopsis thaliana]
  misc_feature (11)..(83): Homolog of NCBI NO: 30102538 NR Description: At2g32960 [Arabidopsis thaliana]
  misc_feature (8)..(167): Homolog of NCBI NO: 18412419 NR Description: putative protein; protein id: At4g03960.1, by cDNA: 26983., supported by cDNA: gi_15810021, supported by gi_17981660 [Arabidopsis thaliana] >gi|15810022|gb|AAL06938.1|
  misc_feature (1)..(157): Homolog of NCBI NO: 6324296 NR Description: Synthetic interaction with Whi2; Siw14p cerevisiae] >gi|1730719|sp|P53965|YND2_YEAST HYPOTHETICAL 32.8 KD
  misc_feature (1)..(161): Homolog of NCBI NO: 15027525 NR Description: conserved hypothetical protein [Leishmania major]

SEQ ID NO: 72161 - protein, 181 aa, Arabidopsis thaliana; identical to SEQ ID NO: 71635
  peptide (1)..(181): Ceres Seq. ID no. 4920387
  misc_feature (1)..(156): Pfam Name: Tyrosine phosphatase family Pfam Description: Tyrosine phosphatase family
  misc_feature (1)..(181): Homolog of NCBI NO: 15232985 NR Description: unknown protein; protein id: At3g02800.1 thaliana] >gi|6728982|gb|AAF26980.1|AC018363_25 unknown protein
  misc_feature (1)..(180): Homolog of NCBI NO: 21553927 NR Description: unknown [Arabidopsis thaliana]
  misc_feature (1)..(180): Homolog of NCBI NO: 15237359 NR Description: putative protein; protein id: At5g16480.1, by cDNA: 18232. [Arabidopsis thaliana] contains similarity to tyrosine phosphatase~gene_id:MQK4.21
  misc_feature (1)..(149): Homolog of NCBI NO: 15220383 NR Description: unkown protein; protein id: At1g05000.1
  misc_feature (1)..(149): Homolog of NCBI NO: 15225761 NR Description: unknown protein; protein id: At2g32960.1
  misc_feature (52)..(149): Homolog of NCBI NO: 30102538 NR Description: At2g32960 [Arabidopsis thaliana]
  misc_feature (1)..(65): Homolog of NCBI NO: 30102538 NR Description: At2g32960 [Arabidopsis thaliana]
  misc_feature (1)..(149): Homolog of NCBI NO: 18412419 NR Description: putative protein; protein id: At4g03960.1, by cDNA: 26983., supported by cDNA: gi_15810021, supported by gi_17981660 [Arabidopsis thaliana] >gi|15810022|gb|AAL06938.1|
  misc_feature (1)..(139): Homolog of NCBI NO: 6324296 NR Description: Synthetic interaction with Whi2; Siw14p cerevisiae] >gi|1730719|sp|P53965|YND2_YEAST HYPOTHETICAL 32.8 KD
  misc_feature (1)..(143): Homolog of NCBI NO: 15027525 NR Description: conserved hypothetical protein [Leishmania major]

SEQ ID NO: 72162 - protein, 116 aa, Arabidopsis thaliana
  peptide (1)..(116): Ceres Seq. ID no. 4920388
  misc_feature (1)..(91): Pfam Name: Tyrosine phosphatase family Pfam Description: Tyrosine phosphatase family
  misc_feature (1)..(116): Homolog of NCBI NO: 15232985 NR Description: unknown protein; protein id: At3g02800.1 thaliana] >gi|6728982|gb|AAF26980.1|AC018363_25 unknown protein
  misc_feature (1)..(115): Homolog of NCBI NO: 21553927 NR Description: unknown [Arabidopsis thaliana]
  misc_feature (1)..(115): Homolog of NCBI NO: 15237359 NR Description: putative protein; protein id: At5g16480.1, by cDNA: 18232. [Arabidopsis thaliana] contains similarity to tyrosine phosphatase~gene_id:MQK4.21
  misc_feature (1)..(84): Homolog of NCBI NO: 15220383 NR Description: unkown protein; protein id: At1g05000.1
  misc_feature (1)..(84): Homolog of NCBI NO: 15225761 NR Description: unknown protein; protein id: At2g32960.1
  misc_feature (1)..(84): Homolog of NCBI NO: 30102538 NR Description: At2g32960 [Arabidopsis thaliana]
  misc_feature (1)..(84): Homolog of NCBI NO: 18412419 NR Description: putative protein; protein id: At4g03960.1, by cDNA: 26983., supported by cDNA: gi_15810021, supported by gi_17981660 [Arabidopsis thaliana] >gi|15810022|gb|AAL06938.1|
  misc_feature (1)..(74): Homolog of NCBI NO: 6324296 NR Description: Synthetic interaction with Whi2; Siw14p cerevisiae] >gi|1730719|sp|P53965|YND2_YEAST HYPOTHETICAL 32.8 KD
  misc_feature (1)..(78): Homolog of NCBI NO: 15027525 NR Description: conserved hypothetical protein [Leishmania major]
  misc_feature (1)..(91): Homolog of NCBI NO: 7487406 NR Description: hypothetical protein T24M8.4 - Arabidopsis
MPKDTVLDALKVLVDVRNHPILIHCKRGKHRTGCLVGCLRKVQSWCLSSVLEEYQKNAGLKWRQRDLNFIEAFDIVSLRQCLLSIMYQYHGYGFKRRRLAYEEENVKTPKPQAARV

SEQ ID NO: 72163 - DNA, 1566 bp, Arabidopsis thaliana
  misc_feature (1)..(1566): Ceres Seq. ID no. 4920469
  misc_feature: MA Experiment ID: 20001451 Result: Down-regulated in Transcription
  misc_feature: MA Experiment 20001451 PARAMETER Experiment Name: At_Far-red-induction_P Parameter: Age (day) Value: 7
  misc_feature: MA Experiment 20001451 PARAMETER Experiment Name: At_Far-red-induction_P Parameter: Light Value: Far-red vs. White
  misc_feature: MA Experiment 20001451 PARAMETER Experiment Name: At_Far-red-induction_P Parameter: Organism Value: A. thaliana
  misc_feature: MA Experiment 20001451 PARAMETER Experiment Name: At_Far-red-induction_P Parameter: Plant Line Value: Columbia
  misc_feature: MA Experiment 20001451 PARAMETER Experiment Name: At_Far-red-induction_P Parameter: Timepoint (hr) Value: 24
  misc_feature: MA Experiment 20001451 PARAMETER Experiment Name: At_Far-red-induction_P Parameter: Tissue Value: Whole Plant
atggcggagcagttactgaatcaattcatctccgcagtgatatcaaagtcgagacatttgaatcatttgaagcaagttcagtcctttatgatagtttctggactaagtcattcacatttcctctgttttaagcttcttcgtttttgtacgcttcgtctctgtaatctctcttacgctcgctttatctttgatcgtttctctttccccaatacgcatctttacgctgccgttttaactgcttactcttcttctcttcctcttcatgcttcttcagctttctccttctttcgtctcatggttaatcgttctgttcctcggcctaatcactttatctacccacttgttcttaagtctacaccatatctctcctctgctttttcaactcctttggtgcatacccatttgtttaaatctgggtttcatctctatgtcgttgttcaaactgctcttcttcactcctacgcttcctctgtttctcatataactcttgcaagacaactgttcgacgaaatgtctgagagaaatgttgtttcttggactgctatgctttctgggtatgctaggtctggtgatatctctaatgctgttgctctttttgaagatatgcctgagcgtgatgttccttcctggaatgcgattcttgctgcttgtactcagaatggtctttttcttgaagcggtttctctgtttagaaggatgattaatgagcctagcattcgtcctaatgaggtaactgtagtttgtgtcctctctgcgtgtgctcaaactggtacgcttcagctggctaaagggattcatgcctttgcttaccgtcgtgatctttcttctgatgtgtttgtttcgaattctttagttgacttgtatggaaaatgtggtaacttggaggaagcaagctctgtttttaagatggcatccaagaaaagtttaacagcttggaattctatgatcaattgctttgcactccatggtagaagtgaagaagccatagctgtgtttgaagaaatgatgaagttgaacattaacgatatcaaaccagatcacattactttcatcggtcttctcaatgcgtgtactcatggaggtttggtatcaaaaggccgaggttatttcgatctgatgacaaacagattcggtattgagccaaggattgagcattatggctgtctaatagatcttttaggcagggcaggtcggtttgatgaagctttagaagttatgtccacgatgaagatgaaagcggatgaggctatttggggatcactgcttaatgcttgtaagatacatggccatctggatttggctgaagttgctgtaaaaaacctggttgctttaaatcctaataatggaggttatgtcgctatgatggcaaatttatatggagagatgggtaattgggaagaggcacgtagagctagaaagatgatcaagcaccaaaatgcttataaaccaccaggctggagtcggattgagatcgataacgaggtccatcagttctactctcttgacaaatcacatccggagactgaggagatatacatgatacttgacagtctgatctctttctga

SEQ ID NO: 72164 - protein, 521 aa, Arabidopsis thaliana
  peptide (1)..(521): Ceres Seq. ID no. 4920470
  misc_feature (348)..(382): Pfam Name: PPR repeat Pfam Description: PPR repeat
  misc_feature (1)..(521): Homolog of NCBI NO: 15217517 NR Description: PPR-repeat protein, putative; protein id:
  misc_feature (303)..(521): Homolog of NCBI NO: 26451823 NR Description: unknown protein [Arabidopsis thaliana]
  misc_feature (7)..(520): Homolog of NCBI NO: 15225375 NR Description: unknown protein; protein id: At2g20540.1
  misc_feature (20)..(518): Homolog of NCBI NO: 15241651 NR Description: putative protein; protein id: At5g08510.1 thaliana] >gi|9759345|dbj|BAB10000.1|
  misc_feature (6)..(518): Homolog of NCBI NO: 15241180 NR Description: putative protein; protein id: At5g56310.1 thaliana] >gi|10177829|dbj|BAB11258.1|
  misc_feature (10)..(515): Homolog of NCBI NO: 15235537 NR Description: putative protein; protein id: At4g37380.1
  misc_feature (23)..(511): Homolog of NCBI NO: 15239979 NR Description: selenium-binding protein-like; protein id:
  misc_feature (12)..(518): Homolog of NCBI NO: 9759241 NR Description: gene_id:MNC17.11~pir||T04732~strong similarity to
  misc_feature (12)..(518): Homolog of NCBI NO: 15237835 NR Description: putative protein; protein id: At5g59200.1
  misc_feature (10)..(519): Homolog of NCBI NO: 15241448 NR Description: selenium-binding protein-like; protein id:
MAEQLLNQFISAVISKSRHLNHLKQVQSFMIVSGLSHSHFLCFKLLRFCTLRLCNLSYARFIFDRFSFPNTHLYAAVLTAYSSSLPLHASSAFSFFRLMVNRSVPRPNHFIYPLVLKSTPYLSSAFSTPLVHTHLFKSGFHLYVVVQTALLHSYASSVSHITLARQLFDEMSERNVVSWTAMLSGYARSGDISNAVALFEDMPERDVPSWNAILAACTQNGLFLEAVSLFRRMINEPSIRPNEVTVVCVLSACAQTGTLQLAKGIHAFAYRRDLSSDVFVSNSLVDLYGKCGNLEEASSVFKMASKKSLTAWNSMINCFALHGRSEEAIAVFEEMMKLNINDIKPDHITFIGLLNACTHGGLVSKGRGYFDLMTNRFGIEPRIEHYGCLIDLLGRAGRFDEALEVMSTMKMKADEAIWGSLLNACKIHGHLDLAEVAVKNLVALNPNNGGYVAMMANLYGEMGNWEEARRARKMIKHQNAYKPPGWSRIEIDNEVHQFYSLDKSHPETEEIYMILDSLISF

SEQ ID NO: 72165 - protein, 492 aa, Arabidopsis thaliana
  peptide (1)..(492): Ceres Seq. ID no. 4920471
  misc_feature (319)..(353): Pfam Name: PPR repeat Pfam Description: PPR repeat
  misc_feature (1)..(492): Homolog of NCBI NO: 15217517 NR Description: PPR-repeat protein, putative; protein id:
  misc_feature (274)..(492): Homolog of NCBI NO: 26451823 NR Description: unknown protein [Arabidopsis thaliana]
  misc_feature (1)..(491): Homolog of NCBI NO: 15225375 NR Description: unknown protein; protein id: At2g20540.1
  misc_feature (1)..(489): Homolog of NCBI NO: 15241651 NR Description: putative protein; protein id: At5g08510.1 thaliana] >gi|9759345|dbj|BAB10000.1|
  misc_feature (1)..(489): Homolog of NCBI NO: 15241180 NR Description: putative protein; protein id: At5g56310.1 thaliana] >gi|10177829|dbj|BAB11258.1|
  misc_feature (1)..(486): Homolog of NCBI NO: 15235537 NR Description: putative protein; protein id: At4g37380.1
  misc_feature (1)..(482): Homolog of NCBI NO: 15239979 NR Description: selenium-binding protein-like; protein id:
  misc_feature (1)..(489): Homolog of NCBI NO: 9759241 NR Description: gene_id:MNC17.11~pir||T04732~strong similarity to
  misc_feature (1)..(489): Homolog of NCBI NO: 15237835 NR Description: putative protein; protein id: At5g59200.1
  misc_feature (1)..(490): Homolog of NCBI NO: 15241448 NR Description: selenium-binding protein-like; protein id:
MIVSGLSHSHFLCFKLLRFCTLRLCNLSYARFIFDRFSFPNTHLYAAVLTAYSSSLPLHASSAFSFFRLMVNRSVPRPNHFIYPLVLKSTPYLSSAFSTPLVHTHLFKSGFHLYVVVQTALLHSYASSVSHITLARQLFDEMSERNVVSWTAMLSGYARSGDISNAVALFEDMPERDVPSWNAILAACTQNGLFLEAVSLFRRMINEPSIRPNEVTVVCVLSACAQTGTLQLAKGIHAFAYRRDLSSDVFVSNSLVDLYGKCGNLEEASSVFKMASKKSLTAWNSMINCFALHGRSEEAIAVFEEMMKLNINDIKPDHITFIGLLNACTHGGLVSKGRGYFDLMTNRFGIEPRIEHYGCLIDLLGRAGRFDEALEVMSTMKMKADEAIWGSLLNACKIHGHLDLAEVAVKNLVALNPNNGGYVAMMANLYGEMGNWEEARRARKMIKHQNAYKPPGWSRIEIDNEVHQFYSLDKSHPETEEIYMILDSLISF

SEQ ID NO: 72166 - protein, 423 aa, Arabidopsis thaliana
  peptide (1)..(423): Ceres Seq. ID no. 4920472
  misc_feature (250)..(284): Pfam Name: PPR repeat Pfam Description: PPR repeat
  misc_feature (1)..(423): Homolog of NCBI NO: 15217517 NR Description: PPR-repeat protein, putative; protein id:
  misc_feature (205)..(423): Homolog of NCBI NO: 26451823 NR Description: unknown protein [Arabidopsis thaliana]
  misc_feature (1)..(422): Homolog of NCBI NO: 15225375 NR Description: unknown protein; protein id: At2g20540.1
  misc_feature (1)..(420): Homolog of NCBI NO: 15241651 NR Description: putative protein; protein id: At5g08510.1 thaliana] >gi|9759345|dbj|BAB10000.1|
  misc_feature (1)..(420): Homolog of NCBI NO: 15241180 NR Description: putative protein; protein id: At5g56310.1 thaliana] >gi|10177829|dbj|BAB11258.1|
  misc_feature (1)..(417): Homolog of NCBI NO: 15235537 NR Description: putative protein; protein id: At4g37380.1
  misc_feature (1)..(413): Homolog of NCBI NO: 15239979 NR Description: selenium-binding protein-like; protein id:
  misc_feature (1)..(420): Homolog of NCBI NO: 9759241 NR Description: gene_id:MNC17.11~pir||T04732~strong similarity to
  misc_feature (1)..(420): Homolog of NCBI NO: 15237835 NR Description: putative protein; protein id: At5g59200.1
  misc_feature (1)..(421): Homolog of NCBI NO: 15241448 NR Description: selenium-binding protein-like; protein id:
MVNRSVPRPNHFIYPLVLKSTPYLSSAFSTPLVHTHLFKSGFHLYVVVQTALLHSYASSVSHITLARQLFDEMSERNVVSWTAMLSGYARSGDISNAVALFEDMPERDVPSWNAILAACTQNGLFLEAVSLFRRMINEPSIRPNEVTVVCVLSACAQTGTLQLAKGIHAFAYRRDLSSDVFVSNSLVDLYGKCGNLEEASSVFKMASKKSLTAWNSMINCFALHGRSEEAIAVFEEMMKLNINDIKPDHITFIGLLNACTHGGLVSKGRGYFDLMTNRFGIEPRIEHYGCLIDLLGRAGRFDEALEVMSTMKMKADEAIWGSLLNACKIHGHLDLAEVAVKNLVALNPNNGGYVAMMANLYGEMGNWEEARRARKMIKHQNAYKPPGWSRIEIDNEVHQFYSLDKSHPETEEIYMILDSLISF

SEQ ID NO: 72167 - DNA, 1977 bp, Arabidopsis thaliana
  misc_feature (1)..(1977): Ceres Seq. ID no. 4920641
  misc_feature: MA Experiment ID: 20000180 Result: Up-regulated in Transcription
  misc_feature: MA Experiment 20000180 PARAMETER Experiment Name: At_Germinating_Seeds_P Parameter: Age (hr) Value: 24 vs. 0
  misc_feature: MA Experiment 20000180 PARAMETER Experiment Name: At_Germinating_Seeds_P Parameter: Tissue Value: Germinating Seeds
  misc_feature: MA Experiment ID: 20000234 Result: Up-regulated in Transcription
  misc_feature: MA Experiment 20000234 PARAMETER Experiment Name: At_Siliques_P Parameter: Age (day) Value: 21
  misc_feature: MA Experiment 20000234 PARAMETER Experiment Name: At_Siliques_P Parameter: Organism Value: A. thaliana
  misc_feature: MA Experiment 20000234 PARAMETER Experiment Name: At_Siliques_P Parameter: Plant Line Value: WS
  misc_feature: MA Experiment 20000234 PARAMETER Experiment Name: At_Siliques_P Parameter: Tissue Value: Less Than 5mm Siliques vs. Whole Plant
  misc_feature: MA Experiment ID: 20000264 Result: Up-regulated in Transcription
  misc_feature: MA Experiment 20000264 PARAMETER Experiment Name: At_Open_Flower_P Parameter: Age (day) Value: 21
  misc_feature: MA Experiment 20000264 PARAMETER Experiment Name: At_Open_Flower_P Parameter: Plant Line Value: WS
  misc_feature: MA Experiment 20000264 PARAMETER Experiment Name: At_Open_Flower_P Parameter: Tissue Value: Open Flower vs. Whole Plant
  misc_feature: MA Experiment ID: 20000265 Result: Up-regulated in Transcription
  misc_feature: MA Experiment 20000265 PARAMETER Experiment Name: At_Open_Flower_P Parameter: Age (day) Value: 21
  misc_feature: MA Experiment 20000265 PARAMETER Experiment Name: At_Open_Flower_P Parameter: Plant Line Value: WS
  misc_feature: MA Experiment 20000265 PARAMETER Experiment Name: At_Open_Flower_P Parameter: Tissue Value: Closed Flower vs. Whole Plant
  misc_feature: MA Experiment ID: 20000286 Result: Up-regulated in Transcription
  misc_feature: MA Experiment 20000286 PARAMETER Experiment Name: At_Open_Flower_P Parameter: Age (day) Value: 21
  misc_feature: MA Experiment 20000286 PARAMETER Experiment Name: At_Open_Flower_P Parameter: Plant Line Value: WS
  misc_feature: MA Experiment 20000286 PARAMETER Experiment Name: At_Open_Flower_P Parameter: Tissue Value: Half Open vs. Whole Plant
  misc_feature: MA Experiment ID: 20000437 Result: Down-regulated in Transcription
  misc_feature: MA Experiment 20000437 PARAMETER Experiment Name: At_Drought_P Parameter: Age (day) Value: 8
  misc_feature: MA Experiment 20000437 PARAMETER Experiment Name: At_Drought_P Parameter: Organism Value: A. thaliana
  misc_feature: MA Experiment 20000437 PARAMETER Experiment Name: At_Drought_P Parameter: Plant Line Value: WS
  misc_feature: MA Experiment 20000437 PARAMETER Experiment Name: At_Drought_P Parameter: Timepoint (hr) Value: 24
  misc_feature: MA Experiment 20000437 PARAMETER Experiment Name: At_Drought_P Parameter: Tissue Value: Whole Plant
  misc_feature: MA Experiment 20000437 PARAMETER Experiment Name: At_Drought_P Parameter: Treatment Value: Drought vs. No Drought
  misc_feature: MA Experiment ID: 20000495 Result: Up-regulated in Transcription
  misc_feature: MA Experiment 20000495 PARAMETER Experiment Name: At_Guard_Cells_P Parameter: Harvest Date Value: 8/2/2002
  misc_feature: MA Experiment 20000495 PARAMETER Experiment Name: At_Guard_Cells_P Parameter: Organism Value: A. thaliana
  misc_feature: MA Experiment 20000495 PARAMETER Experiment Name: At_Guard_Cells_P Parameter: Tissue Value: Guard Cells vs. Leaves
atgttggcaggttgttcgagttcatcattgttgtcgcctactcgaagattgaggagtgaagcagtagcagcaacatcagcaacagtatcagcgcattttcccatgaacacacagagattggacttaccatgcagtagtagcttctctcgcaaggaaactccttctagcagaccacttggaagaagcatctctcttgacaacagcaacaacaacaacaacaaaccgatcgagcgcaagacgaagaccagtggttgttcgcttaaacagaacataaagcttccacctttggcaacaacaagaggaaatggagaagggttttcttggaacaacgacaacaacaacagagggaagagtttgaagagattagctgaggaggacgagtcttgtttgagcagagcgaagaggacaaaatgcgaaaacgaaggtggtttctggtttgagcatttcactggccaggattcttcttcaccagcattacctttttctttgacttgttcaggtgatgatgaggaaaaggtttgctttgtgccaagtgaagtcatttctcagcctttaccaaactgggttgattcggtgattacggagctagctggtataggcgataaggacgttgagagtagccttcctgcagcagttaaggaagcatctggaggatcatctacaagcgcatcatccgagagtcgtagcttaagccatagagtaccagaacctacaaatggctcaaggaatccgtactcacaccgcggtgcaacagaggaaaggaccaccggaaacatcaacaacaacaacaacaggaacgatttgcagagggatttcgagcttgtcaatttgcttacgggatgcttagacgcgatcagatcaagaaacatagcagcgattaaccatttcattgcaagaaccggtgatcttgcttctcctagaggaagaacaccaatgactcgcctcatagcttactacattgaagctttggctctaagagtggcgcgtatgtggcctcacatcttccacatcgcaccccctcgtgaattcgatagaactgtcgaagatgaatcaggaaatgcattgaggttcttgaatcaagtaaccccaattccaaagttcattcatttcacagccaacgagatgttactcagagcatttgaagggaaagagagagttcacattattgacttcgacatcaagcaaggtttacagtggcctagcttcttccaaagcttagcttcgagaataaatccaccacaccatgtacgaatcactgggatcggagaatcgaaacttgagctaaacgaaaccggagatcgcctccacggatttgcagaggcgatgaatcttcaattcgagtttcatcctgtagttgatagactcgaagacgttagactatggatgcttcacgtcaaagaaggtgaatcagtagctgtaaactgtgtcatgcagatgcacaagacactctacgatggaaccggagcagcaattagggattttttgggtttaatcagaagcacaaacccaatagctctcgttcttgcggagcaagaagcagaacacaactcagagcaacttgagacacgagtttgtaactcgctaaagtactattcagctatgtttgatgcaattcacacgaatcttgctacagatagcttaatgagagtcaaagttgaggagatgttgtttgggagagagatcaggaacattgttgcgtgtgaaggaagtcatagacaagagaggcatgtgggttttcgtcattggaggaggatgttggagcagttagggtttcggagtcttggagtctcggagagagaggttttgcagagtaagatgttgcttaggatgtacggatctgataatgaagggtttttcaatgtggagaggagcgatgaagacaacggcggtgaaggcggacgcggcggtggagttactttacggtggtcggagcagccactttatacgatctcggcttggactaccggagggaattaa

SEQ ID NO: 72168 - protein, 658 aa, Arabidopsis thaliana; identical to SEQ ID NO: 71724
  peptide (1)..(658): Ceres Seq. ID no. 4920642
  misc_feature (248)..(550): Pfam Name: GRAS family transcription factor Pfam Description: GRAS family transcription factor
  misc_feature (273)..(658): Homolog of NCBI NO: 34898036 NR Description: Similar to SCARECROW (U62798) [Oryza sativa
  misc_feature (178)..(653): Homolog of NCBI NO: 15529230 NR Description: At2g01570/F2I9.19 [Arabidopsis thaliana]
  misc_feature (171)..(658): Homolog of NCBI NO: 2569938 NR Description: GAI [Arabidopsis thaliana]
  misc_feature (171)..(658): Homolog of NCBI NO: 15223951 NR Description: signal response protein (GAI); protein id: supported by cDNA: gi_16648833 [Arabidopsis thaliana]
  misc_feature (171)..(658): Homolog of NCBI NO: 2339980 NR Description: RGA2 protein [Arabidopsis thaliana]
  misc_feature (218)..(653): Homolog of NCBI NO: 4160441 NR Description: lateral suppressor protein [Lycopersicon >gi|13620224|emb|CAC36399.1| lateral suppressor [Lycopersicon
  misc_feature (178)..(653): Homolog of NCBI NO: 2569940 NR Description: GRS protein [Arabidopsis thaliana]
  misc_feature (178)..(653): Homolog of NCBI NO: 15226311 NR Description: putative RGA1, giberellin repsonse modulation protein id: At2g01570.1, supported by cDNA: gi_15529229, by cDNA: gi_15809785 [Arabidopsis thaliana]
  misc_feature (209)..(629): Homolog of NCBI NO: 15232451 NR Description: SCARECROW1; protein id: At3g54220.1, supported by gi_19423877, supported by cDNA: gi_21281200 [Arabidopsis
  misc_feature (178)..(653): Homolog of NCBI NO: 2339978 NR Description: RGA1 protein [Arabidopsis thaliana]

SEQ ID NO: 72169 - protein, 624 aa, Arabidopsis thaliana; identical to SEQ ID NO: 71725
  peptide (1)..(624): Ceres Seq. ID no. 4920643
  misc_feature (214)..(516): Pfam Name: GRAS family transcription factor Pfam Description: GRAS family transcription factor
  misc_feature (239)..(624): Homolog of NCBI NO: 34898036 NR Description: Similar to SCARECROW (U62798) [Oryza sativa
  misc_feature (144)..(619): Homolog of NCBI NO: 15529230 NR Description: At2g01570/F2I9.19 [Arabidopsis thaliana]
  misc_feature (137)..(624): Homolog of NCBI NO: 2569938 NR Description: GAI [Arabidopsis thaliana]
  misc_feature (137)..(624): Homolog of NCBI NO: 15223951 NR Description: signal response protein (GAI); protein id: supported by cDNA: gi_16648833 [Arabidopsis thaliana]
  misc_feature (137)..(624): Homolog of NCBI NO: 2339980 NR Description: RGA2 protein [Arabidopsis thaliana]
  misc_feature (184)..(619): Homolog of NCBI NO: 4160441 NR Description: lateral suppressor protein [Lycopersicon >gi|13620224|emb|CAC36399.1| lateral suppressor [Lycopersicon
  misc_feature (144)..(619): Homolog of NCBI NO: 2569940 NR Description: GRS protein [Arabidopsis thaliana]
  misc_feature (144)..(619): Homolog of NCBI NO: 15226311 NR Description: putative RGA1, giberellin repsonse modulation protein id: At2g01570.1, supported by cDNA: gi_15529229, by cDNA: gi_15809785 [Arabidopsis thaliana]
  misc_feature (175)..(595): Homolog of NCBI NO: 15232451 NR Description: SCARECROW1; protein id: At3g54220.1, supported by gi_19423877, supported by cDNA: gi_21281200 [Arabidopsis
  misc_feature (144)..(619): Homolog of NCBI NO: 2339978 NR Description: RGA1 protein [Arabidopsis thaliana]

SEQ ID NO: 72170 - protein, 347 aa, Arabidopsis thaliana
  peptide (1)..(347): Ceres Seq. ID no. 4920644
  misc_feature (1)..(239): Pfam Name: GRAS family transcription factor Pfam Description: GRAS family transcription factor
  misc_feature (1)..(347): Homolog of NCBI NO: 34898036 NR Description: Similar to SCARECROW (U62798) [Oryza sativa
  misc_feature (1)..(342): Homolog of NCBI NO: 15529230 NR Description: At2g01570/F2I9.19 [Arabidopsis thaliana]
  misc_feature (1)..(347): Homolog of NCBI NO: 2569938 NR Description: GAI [Arabidopsis thaliana]
  misc_feature (1)..(347): Homolog of NCBI NO: 15223951 NR Description: signal response protein (GAI); protein id: supported by cDNA: gi_16648833 [Arabidopsis thaliana]
  misc_feature (1)..(347): Homolog of NCBI NO: 2339980 NR Description: RGA2 protein [Arabidopsis thaliana]
  misc_feature (1)..(342): Homolog of NCBI NO: 4160441 NR Description: lateral suppressor protein [Lycopersicon >gi|13620224|emb|CAC36399.1| lateral suppressor [Lycopersicon
  misc_feature (1)..(342): Homolog of NCBI NO: 2569940 NR Description: GRS protein [Arabidopsis thaliana]
  misc_feature (1)..(342): Homolog of NCBI NO: 15226311 NR Description: putative RGA1, giberellin repsonse modulation protein id: At2g01570.1, supported by cDNA: gi_15529229, by cDNA: gi_15809785 [Arabidopsis thaliana]
  misc_feature (1)..(318): Homolog of NCBI NO: 15232451 NR Description: SCARECROW1; protein id: At3g54220.1, supported by gi_19423877, supported by cDNA: gi_21281200 [Arabidopsis
  misc_feature (1)..(342): Homolog of NCBI NO: 2339978 NR Description: RGA1 protein [Arabidopsis thaliana]
MTRLIAYYIEALALRVARMWPHIFHIAPPREFDRTVEDESGNALRFLNQVTPIPKFIHFTANEMLLRAFEGKERVHIIDFDIKQGLQWPSFFQSLASRINPPHHVRITGIGESKLELNETGDRLHGFAEAMNLQFEFHPVVDRLEDVRLWMLHVKEGESVAVNCVMQMHKTLYDGTGAAIRDFLGLIRSTNPIALVLAEQEAEHNSEQLETRVCNSLKYYSAMFDAIHTNLATDSLMRVKVEEMLFGREIRNIVACEGSHRQERHVGFRHWRRMLEQLGFRSLGVSEREVLQSKMLLRMYGSDNEGFFNVERSDEDNGGEGGRGGGVTLRWSEQPLYTISAWTTGGN

SEQ ID NO: 72171 - DNA, 1368 bp, Arabidopsis thaliana
  misc_feature (1)..(1368): Ceres Seq. ID no. 4920703
  misc_feature: MA Experiment ID: 20000185 Result: Up-regulated in Transcription
  misc_feature: MA Experiment 20000185 PARAMETER Experiment Name: At_Roots__P Parameter: Age (day) Value: 7 vs. 21
  misc_feature: MA Experiment 20000185 PARAMETER Experiment Name: At_Roots__P Parameter: Organism Value: A. thaliana
  misc_feature: MA Experiment 20000185 PARAMETER Experiment Name: At_Roots__P Parameter: Tissue Value: Roots vs. Whole Plant
atggcgggaatcccagatcatatccaagaccaacatcttgtggaggaggatcaaccctttgatctggaagattggcttccaatcacagcatcaaggaatgccaattggtattattcagctttccacaacgtcactgccattgttggtgctggcgttctcggtcttccttacgccatgtcagagcttggatggggacctggggttgtggtgttgatcctgtcatgggtgatcacgttatacaccctctggcaaatgattgagatgcatgagatgtttgaagggcaacggttcgataggtaccatgagctgggtcaggcagcctttggtaaaaagcttggtttgtacatcatcgtgcccctacaactacttgtcgagatcagtgtgtgcatagtctatatggtcactggaggtaaatccctgaagaatgtacatgaccttgctttgggagatggtgacaagtgcacaaagcttagaattcaacacttcattttgatctttgcctcttcacagttcgtgctctcccttcttaagaacttcaactccatttctggtgtctccttggtagctgctgtcatgtctgtcagctattctacaattgcttgggtagcctcgctgaggaagggtgccaccaccgggagtgtagagtacggctatagaaaaagaacaacctcagtgccattagccttcttaagtgcactgggtgaaatggcttttgcgtacgcaggtcataacgttgttttggaaattcaagcaacgatcccatcaacaccagagaacccatcaaaacgacccatgtggaagggagcggttgtagcctatatcattgtagctttctgctacttccctgtggcacttgtaggtttcaagacctttggaaacagtgttgaagagagcatcctcgaatcactaacaaaaccaacggcacttgtcattgtggccaacatgtttgtggtcatacatctcttgggaagctaccaggtgtatgcgatgcccgtgtttgacatgatcgaatctgtaatgataaggatatggcacttcagtccaacaagagttctacggtttaccatccgatggacttttgtggccgccacgatgggaatagcggtcggtttaccgtattacagcgcattgctgtcattttttgggggatttgtgttcgccccgaccacatactttatcccatgcatcatgtggctgatcctaaagaaaccaaagagatttagtctctcatggtgtatgaactggttttgcatcatttttgggcttgtgctgatgatcatagcacctattgggggactggccaaactaatctataatattcaaaagggcactctacctaattcaagatgcaacttacctaaacactga

SEQ ID NO: 72172 - protein, 455 aa, Arabidopsis thaliana
  peptide (1)..(455): Ceres Seq. ID no. 4920704
  misc_feature (1)..(455): Homolog of NCBI NO: 6091720 NR Description: putative amino acid permease [Arabidopsis
  misc_feature (16)..(455): Homolog of NCBI NO: 15232176 NR Description: putative amino acid permease; protein id: [Arabidopsis thaliana] >gi|6016733|gb|AAF01559.1|AC009325_29
  misc_feature (1)..(20): Homolog of NCBI NO: 15232176 NR Description: putative amino acid permease; protein id: [Arabidopsis thaliana] >gi|6016733|gb|AAF01559.1|AC009325_29
  misc_feature (1)..(450): Homolog of NCBI NO: 15219896 NR Description: lysine and histidine specific transporter,
  misc_feature (16)..(415): Homolog of NCBI NO: 2443875 NR Description: amino acid permease [Arabidopsis thaliana]
  misc_feature (6)..(437): Homolog of NCBI NO: 30693663 NR Description: lysine and histidine specific transporter, [Arabidopsis thaliana] >gi|14194151|gb|AAK56270.1|AF367281_1 [Arabidopsis thaliana] >gi|22137070|gb|AAM91380.1|
  misc_feature (6)..(437): Homolog of NCBI NO: 30693666 NR Description: lysine and histidine specific transporter,
  misc_feature (5)..(437): Homolog of NCBI NO: 22330117 NR Description: lysine and histidine specific transporter,
  misc_feature (8)..(437): Homolog of NCBI NO: 12597815 NR Description: lysine and histidine specific transporter,
  misc_feature (22)..(437): Homolog of NCBI NO: 30409136 NR Description: histidine amino acid transporter [Oryza sativa
MAGIPDHIQDQHLVEEDQPFDLEDWLPITASRNANWYYSAFHNVTAIVGAGVLGLPYAMSELGWGPGVVVLILSWVITLYTLWQMIEMHEMFEGQRFDRYHELGQAAFGKKLGLYIIVPLQLLVEISVCIVYMVTGGKSLKNVHDLALGDGDKCTKLRIQHFILIFASSQFVLSLLKNFNSISGVSLVAAVMSVSYSTIAWVASLRKGATTGSVEYGYRKRTTSVPLAFLSALGEMAFAYAGHNVVLEIQATIPSTPENPSKRPMWKGAVVAYIIVAFCYFPVALVGFKTFGNSVEESILESLTKPTALVIVANMFVVIHLLGSYQVYAMPVFDMIESVMIRIWHFSPTRVLRFTIRWTFVAATMGIAVGLPYYSALLSFFGGFVFAPTTYFIPCIMWLILKKPKRFSLSWCMNWFCIIFGLVLMIIAPIGGLAKLIYNIQKGTLPNSRCNLPKH

SEQ ID NO: 72173 - protein, 397 aa, Arabidopsis thaliana; identical to SEQ ID NO: 71793
  peptide (1)..(397): Ceres Seq. ID no. 4920705
  misc_feature (1)..(397): Homolog of NCBI NO: 6091720 NR Description: putative amino acid permease [Arabidopsis
  misc_feature (1)..(397): Homolog of NCBI NO: 15232176 NR Description: putative amino acid permease; protein id: [Arabidopsis thaliana] >gi|6016733|gb|AAF01559.1|AC009325_29
  misc_feature (1)..(392): Homolog of NCBI NO: 15219896 NR Description: lysine and histidine specific transporter,
  misc_feature (1)..(357): Homolog of NCBI NO: 2443875 NR Description: amino acid permease [Arabidopsis thaliana]
  misc_feature (1)..(379): Homolog of NCBI NO: 30693663 NR Description: lysine and histidine specific transporter, [Arabidopsis thaliana] >gi|14194151|gb|AAK56270.1|AF367281_1 [Arabidopsis thaliana] >gi|22137070|gb|AAM91380.1|
  misc_feature (1)..(379): Homolog of NCBI NO: 30693666 NR Description: lysine and histidine specific transporter,
  misc_feature (1)..(379): Homolog of NCBI NO: 22330117 NR Description: lysine and histidine specific transporter,
  misc_feature (1)..(379): Homolog of NCBI NO: 12597815 NR Description: lysine and histidine specific transporter,
  misc_feature (1)..(379): Homolog of NCBI NO: 30409136 NR Description: histidine amino acid transporter [Oryza sativa
  misc_feature (1)..(379): Homolog of NCBI NO: 15220504 NR Description: putative amino acid permease; protein id: [Arabidopsis thaliana] >gi|11072015|gb|AAG28894.1|AC008113_10 [Arabidopsis thaliana] >gi|12324687|gb|AAG52310.1|AC011020_17

SEQ ID NO: 72174 - protein, 371 aa, Arabidopsis thaliana; identical to SEQ ID NO: 71794
  peptide (1)..(371): Ceres Seq. ID no. 4920706
  misc_feature (1)..(371): Homolog of NCBI NO: 6091720 NR Description: putative amino acid permease [Arabidopsis
  misc_feature (1)..(371): Homolog of NCBI NO: 15232176 NR Description: putative amino acid permease; protein id: [Arabidopsis thaliana] >gi|6016733|gb|AAF01559.1|AC009325_29
  misc_feature (1)..(366): Homolog of NCBI NO: 15219896 NR Description: lysine and histidine specific transporter,
  misc_feature (1)..(331): Homolog of NCBI NO: 2443875 NR Description: amino acid permease [Arabidopsis thaliana]
  misc_feature (1)..(353): Homolog of NCBI NO: 30693663 NR Description: lysine and histidine specific transporter, [Arabidopsis thaliana] >gi|14194151|gb|AAK56270.1|AF367281_1 [Arabidopsis thaliana] >gi|22137070|gb|AAM91380.1|
  misc_feature (1)..(353): Homolog of NCBI NO: 30693666 NR Description: lysine and histidine specific transporter,
  misc_feature (1)..(353): Homolog of NCBI NO: 22330117 NR Description: lysine and histidine specific transporter,
  misc_feature (1)..(353): Homolog of NCBI NO: 12597815 NR Description: lysine and histidine specific transporter,
  misc_feature (1)..(353): Homolog of NCBI NO: 30409136 NR Description: histidine amino acid transporter [Oryza sativa
  misc_feature (1)..(353): Homolog of NCBI NO: 15220504 NR Description: putative amino acid permease; protein id: [Arabidopsis thaliana] >gi|11072015|gb|AAG28894.1|AC008113_10 [Arabidopsis thaliana] >gi|12324687|gb|AAG52310.1|AC011020_17

SEQ ID NO: 72175 - DNA, 1209 bp, Arabidopsis thaliana
  misc_feature (1)..(1209): Ceres Seq. ID no. 4920718
  misc_feature: MA Experiment ID: 108434 Result: Up-regulated in Transcription
  misc_feature: MA Experiment 108434 PARAMETER Experiment Name: At_Root_Tips_cDNA_P Parameter: Tissue Value: Root Tips
  misc_feature: MA Experiment ID: 108462 Result: Down-regulated in Transcription
  misc_feature: MA Experiment 108462 PARAMETER Experiment Name: At_Germinating_Seeds_cDNA_P Parameter: Age (day) Value: 2 vs. 0
  misc_feature: MA Experiment 108462 PARAMETER Experiment Name: At_Germinating_Seeds_cDNA_P Parameter: Tissue Value: Germinating Seeds
  misc_feature: MA Experiment ID: 108463 Result: Down-regulated in Transcription
  misc_feature: MA Experiment 108463 PARAMETER Experiment Name: At_Germinating_Seeds_cDNA_P Parameter: Age (day) Value: 3 vs. 0
  misc_feature: MA Experiment 108463 PARAMETER Experiment Name: At_Germinating_Seeds_cDNA_P Parameter: Tissue Value: Germinating Seeds
  misc_feature: MA Experiment ID: 108464 Result: Down-regulated in Transcription
  misc_feature: MA Experiment 108464 PARAMETER Experiment Name: At_Germinating_Seeds_cDNA_P Parameter: Age (day) Value: 4 vs. 0
  misc_feature: MA Experiment 108464 PARAMETER Experiment Name: At_Germinating_Seeds_cDNA_P Parameter: Tissue Value: Germinating Seeds
  misc_feature: MA Experiment ID: 108573 Result: Up-regulated in Transcription
  misc_feature: MA Experiment 108573 PARAMETER Experiment Name: At_Drought_cDNA_P Parameter: Timepoint (hr) Value: 6
  misc_feature: MA Experiment 108573 PARAMETER Experiment Name: At_Drought_cDNA_P Parameter: Tissue Value: Aerial
  misc_feature: MA Experiment 108573 PARAMETER Experiment Name: At_Drought_cDNA_P Parameter: Treatment Value: Drought vs. No Drought
  misc_feature: MA Experiment ID: 108595 Result: Down-regulated in Transcription
  misc_feature: MA Experiment 108595 PARAMETER Experiment Name: At_Ler-pi_Ovule_cDNA_P Parameter: Plant Line Value: null
atggaggtggataagaaggacgagagagaggctgaatcttcggagcaagtggtgaatccatgggaagtgtccgccaaagacggcgggaagatcgattacgacaagcttattgacaaatttggatgtcaaaggcttgacgagtcactgattgatcgtgttcagagactgacttctcgtcaaccacacgtgttcctccgccgtagtgtcttcttcgcccaccgggatttcaatgagattttggacgcttatgagagaggagacaagttctatctctacactggaagaggaccttcatcagaagcattgcatttggggcatttgattcctttcatgtttaccaaatacttgcaagaagctttcaaggttccccttgttatacagctcacggatgatgaaaaaagtatatggaagaacttatcggtggaggaaagtcaaagacttgccagagaaaatgcgaaagatattattgcttgtggattcgatgtaacaaagaccttcattttctcggacttcgactatgttggcggtgctttctataaaaatatggtgaaggttggcaagtgcgttacacttaataaggctatgggaatctttggcttttccggtgaagatcctatcgcgaaactcagtttccctcctgtgcaggcagttccatcttttcctagctcattcccacatttgttccctggcaaggacaatctccgctgcttgattccttgtgctattgaccaggatccttattttagaatgactcgtgatgtcgcaccccggttaggctatagcaagcccgccctgattgagtcaacattttttcctgcgttgcagggagagaatggaaaaatgtctgctagtgatccaaattctgctatctatgtgactgattccgcaaaggacattaaaaacaagataaacagatatgcgtttagtggtgggcaagactccattgagaagcaccgagaacttggagcaaatctcgaggttgacatacccgtcaagtatctgagtttcttcctcgaagacgattctgaactagaacacattaaaaaggaatatggagaaggaagaatgctaacaggagaagtaaagaagagacttacggaagtgttgacagaaattgtggagagacaccgcagggctcgagctgctgttactgatgagatggttgatgcgttcatggcggtgagacctctcccaagcatgttcgaatag

SEQ ID NO: 72176 - protein, 402 aa, Arabidopsis thaliana; identical to SEQ ID NO: 41624
  peptide (1)..(402): Ceres Seq. ID no. 4920719
  misc_feature (1)..(402): Homolog of NCBI NO: 15229319 NR Description: putative tryptophanyl-tRNA synthetase; protein At3g04600.1, supported by cDNA: gi_19310592 [Arabidopsis
  misc_feature (7)..(402): Homolog of NCBI NO: 32709 NR Description: IFP53 [Homo sapiens]
  misc_feature (7)..(402): Homolog of NCBI NO: 135191 NR Description: Tryptophanyl-tRNA synthetase (Tryptophan--tRNA
  misc_feature (7)..(402): Homolog of NCBI NO: 4759316 NR Description: tryptophanyl-tRNA synthetase; interferon-induced
  misc_feature (7)..(397): Homolog of NCBI NO: 2851538 NR Description: TRYPTOPHANYL-TRNA SYNTHETASE (TRYPTOPHAN--TRNA
  misc_feature (7)..(402): Homolog of NCBI NO: 12835778 NR Description: unnamed protein product [Mus musculus]
  misc_feature (7)..(402): Homolog of NCBI NO: 34328206 NR Description: tryptophanyl-tRNA synthetase [Mus musculus]
  misc_feature (1)..(397): Homolog of NCBI NO: 28302309 NR Description: Similar to tryptophanyl-tRNA synthetase [Xenopus
  misc_feature (7)..(402): Homolog of NCBI NO: 29144895 NR Description: tryptophanyl-tRNA synthetase [Mus musculus]
  misc_feature (7)..(397): Homolog of NCBI NO: 7428462 NR Description: tryptophan-tRNA ligase (EC 6.1.1.2) [validated] -

SEQ ID NO: 72177 - protein, 292 aa, Arabidopsis thaliana; identical to SEQ ID NO: 41625
  peptide (1)..(292): Ceres Seq. ID no. 4920720
  misc_feature (1)..(292): Homolog of NCBI NO: 15229319 NR Description: putative tryptophanyl-tRNA synthetase; protein At3g04600.1, supported by cDNA: gi_19310592 [Arabidopsis
  misc_feature (1)..(292): Homolog of NCBI NO: 32709 NR Description: IFP53 [Homo sapiens]
  misc_feature (1)..(292): Homolog of NCBI NO: 135191 NR Description: Tryptophanyl-tRNA synthetase (Tryptophan--tRNA
  misc_feature (1)..(292): Homolog of NCBI NO: 4759316 NR Description: tryptophanyl-tRNA synthetase; interferon-induced
  misc_feature (1)..(287): Homolog of NCBI NO: 2851538 NR Description: TRYPTOPHANYL-TRNA SYNTHETASE (TRYPTOPHAN--TRNA
  misc_feature (1)..(292): Homolog of NCBI NO: 12835778 NR Description: unnamed protein product [Mus musculus]
  misc_feature (1)..(292): Homolog of NCBI NO: 34328206 NR Description: tryptophanyl-tRNA synthetase [Mus musculus]
  misc_feature (1)..(287): Homolog of NCBI NO: 28302309 NR Description: Similar to tryptophanyl-tRNA synthetase [Xenopus
  misc_feature (1)..(292): Homolog of NCBI NO: 29144895 NR Description: tryptophanyl-tRNA synthetase [Mus musculus]
  misc_feature (1)..(287): Homolog of NCBI NO: 7428462 NR Description: tryptophan-tRNA ligase (EC 6.1.1.2) [validated] -

SEQ ID NO: 72178 - protein, 221 aa, Arabidopsis thaliana
  peptide (1)..(221): Ceres Seq. ID no. 4920721
  misc_feature (1)..(221): Homolog of NCBI NO: 15229319 NR Description: putative tryptophanyl-tRNA synthetase; protein At3g04600.1, supported by cDNA: gi_19310592 [Arabidopsis
  misc_feature (1)..(221): Homolog of NCBI NO: 32709 NR Description: IFP53 [Homo sapiens]
  misc_feature (1)..(221): Homolog of NCBI NO: 135191 NR Description: Tryptophanyl-tRNA synthetase (Tryptophan--tRNA
  misc_feature (1)..(221): Homolog of NCBI NO: 4759316 NR Description: tryptophanyl-tRNA synthetase; interferon-induced
  misc_feature (1)..(216): Homolog of NCBI NO: 2851538 NR Description: TRYPTOPHANYL-TRNA SYNTHETASE (TRYPTOPHAN--TRNA
  misc_feature (1)..(221): Homolog of NCBI NO: 12835778 NR Description: unnamed protein product [Mus musculus]
  misc_feature (1)..(221): Homolog of NCBI NO: 34328206 NR Description: tryptophanyl-tRNA synthetase [Mus musculus]
  misc_feature (1)..(216): Homolog of NCBI NO: 28302309 NR Description: Similar to tryptophanyl-tRNA synthetase [Xenopus
  misc_feature (1)..(221): Homolog of NCBI NO: 29144895 NR Description: tryptophanyl-tRNA synthetase [Mus musculus]
  misc_feature (1)..(216): Homolog of NCBI NO: 7428462 NR Description: tryptophan-tRNA ligase (EC 6.1.1.2) [validated] -
MVKVGKCVTLNKAMGIFGFSGEDPIAKLSFPPVQAVPSFPSSFPHLFPGKDNLRCLIPCAIDQDPYFRMTRDVAPRLGYSKPALIESTFFPALQGENGKMSASDPNSAIYVTDSAKDIKNKINRYAFSGGQDSIEKHRELGANLEVDIPVKYLSFFLEDDSELEHIKKEYGEGRMLTGEVKKRLTEVLTEIVERHRRARAAVTDEMVDAFMAVRPLPSMFE

SEQ ID NO: 72179 - DNA, 948 bp, Arabidopsis thaliana
  misc_feature (1)..(948): Ceres Seq. ID no. 4920882
  misc_feature: MA Experiment ID: 20000264 Result: Up-regulated in Transcription
  misc_feature: MA Experiment 20000264 PARAMETER Experiment Name: At_Open_Flower_P Parameter: Age (day) Value: 21
  misc_feature: MA Experiment 20000264 PARAMETER Experiment Name: At_Open_Flower_P Parameter: Plant Line Value: WS
  misc_feature: MA Experiment 20000264 PARAMETER Experiment Name: At_Open_Flower_P Parameter: Tissue Value: Open Flower vs. Whole Plant
  misc_feature: MA Experiment ID: 20000265 Result: Up-regulated in Transcription
  misc_feature: MA Experiment 20000265 PARAMETER Experiment Name: At_Open_Flower_P Parameter: Age (day) Value: 21
  misc_feature: MA Experiment 20000265 PARAMETER Experiment Name: At_Open_Flower_P Parameter: Plant Line Value: WS
  misc_feature: MA Experiment 20000265 PARAMETER Experiment Name: At_Open_Flower_P Parameter: Tissue Value: Closed Flower vs. Whole Plant
  misc_feature: MA Experiment ID: 20000286 Result: Up-regulated in Transcription
  misc_feature: MA Experiment 20000286 PARAMETER Experiment Name: At_Open_Flower_P Parameter: Age (day) Value: 21
  misc_feature: MA Experiment 20000286 PARAMETER Experiment Name: At_Open_Flower_P Parameter: Plant Line Value: WS
  misc_feature: MA Experiment 20000286 PARAMETER Experiment Name: At_Open_Flower_P Parameter: Tissue Value: Half Open vs. Whole Plant
  misc_feature: MA Experiment ID: 20000438 Result: Down-regulated in Transcription
  misc_feature: MA Experiment 20000438 PARAMETER Experiment Name: At_Shoots__P Parameter: Age (day) Value: 14
  misc_feature: MA Experiment 20000438 PARAMETER Experiment Name: At_Shoots__P Parameter: Tissue Value: Shoots vs. Whole Plant
  misc_feature: MA Experiment ID: 20001247 Result: Down-regulated in Transcription
  misc_feature: MA Experiment 20001247 PARAMETER Experiment Name: At_Far-red-induction_P Parameter: Age (day) Value: 7
  misc_feature: MA Experiment 20001247 PARAMETER Experiment Name: At_Far-red-induction_P Parameter: Light Value: Far-red vs. White
  misc_feature: MA Experiment 20001247 PARAMETER Experiment Name: At_Far-red-induction_P Parameter: Organism Value: A. thaliana
  misc_feature: MA Experiment 20001247 PARAMETER Experiment Name: At_Far-red-induction_P Parameter: Plant Line Value: Columbia
  misc_feature: MA Experiment 20001247 PARAMETER Experiment Name: At_Far-red-induction_P Parameter: Timepoint (hr) Value: 1
  misc_feature: MA Experiment 20001247 PARAMETER Experiment Name: At_Far-red-induction_P Parameter: Tissue Value: Whole Plant
  misc_feature: MA Experiment ID: 20001450 Result: Down-regulated in Transcription
  misc_feature: MA Experiment 20001450 PARAMETER Experiment Name: At_Far-red-induction_P Parameter: Age (day) Value: 7
  misc_feature: MA Experiment 20001450 PARAMETER Experiment Name: At_Far-red-induction_P Parameter: Light Value: Far-red vs. White
  misc_feature: MA Experiment 20001450 PARAMETER Experiment Name: At_Far-red-induction_P Parameter: Organism Value: A. thaliana
  misc_feature: MA Experiment 20001450 PARAMETER Experiment Name: At_Far-red-induction_P Parameter: Plant Line Value: Columbia
  misc_feature: MA Experiment 20001450 PARAMETER Experiment Name: At_Far-red-induction_P Parameter: Timepoint (hr) Value: 8
  misc_feature: MA Experiment 20001450 PARAMETER Experiment Name: At_Far-red-induction_P Parameter: Tissue Value: Whole Plant
  misc_feature: MA Experiment ID: 20001558 Result: Up-regulated in Transcription
  misc_feature: MA Experiment 20001558 PARAMETER Experiment Name: At_Drought_Soil_Dry_P Parameter: Age (day) Value: 27
  misc_feature: MA Experiment 20001558 PARAMETER Experiment Name: At_Drought_Soil_Dry_P Parameter: Organism Value: A. thaliana
  misc_feature: MA Experiment 20001558 PARAMETER Experiment Name: At_Drought_Soil_Dry_P Parameter: Plant Line Value: WS
  misc_feature: MA Experiment 20001558 PARAMETER Experiment Name: At_Drought_Soil_Dry_P Parameter: Post Timepoint (hr) Value: 6
  misc_feature: MA Experiment 20001558 PARAMETER Experiment Name: At_Drought_Soil_Dry_P Parameter: Post-Treatment Value: Re-Water vs. No Drought
  misc_feature: MA Experiment 20001558 PARAMETER Experiment Name: At_Drought_Soil_Dry_P Parameter: Timepoint (day) Value: 13
  misc_feature: MA Experiment 20001558 PARAMETER Experiment Name: At_Drought_Soil_Dry_P Parameter: Treatment Value: Drought vs. No Drought
  misc_feature: MA Experiment ID: 20001911 Result: Down-regulated in Transcription
  misc_feature: MA Experiment 20001911 PARAMETER Experiment Name: At_Drought_Reproduction_P Parameter: Age (day) Value: 40
  misc_feature: MA Experiment 20001911 PARAMETER Experiment Name: At_Drought_Reproduction_P Parameter: Organism Value: A. thaliana
  misc_feature: MA Experiment 20001911 PARAMETER Experiment Name: At_Drought_Reproduction_P Parameter: Plant Line Value: WS
  misc_feature: MA Experiment 20001911 PARAMETER Experiment Name: At_Drought_Reproduction_P Parameter: Timepoint (day) Value: 10
  misc_feature: MA Experiment 20001911 PARAMETER Experiment Name: At_Drought_Reproduction_P Parameter: Tissue Value: Flowers
  misc_feature: MA Experiment 20001911 PARAMETER Experiment Name: At_Drought_Reproduction_P Parameter: Treatment Value: Drought vs. No Drought
atggcttccggtgatgttcttcctagattcttcactgtcttcctctcccattgcagctccgaatccatggtgataccaaggtcttactacaatcttttaccacgtccgttgcccaagactgcgattctcatcggaactggtggaagattttggaaagtagcaatgacgagcaagcaagagcaagtgtattttgaacaaggctggggaaatttcgttgctgataaccagttaaaagagggagaattcttaacttttgtgtttgatgggcacaaaagttatgaagtaagtatctatggtcgtggagattgcaaagagactcgagcagtcattcaagttgaagagatctctgatgatacagaagatgacaacgtttctcttcatagccctagcaatgtttcacttgatagccttagcaacgattctcatcatagcactagcaacgtttctcttcgaagccttagcaacgattctcttcatggtgatgctgagatagagagcgacagtgagtattctcccgagaacctaccctcagcctctatatctgttgaatccgttgaggtggtgaatccaacaacaagcaggcagagaagttacaagaggaagaccattgagaatccacatctgtatttggatgatccaaacaatgtctgttttgagacgtgtcttaagcttagaaagtttgagctgttagttcatgcacagttggtgaaagactacggcttgatattcagcgacaatgttgactatattgacggatatggaaaactaaccgcgaaaacgaccaagtgggcagatcaacgggtttgcataaacaaatggcagaaaatatgcgagagaaaccagttcacagagaatgactccatcctatgtgaaattctccgcaacgaggacaaagtggtttatgcaatcaagattcacatcttccgcgatgcagcagcaagcacttga

SEQ ID NO: 72180 - protein, 315 aa, Arabidopsis thaliana; identical to SEQ ID NO: 71839
  peptide (1)..(315): Ceres Seq. ID no. 4920883
  misc_feature (1)..(315): Homolog of NCBI NO: 15230649 NR Description: hypothetical protein; protein id: At3g06160.1 thaliana] >gi|6862920|gb|AAF30309.1|AC018907_9 hypothetical
  misc_feature (1)..(170): Homolog of NCBI NO: 15230669 NR Description: hypothetical protein; protein id: At3g06220.1 thaliana] >gi|6862926|gb|AAF30315.1|AC018907_15 hypothetical
  misc_feature (8)..(310): Homolog of NCBI NO: 15242851 NR Description: putative protein; protein id: At5g57720.1 thaliana] >gi|9759269|dbj|BAB09590.1|
  misc_feature (133)..(309): Homolog of NCBI NO: 15235362 NR Description: putative protein; protein id: At4g34400.1
  misc_feature (1)..(201): Homolog of NCBI NO: 15235362 NR Description: putative protein; protein id: At4g34400.1
  misc_feature (7)..(307): Homolog of NCBI NO: 8777352 NR Description: gene_id:MGO3.11~pir||T12971~similar to unknown
  misc_feature (23)..(307): Homolog of NCBI NO: 15238622 NR Description: putative protein; protein id: At5g60130.1
  misc_feature (5)..(223): Homolog of NCBI NO: 11357788 NR Description: hypothetical protein F4P12.10 - Arabidopsis >gi|6729482|emb|CAB67638.1| putative protein [Arabidopsis
  misc_feature (5)..(223): Homolog of NCBI NO: 18409814 NR Description: putative protein; protein id: At3g53310.1, by cDNA: 36830. [Arabidopsis thaliana]
  misc_feature (9)..(307): Homolog of NCBI NO: 15238624 NR Description: putative protein; protein id: At5g60140.1

SEQ ID NO: 72181 - protein, 293 aa, Arabidopsis thaliana; identical to SEQ ID NO: 71840
  peptide (1)..(293): Ceres Seq. ID no. 4920884
  misc_feature (1)..(293): Homolog of NCBI NO: 15230649 NR Description: hypothetical protein; protein id: At3g06160.1 thaliana] >gi|6862920|gb|AAF30309.1|AC018907_9 hypothetical
  misc_feature (1)..(148): Homolog of NCBI NO: 15230669 NR Description: hypothetical protein; protein id: At3g06220.1 thaliana] >gi|6862926|gb|AAF30315.1|AC018907_15 hypothetical
  misc_feature (1)..(288): Homolog of NCBI NO: 15242851 NR Description: putative protein; protein id: At5g57720.1 thaliana] >gi|9759269|dbj|BAB09590.1|
  misc_feature (111)..(287): Homolog of NCBI NO: 15235362 NR Description: putative protein; protein id: At4g34400.1
  misc_feature (1)..(179): Homolog of NCBI NO: 15235362 NR Description: putative protein; protein id: At4g34400.1
  misc_feature (1)..(285): Homolog of NCBI NO: 8777352 NR Description: gene_id:MGO3.11~pir||T12971~similar to unknown
  misc_feature (1)..(285): Homolog of NCBI NO: 15238622 NR Description: putative protein; protein id: At5g60130.1
  misc_feature (1)..(201): Homolog of NCBI NO: 11357788 NR Description: hypothetical protein F4P12.10 - Arabidopsis >gi|6729482|emb|CAB67638.1| putative protein [Arabidopsis
  misc_feature (1)..(201): Homolog of NCBI NO: 18409814 NR Description: putative protein; protein id: At3g53310.1, by cDNA: 36830. [Arabidopsis thaliana]
  misc_feature (1)..(285): Homolog of NCBI NO: 15238624 NR Description: putative protein; protein id: At5g60140.1

SEQ ID NO: 72182 - protein, 261 aa, Arabidopsis thaliana
  peptide (1)..(261): Ceres Seq. ID no. 4920885
  misc_feature (1)..(261): Homolog of NCBI NO: 15230649 NR Description: hypothetical protein; protein id: At3g06160.1 thaliana] >gi|6862920|gb|AAF30309.1|AC018907_9 hypothetical
  misc_feature (1)..(116): Homolog of NCBI NO: 15230669 NR Description: hypothetical protein; protein id: At3g06220.1 thaliana] >gi|6862926|gb|AAF30315.1|AC018907_15 hypothetical
  misc_feature (1)..(256): Homolog of NCBI NO: 15242851 NR Description: putative protein; protein id: At5g57720.1 thaliana] >gi|9759269|dbj|BAB09590.1|
  misc_feature (79)..(255): Homolog of NCBI NO: 15235362 NR Description: putative protein; protein id: At4g34400.1
  misc_feature (1)..(147): Homolog of NCBI NO: 15235362 NR Description: putative protein; protein id: At4g34400.1
  misc_feature (1)..(253): Homolog of NCBI NO: 8777352 NR Description: gene_id:MGO3.11~pir||T12971~similar to unknown
  misc_feature (1)..(253): Homolog of NCBI NO: 15238622 NR Description: putative protein; protein id: At5g60130.1
  misc_feature (1)..(169): Homolog of NCBI NO: 11357788 NR Description: hypothetical protein F4P12.10 - Arabidopsis >gi|6729482|emb|CAB67638.1| putative protein [Arabidopsis
  misc_feature (1)..(169): Homolog of NCBI NO: 18409814 NR Description: putative protein; protein id: At3g53310.1, by cDNA: 36830. [Arabidopsis thaliana]
  misc_feature (1)..(253): Homolog of NCBI NO: 15238624 NR Description: putative protein; protein id: At5g60140.1
MTSKQEQVYFEQGWGNFVADNQLKEGEFLTFVFDGHKSYEVSIYGRGDCKETRAVIQVEEISDDTEDDNVSLHSPSNVSLDSLSNDSHHSTSNVSLRSLSNDSLHGDAEIESDSEYSPENLPSASISVESVEVVNPTTSRQRSYKRKTIENPHLYLDDPNNVCFETCLKLRKFELLVHAQLVKDYGLIFSDNVDYIDGYGKLTAKTTKWADQRVCINKWQKICERNQFTENDSILCEILRNEDKVVYAIKIHIFRDAAAST

SEQ ID NO: 72183 - DNA, 1533 bp, Arabidopsis thaliana
  misc_feature (1)..(1533): Ceres Seq. ID no. 4920891
  misc_feature: MA Experiment ID: 20000184 Result: Down-regulated in Transcription
  misc_feature: MA Experiment 20000184 PARAMETER Experiment Name: At_Shoots__P Parameter: Age (day) Value: 7
  misc_feature: MA Experiment 20000184 PARAMETER Experiment Name: At_Shoots__P Parameter: Tissue Value: Shoots vs. Whole Plant
  misc_feature: MA Experiment ID: 20000437 Result: Up-regulated in Transcription
  misc_feature: MA Experiment 20000437 PARAMETER Experiment Name: At_Drought_P Parameter: Age (day) Value: 8
  misc_feature: MA Experiment 20000437 PARAMETER Experiment Name: At_Drought_P Parameter: Organism Value: A. thaliana
  misc_feature: MA Experiment 20000437 PARAMETER Experiment Name: At_Drought_P Parameter: Plant Line Value: WS
  misc_feature: MA Experiment 20000437 PARAMETER Experiment Name: At_Drought_P Parameter: Timepoint (hr) Value: 24
  misc_feature: MA Experiment 20000437 PARAMETER Experiment Name: At_Drought_P Parameter: Tissue Value: Whole Plant
  misc_feature: MA Experiment 20000437 PARAMETER Experiment Name: At_Drought_P Parameter: Treatment Value: Drought vs. No Drought
  misc_feature: MA Experiment ID: 20000495 Result: Down-regulated in Transcription
  misc_feature: MA Experiment 20000495 PARAMETER Experiment Name: At_Guard_Cells_P Parameter: Harvest Date Value: 8/2/2002
  misc_feature: MA Experiment 20000495 PARAMETER Experiment Name: At_Guard_Cells_P Parameter: Organism Value: A. thaliana
  misc_feature: MA Experiment 20000495 PARAMETER Experiment Name: At_Guard_Cells_P Parameter: Tissue Value: Guard Cells vs. Leaves
  misc_feature: MA Experiment ID: 20000496 Result: Down-regulated in Transcription
  misc_feature: MA Experiment 20000496 PARAMETER Experiment Name: At_Guard_Cells_P Parameter: Harvest Date Value: 7/19/2002
  misc_feature: MA Experiment 20000496 PARAMETER Experiment Name: At_Guard_Cells_P Parameter: Organism Value: Canola
  misc_feature: MA Experiment 20000496 PARAMETER Experiment Name: At_Guard_Cells_P Parameter: Tissue Value: Guard Cells vs. Leaves
  misc_feature: MA Experiment ID: 20001451 Result: Down-regulated in Transcription
  misc_feature: MA Experiment 20001451 PARAMETER Experiment Name: At_Far-red-induction_P Parameter: Age (day) Value: 7
  misc_feature: MA Experiment 20001451 PARAMETER Experiment Name: At_Far-red-induction_P Parameter: Light Value: Far-red vs. White
  misc_feature: MA Experiment 20001451 PARAMETER Experiment Name: At_Far-red-induction_P Parameter: Organism Value: A. thaliana
  misc_feature: MA Experiment 20001451 PARAMETER Experiment Name: At_Far-red-induction_P Parameter: Plant Line Value: Columbia
  misc_feature: MA Experiment 20001451 PARAMETER Experiment Name: At_Far-red-induction_P Parameter: Timepoint (hr) Value: 24
  misc_feature: MA Experiment 20001451 PARAMETER Experiment Name: At_Far-red-induction_P Parameter: Tissue Value: Whole Plant
  misc_feature: MA Experiment ID: 20001905 Result: Up-regulated in Transcription
  misc_feature: MA Experiment 20001905 PARAMETER Experiment Name: At_Drought_Reproduction_P Parameter: Age (day) Value: 40
  misc_feature: MA Experiment 20001905 PARAMETER Experiment Name: At_Drought_Reproduction_P Parameter: Organism Value: A. thaliana
  misc_feature: MA Experiment 20001905 PARAMETER Experiment Name: At_Drought_Reproduction_P Parameter: Plant Line Value: WS
  misc_feature: MA Experiment 20001905 PARAMETER Experiment Name: At_Drought_Reproduction_P Parameter: Timepoint (day) Value: 10
  misc_feature: MA Experiment 20001905 PARAMETER Experiment Name: At_Drought_Reproduction_P Parameter: Tissue Value: Rosettes
  misc_feature: MA Experiment 20001905 PARAMETER Experiment Name: At_Drought_Reproduction_P Parameter: Treatment Value: Drought vs. No Drought
atgaagatcaaagtcgcagctcgtcacatctcttaccgaactctcttccacactatcttaatcctcgctttcttgttaccttttgttttcatcctaaccgctgttgttacccttgaaggtgtcaacaagtgctcctcttttgattgtttcgggaggcggctaggaccacgtcttcttggtaggatagatgattcagagcagagactagttagagatttttacaaaattctaaatgaagtaagcactcaagaaattccagatggtttaaagcttccagagtcttttagtcaactggtttcggatatgaagaacaaccactatgatgctaaaacatttgccctcgtatttcgagctatggtagagaagtttgaaagggatttaagggaatccaaatttgcagaactcatgaacaagcactttgctgcaagttcaattccaaaaggaattcactgtctctctttaagactaaccgatgaatattcctccaatgctcatgcccggagacagcttccttccccggagcttctccctgttctctcagacaatgcttaccaccattttgttctagctacagataatatcttagctgcatcggttgtggtctcatctgctgttcaatcatcttcaaaacccgagaaaattgtcttccatgttatcacagacaagaaaacctatgcgggtatgcattcttggtttgcactcaattctgttgctcctgcgattgttgaagtgaaaagcgttcatcagtttgattggttaacaagagagaatgttccagttcttgaagctgtggaaagccataacagtatcagaaattattaccatgggaatcatattgctggtgcaaacctcagcgaaacaacccctcgaacatttgcttcgaaactgcagtcaagaagtcccaaatacatatctttgctcaaccatcttagaatatatctaccagagctttttccgaacttagacaaggtagtgttcttagatgatgatatagtgatacagaaagatttatctccgctttgggatattgaccttaacgggaaggttaatggagctgtggagacttgtcgaggagaagacgtatgggttatgtcaaagcgtcttaggaactacttcaatttttctcacccgctcatcgcaaagcatttagatcccgaagaatgtgcttgggcttatggaatgaatatctttgatctacggacttggaggaagacaaatatcagagaaacgtatcattcttggcttaaagagaatctgaagtcgaatctaacaatgtggaaacttggaacattgcctcctgctctaatagcatttaaaggtcatgttcagccaatagattcctcttggcatatgcttggattaggttatcagagcaagaccaacttagaaaatgcgaagaaagctgcagtgattcattacaatggccaatcaaagccgtggcttgagataggtttcgagcatctcagaccattctggacaaaatatgttaactactccaatgatttcattaagaattgtcatatcttggaatag

SEQ ID NO: 72184 - protein, 510 aa, Arabidopsis thaliana
  peptide (1)..(510): Ceres Seq. ID no. 4920892
  misc_feature (1)..(510): Homolog of NCBI NO: 6714484 NR Description: unknown protein [Arabidopsis thaliana]
  misc_feature (1)..(510): Homolog of NCBI NO: 30678270 NR Description: glycosyltransferase family 8 [Arabidopsis
  misc_feature (1)..(510): Homolog of NCBI NO: 30685369 NR Description: glycosyltransferase family 8 [Arabidopsis >gi|26452322|dbj|BAC43247.1| unknown protein [Arabidopsis
  misc_feature (1)..(510): Homolog of NCBI NO: 11358133 NR Description: hypothetical protein T20K14_80 - Arabidopsis >gi|9755802|emb|CAC01746.1| putative protein [Arabidopsis
  misc_feature (1)..(508): Homolog of NCBI NO: 15239707 NR Description: putative protein; protein id: At5g54690.1 thaliana] >gi|10176796|dbj|BAB09935.1| contains similarity to
  misc_feature (5)..(509): Homolog of NCBI NO: 22331857 NR Description: putative protein; protein id: At3g58790.1, by cDNA: gi_20466463 [Arabidopsis thaliana] putative protein [Arabidopsis thaliana]
  misc_feature (5)..(509): Homolog of NCBI NO: 11358146 NR Description: hypothetical protein T20N10.140 - Arabidopsis >gi|7630074|emb|CAB88296.1| putative protein [Arabidopsis
  misc_feature (70)..(507): Homolog of NCBI NO: 18399484 NR Description: Expressed protein; protein id: At2g20810.1, by cDNA: gi_14334691, supported by cDNA: gi_16323393 [Arabidopsis >gi|14334692|gb|AAK59524.1| unknown protein [Arabidopsis
  misc_feature (141)..(507): Homolog of NCBI NO: 15230806 NR Description: glycosyl transferase, putative; protein id: supported by cDNA: gi_20466216 [Arabidopsis thaliana] Glycosyltransferase QUASIMODO1 >gi|9294170|dbj|BAB02072.1|
  misc_feature (81)..(510): Homolog of NCBI NO: 7485958 NR Description: hypothetical protein F22I13.40 - Arabidopsis >gi|4539335|emb|CAB37483.1| putative protein [Arabidopsis >gi|7270811|emb|CAB80492.1| putative protein [Arabidopsis
MKIKVAARHISYRTLFHTILILAFLLPFVFILTAVVTLEGVNKCSSFDCFGRRLGPRLLGRIDDSEQRLVRDFYKILNEVSTQEIPDGLKLPESFSQLVSDMKNNHYDAKTFALVFRAMVEKFERDLRESKFAELMNKHFAASSIPKGIHCLSLRLTDEYSSNAHARRQLPSPELLPVLSDNAYHHFVLATDNILAASVVVSSAVQSSSKPEKIVFHVITDKKTYAGMHSWFALNSVAPAIVEVKSVHQFDWLTRENVPVLEAVESHNSIRNYYHGNHIAGANLSETTPRTFASKLQSRSPKYISLLNHLRIYLPELFPNLDKVVFLDDDIVIQKDLSPLWDIDLNGKVNGAVETCRGEDVWVMSKRLRNYFNFSHPLIAKHLDPEECAWAYGMNIFDLRTWRKTNIRETYHSWLKENLKSNLTMWKLGTLPPALIAFKGHVQPIDSSWHMLGLGYQSKTNLENAKKAAVIHYNGQSKPWLEIGFEHLRPFWTKYVNYSNDFIKNCHILE

SEQ ID NO: 72185 - protein, 409 aa, Arabidopsis thaliana
  peptide (1)..(409): Ceres Seq. ID no. 4920893
  misc_feature (1)..(409): Homolog of NCBI NO: 6714484 NR Description: unknown protein [Arabidopsis thaliana]
  misc_feature (1)..(409): Homolog of NCBI NO: 30678270 NR Description: glycosyltransferase family 8 [Arabidopsis
  misc_feature (1)..(409): Homolog of NCBI NO: 30685369 NR Description: glycosyltransferase family 8 [Arabidopsis >gi|26452322|dbj|BAC43247.1| unknown protein [Arabidopsis
  misc_feature (1)..(409): Homolog of NCBI NO: 11358133 NR Description: hypothetical protein T20K14_80 - Arabidopsis >gi|9755802|emb|CAC01746.1| putative protein [Arabidopsis
  misc_feature (1)..(407): Homolog of NCBI NO: 15239707 NR Description: putative protein; protein id: At5g54690.1 thaliana] >gi|10176796|dbj|BAB09935.1| contains similarity to
  misc_feature (1)..(408): Homolog of NCBI NO: 22331857 NR Description: putative protein; protein id: At3g58790.1, by cDNA: gi_20466463 [Arabidopsis thaliana] putative protein [Arabidopsis thaliana]
  misc_feature (1)..(408): Homolog of NCBI NO: 11358146 NR Description: hypothetical protein T20N10.140 - Arabidopsis >gi|7630074|emb|CAB88296.1| putative protein [Arabidopsis
  misc_feature (1)..(406): Homolog of NCBI NO: 18399484 NR Description: Expressed protein; protein id: At2g20810.1, by cDNA: gi_14334691, supported by cDNA: gi_16323393 [Arabidopsis >gi|14334692|gb|AAK59524.1| unknown protein [Arabidopsis
  misc_feature (40)..(406): Homolog of NCBI NO: 15230806 NR Description: glycosyl transferase, putative; protein id: supported by cDNA: gi_20466216 [Arabidopsis thaliana] Glycosyltransferase QUASIMODO1 >gi|9294170|dbj|BAB02072.1|
  misc_feature (1)..(409): Homolog of NCBI NO: 7485958 NR Description: hypothetical protein F22I13.40 - Arabidopsis >gi|4539335|emb|CAB37483.1| putative protein [Arabidopsis >gi|7270811|emb|CAB80492.1| putative protein [Arabidopsis
MKNNHYDAKTFALVFRAMVEKFERDLRESKFAELMNKHFAASSIPKGIHCLSLRLTDEYSSNAHARRQLPSPELLPVLSDNAYHHFVLATDNILAASVVVSSAVQSSSKPEKIVFHVITDKKTYAGMHSWFALNSVAPAIVEVKSVHQFDWLTRENVPVLEAVESHNSIRNYYHGNHIAGANLSETTPRTFASKLQSRSPKYISLLNHLRIYLPELFPNLDKVVFLDDDIVIQKDLSPLWDIDLNGKVNGAVETCRGEDVWVMSKRLRNYFNFSHPLIAKHLDPEECAWAYGMNIFDLRTWRKTNIRETYHSWLKENLKSNLTMWKLGTLPPALIAFKGHVQPIDSSWHMLGLGYQSKTNLENAKKAAVIHYNGQSKPWLEIGFEHLRPFWTKYVNYSNDFIKNCHILE

SEQ ID NO: 72186 - protein, 392 aa, Arabidopsis thaliana
  peptide (1)..(392): Ceres Seq. ID no. 4920894
  misc_feature (1)..(392): Homolog of NCBI NO: 6714484 NR Description: unknown protein [Arabidopsis thaliana]
  misc_feature (1)..(392): Homolog of NCBI NO: 30678270 NR Description: glycosyltransferase family 8 [Arabidopsis
  misc_feature (1)..(392): Homolog of NCBI NO: 30685369 NR Description: glycosyltransferase family 8 [Arabidopsis >gi|26452322|dbj|BAC43247.1| unknown protein [Arabidopsis
  misc_feature (1)..(392): Homolog of NCBI NO: 11358133 NR Description: hypothetical protein T20K14_80 - Arabidopsis >gi|9755802|emb|CAC01746.1| putative protein [Arabidopsis
  misc_feature (1)..(390): Homolog of NCBI NO: 15239707 NR Description: putative protein; protein id: At5g54690.1 thaliana] >gi|10176796|dbj|BAB09935.1| contains similarity to
  misc_feature (1)..(391): Homolog of NCBI NO: 22331857 NR Description: putative protein; protein id: At3g58790.1, by cDNA: gi_20466463 [Arabidopsis thaliana] putative protein [Arabidopsis thaliana]
  misc_feature (1)..(391): Homolog of NCBI NO: 11358146 NR Description: hypothetical protein T20N10.140 - Arabidopsis >gi|7630074|emb|CAB88296.1| putative protein [Arabidopsis
  misc_feature (1)..(389): Homolog of NCBI NO: 18399484 NR Description: Expressed protein; protein id: At2g20810.1, by cDNA: gi_14334691, supported by cDNA: gi_16323393 [Arabidopsis >gi|14334692|gb|AAK59524.1| unknown protein [Arabidopsis
  misc_feature (23)..(389): Homolog of NCBI NO: 15230806 NR Description: glycosyl transferase, putative; protein id: supported by cDNA: gi_20466216 [Arabidopsis thaliana] Glycosyltransferase QUASIMODO1 >gi|9294170|dbj|BAB02072.1|
  misc_feature (1)..(392): Homolog of NCBI NO: 7485958 NR Description: hypothetical protein F22I13.40 - Arabidopsis >gi|4539335|emb|CAB37483.1| putative protein [Arabidopsis >gi|7270811|emb|CAB80492.1| putative protein [Arabidopsis
MVEKFERDLRESKFAELMNKHFAASSIPKGIHCLSLRLTDEYSSNAHARRQLPSPELLPVLSDNAYHHFVLATDNILAASVVVSSAVQSSSKPEKIVFHVITDKKTYAGMHSWFALNSVAPAIVEVKSVHQFDWLTRENVPVLEAVESHNSIRNYYHGNHIAGANLSETTPRTFASKLQSRSPKYISLLNHLRIYLPELFPNLDKVVFLDDDIVIQKDLSPLWDIDLNGKVNGAVETCRGEDVWVMSKRLRNYFNFSHPLIAKHLDPEECAWAYGMNIFDLRTWRKTNIRETYHSWLKENLKSNLTMWKLGTLPPALIAFKGHVQPIDSSWHMLGLGYQSKTNLENAKKAAVIHYNGQSKPWLEIGFEHLRPFWTKYVNYSNDFIKNCHILE

SEQ ID NO: 72187 - DNA, 1563 bp, Arabidopsis thaliana
  misc_feature (1)..(1563): Ceres Seq. ID no. 4920902
  misc_feature: MA Experiment ID: 20000307 Result: Up-regulated in Transcription
  misc_feature: MA Experiment 20000307 PARAMETER Experiment Name: At_Germinating_Seeds_Sub_P Parameter: Age (hr) Value: 24 vs. 0
  misc_feature: MA Experiment 20000307 PARAMETER Experiment Name: At_Germinating_Seeds_Sub_P Parameter: Organism Value: A. thaliana
  misc_feature: MA Experiment 20000307 PARAMETER Experiment Name: At_Germinating_Seeds_Sub_P Parameter: Plant Line Value: WS
  misc_feature: MA Experiment 20000307 PARAMETER Experiment Name: At_Germinating_Seeds_Sub_P Parameter: Tissue Value: Germinating Seeds
  misc_feature: MA Experiment ID: 20000355 Result: Down-regulated in Transcription
  misc_feature: MA Experiment 20000355 PARAMETER Experiment Name: At_Siliques_Sub_P Parameter: Age (day) Value: 21
  misc_feature: MA Experiment 20000355 PARAMETER Experiment Name: At_Siliques_Sub_P Parameter: Organism Value: A. thaliana
  misc_feature: MA Experiment 20000355 PARAMETER Experiment Name: At_Siliques_Sub_P Parameter: Plant Line Value: WS
  misc_feature: MA Experiment 20000355 PARAMETER Experiment Name: At_Siliques_Sub_P Parameter: Tissue Value: Less Than 5mm Siliques vs. Whole Plant
atgaatgtgtgtccactggagttcaatgagtatataccttgtcacaatgtcacctatgtgcatcagctgctaccaagcttgaatctttctagaagagaagacctcgaaaggcattgcccgccactcgagcaccgccttttttgcttggtacctccgccaaatgattataagatacctattagatggccaaccagtagagactatgtatggagaagtaatgtgaaccatacacatcttgctcaagttaaaggtggccaaaattgggtccatgagcaaggtcagttttggtggttccctggtggtggtactcattttaagcatggagctgcagaatacatccagaggttggggaatatgatgactaatgaaacaggtgacttgcgttcagctggggtggtacaagttcttgatgttggctgtggagttgcgagctttgcggcttatcttcttcccttaggtatacagacaatttcatttgctcccaaagatggtcatgaaaaccagattcagtttgcattggagagaggcattggtgcaatgatatccgcggttgccaccaaacaattgccatatcctgcagcctcgtttgagatggttcattgttcgagatgtcgtgttgactggcatacaaatgatggcatcttacttaaagaagttcatcgtcttctccgaccaaatggattcttcgtgtattcatcaccaccagcatatagaaaggataaagagtatcctatgatttgggataagttggtcaatctaactagtgcaatgtgctggaagcttatttcccggaaggtacagactgcaatatggattaaagaagagaaggaggtttgtcttaagcagaaagcagagctaaagctaataagtttatgtgatgtggaagatgttttgaaaccatcatggaaagttcctcttaaagattgtgtgcaaatcagtggacaaacagaagagagaccctcttctttagctgaacgtctttctgcatatccagcaactctaagaaaaatagggatcagtgaagatgaatatacatcagatacagtgttctggagagaacaagttaatcattactggcggttaatgaatgtcaatgagactgaagtacggaatgtgatggacatgaacgcattcattggtggttttgctgcagctatgaattcgtatcctgtttgggtaatgaacatagtacctgcaaccatgaatgataccttgtctggaattttcgagagaggcttaaatggcgctttccatgattggtgtgaggcgttctcaacatatccacgcacgtatgatttggtgcattccgatcatgtcttctctcactacaacaaaagctacggagatggttgtttgctagaggatatcatgcttgagatggaccgcatagttcgccctcaggggtttgtcataataagggacgaggaatatatcatctcaaggatccgaggcttggctccaaaattcttgtgggaagtggaaactcatgagcttgaaaacaaagacaagaagataacagagtctgttttgttttgcagaaagagattctgggcaatcatttga

SEQ ID NO: 72188 - protein, 520 aa, Arabidopsis thaliana
  peptide (1)..(520): Ceres Seq. ID no. 4920903
  misc_feature (10)..(514): Pfam Name: Putative methyltransferase Pfam Description: Putative methyltransferase
  misc_feature (1)..(520): Homolog of NCBI NO: 6056205 NR Description: unknown protein [Arabidopsis thaliana]
  misc_feature (1)..(520): Homolog of NCBI NO: 30681189 NR Description: dehydration-induced protein-related [Arabidopsis >gi|28973663|gb|AAO64151.1| unknown protein [Arabidopsis
  misc_feature (1)..(520): Homolog of NCBI NO: 15237607 NR Description: putative protein; protein id: At5g04060.1, by cDNA: gi_18086556 [Arabidopsis thaliana]
  misc_feature (3)..(517): Homolog of NCBI NO: 37535372 NR Description: hypothetical protein [Oryza sativa (japonica group)] >gi|13129503|gb|AAK13157.1| hypothetical protein [Oryza
  misc_feature (1)..(519): Homolog of NCBI NO: 11357548 NR Description: hypothetical protein F18O22.220 - Arabidopsis >gi|7573468|emb|CAB87782.1| putative protein [Arabidopsis
  misc_feature (3)..(519): Homolog of NCBI NO: 22326809 NR Description: putative protein; protein id: At5g14430.1, by cDNA: gi_17380665, supported by cDNA: gi_21280806 [Arabidopsis >gi|17380666|gb|AAL36163.1| unknown protein [Arabidopsis
  misc_feature (3)..(517): Homolog of NCBI NO: 22331280 NR Description: expressed protein; protein id: At3g23300.1
  misc_feature (3)..(507): Homolog of NCBI NO: 18390392 NR Description: ankyrin-like protein; protein id: At1g04430.1, by cDNA: 108617., supported by cDNA: gi_14423547, supported by gi_15450899, supported by cDNA: gi_17978686, supported by cDNA:
  misc_feature (3)..(507): Homolog of NCBI NO: 21536697 NR Description: ankyrin-like protein [Arabidopsis thaliana]
  misc_feature (3)..(517): Homolog of NCBI NO: 18414198 NR Description: ankyrin like protein; protein id: At4g14360.1, by cDNA: gi_16604604, supported by cDNA: gi_20259232 [Arabidopsis >gi|16604605|gb|AAL24095.1| putative ankyrin protein protein
MNVCPLEFNEYIPCHNVTYVHQLLPSLNLSRREDLERHCPPLEHRLFCLVPPPNDYKIPIRWPTSRDYVWRSNVNHTHLAQVKGGQNWVHEQGQFWWFPGGGTHFKHGAAEYIQRLGNMMTNETGDLRSAGVVQVLDVGCGVASFAAYLLPLGIQTISFAPKDGHENQIQFALERGIGAMISAVATKQLPYPAASFEMVHCSRCRVDWHTNDGILLKEVHRLLRPNGFFVYSSPPAYRKDKEYPMIWDKLVNLTSAMCWKLISRKVQTAIWIKEEKEVCLKQKAELKLISLCDVEDVLKPSWKVPLKDCVQISGQTEERPSSLAERLSAYPATLRKIGISEDEYTSDTVFWREQVNHYWRLMNVNETEVRNVMDMNAFIGGFAAAMNSYPVWVMNIVPATMNDTLSGIFERGLNGAFHDWCEAFSTYPRTYDLVHSDHVFSHYNKSYGDGCLLEDIMLEMDRIVRPQGFVIIRDEEYIISRIRGLAPKFLWEVETHELENKDKKITESVLFCRKRFWAII

SEQ ID NO: 72189 - protein, 402 aa, Arabidopsis thaliana
  peptide (1)..(402): Ceres Seq. ID no. 4920904
  misc_feature (1)..(396): Pfam Name: Putative methyltransferase Pfam Description: Putative methyltransferase
  misc_feature (1)..(402): Homolog of NCBI NO: 6056205 NR Description: unknown protein [Arabidopsis thaliana]
  misc_feature (1)..(402): Homolog of NCBI NO: 30681189 NR Description: dehydration-induced protein-related [Arabidopsis >gi|28973663|gb|AAO64151.1| unknown protein [Arabidopsis
  misc_feature (1)..(402): Homolog of NCBI NO: 15237607 NR Description: putative protein; protein id: At5g04060.1, by cDNA: gi_18086556 [Arabidopsis thaliana]
  misc_feature (1)..(399): Homolog of NCBI NO: 37535372 NR Description: hypothetical protein [Oryza sativa (japonica group)] >gi|13129503|gb|AAK13157.1| hypothetical protein [Oryza
  misc_feature (1)..(401): Homolog of NCBI NO: 11357548 NR Description: hypothetical protein F18O22.220 - Arabidopsis >gi|7573468|emb|CAB87782.1| putative protein [Arabidopsis
  misc_feature (1)..(401): Homolog of NCBI NO: 22326809 NR Description: putative protein; protein id: At5g14430.1, by cDNA: gi_17380665, supported by cDNA: gi_21280806 [Arabidopsis >gi|17380666|gb|AAL36163.1| unknown protein [Arabidopsis
  misc_feature (1)..(399): Homolog of NCBI NO: 22331280 NR Description: expressed protein; protein id: At3g23300.1
  misc_feature (1)..(389): Homolog of NCBI NO: 18390392 NR Description: ankyrin-like protein; protein id: At1g04430.1, by cDNA: 108617., supported by cDNA: gi_14423547, supported by gi_15450899, supported by cDNA: gi_17978686, supported by cDNA:
  misc_feature (1)..(389): Homolog of NCBI NO: 21536697 NR Description: ankyrin-like protein [Arabidopsis thaliana]
  misc_feature (1)..(399): Homolog of NCBI NO: 18414198 NR Description: ankyrin like protein; protein id: At4g14360.1, by cDNA: gi_16604604, supported by cDNA: gi_20259232 [Arabidopsis >gi|16604605|gb|AAL24095.1| putative ankyrin protein protein
MMTNETGDLRSAGVVQVLDVGCGVASFAAYLLPLGIQTISFAPKDGHENQIQFALERGIGAMISAVATKQLPYPAASFEMVHCSRCRVDWHTNDGILLKEVHRLLRPNGFFVYSSPPAYRKDKEYPMIWDKLVNLTSAMCWKLISRKVQTAIWIKEEKEVCLKQKAELKLISLCDVEDVLKPSWKVPLKDCVQISGQTEERPSSLAERLSAYPATLRKIGISEDEYTSDTVFWREQVNHYWRLMNVNETEVRNVMDMNAFIGGFAAAMNSYPVWVMNIVPATMNDTLSGIFERGLNGAFHDWCEAFSTYPRTYDLVHSDHVFSHYNKSYGDGCLLEDIMLEMDRIVRPQGFVIIRDEEYIISRIRGLAPKFLWEVETHELENKDKKITESVLFCRKRFWAII

SEQ ID NO: 72190 - protein, 401 aa, Arabidopsis thaliana
  peptide (1)..(401): Ceres Seq. ID no. 4920905
  misc_feature (1)..(395): Pfam Name: Putative methyltransferase Pfam Description: Putative methyltransferase
  misc_feature (1)..(401): Homolog of NCBI NO: 6056205 NR Description: unknown protein [Arabidopsis thaliana]
  misc_feature (1)..(401): Homolog of NCBI NO: 30681189 NR Description: dehydration-induced protein-related [Arabidopsis >gi|28973663|gb|AAO64151.1| unknown protein [Arabidopsis
  misc_feature (1)..(401): Homolog of NCBI NO: 15237607 NR Description: putative protein; protein id: At5g04060.1, by cDNA: gi_18086556 [Arabidopsis thaliana]
  misc_feature (1)..(398): Homolog of NCBI NO: 37535372 NR Description: hypothetical protein [Oryza sativa (japonica group)] >gi|13129503|gb|AAK13157.1| hypothetical protein [Oryza
  misc_feature (1)..(400): Homolog of NCBI NO: 11357548 NR Description: hypothetical protein F18O22.220 - Arabidopsis >gi|7573468|emb|CAB87782.1| putative protein [Arabidopsis
  misc_feature (1)..(400): Homolog of NCBI NO: 22326809 NR Description: putative protein; protein id: At5g14430.1, by cDNA: gi_17380665, supported by cDNA: gi_21280806 [Arabidopsis >gi|17380666|gb|AAL36163.1| unknown protein [Arabidopsis
  misc_feature (1)..(398): Homolog of NCBI NO: 22331280 NR Description: expressed protein; protein id: At3g23300.1
  misc_feature (1)..(388): Homolog of NCBI NO: 18390392 NR Description: ankyrin-like protein; protein id: At1g04430.1, by cDNA: 108617., supported by cDNA: gi_14423547, supported by gi_15450899, supported by cDNA: gi_17978686, supported by cDNA:
  misc_feature (1)..(388): Homolog of NCBI NO: 21536697 NR Description: ankyrin-like protein [Arabidopsis thaliana]
  misc_feature (1)..(398): Homolog of NCBI NO: 18414198 NR Description: ankyrin like protein; protein id: At4g14360.1, by cDNA: gi_16604604, supported by cDNA: gi_20259232 [Arabidopsis >gi|16604605|gb|AAL24095.1| putative ankyrin protein protein
MTNETGDLRSAGVVQVLDVGCGVASFAAYLLPLGIQTISFAPKDGHENQIQFALERGIGAMISAVATKQLPYPAASFEMVHCSRCRVDWHTNDGILLKEVHRLLRPNGFFVYSSPPAYRKDKEYPMIWDKLVNLTSAMCWKLISRKVQTAIWIKEEKEVCLKQKAELKLISLCDVEDVLKPSWKVPLKDCVQISGQTEERPSSLAERLSAYPATLRKIGISEDEYTSDTVFWREQVNHYWRLMNVNETEVRNVMDMNAFIGGFAAAMNSYPVWVMNIVPATMNDTLSGIFERGLNGAFHDWCEAFSTYPRTYDLVHSDHVFSHYNKSYGDGCLLEDIMLEMDRIVRPQGFVIIRDEEYIISRIRGLAPKFLWEVETHELENKDKKITESVLFCRKRFWAII

SEQ ID NO: 72191 - DNA, 1884 bp, Arabidopsis thaliana
  misc_feature (1)..(1884): Ceres Seq. ID no. 4920918
  misc_feature: MA Experiment ID: 20000306 Result: Up-regulated in Transcription
  misc_feature: MA Experiment 20000306 PARAMETER Experiment Name: At_Germinating_Seeds_Sub_P Parameter: Age (hr) Value: 6 vs. 0
  misc_feature: MA Experiment 20000306 PARAMETER Experiment Name: At_Germinating_Seeds_Sub_P Parameter: Organism Value: A. thaliana
  misc_feature: MA Experiment 20000306 PARAMETER Experiment Name: At_Germinating_Seeds_Sub_P Parameter: Plant Line Value: WS
  misc_feature: MA Experiment 20000306 PARAMETER Experiment Name: At_Germinating_Seeds_Sub_P Parameter: Tissue Value: Germinating Seeds
  misc_feature: MA Experiment ID: 20000307 Result: Up-regulated in Transcription
  misc_feature: MA Experiment 20000307 PARAMETER Experiment Name: At_Germinating_Seeds_Sub_P Parameter: Age (hr) Value: 24 vs. 0
  misc_feature: MA Experiment 20000307 PARAMETER Experiment Name: At_Germinating_Seeds_Sub_P Parameter: Organism Value: A. thaliana
  misc_feature: MA Experiment 20000307 PARAMETER Experiment Name: At_Germinating_Seeds_Sub_P Parameter: Plant Line Value: WS
  misc_feature: MA Experiment 20000307 PARAMETER Experiment Name: At_Germinating_Seeds_Sub_P Parameter: Tissue Value: Germinating Seeds
  misc_feature: MA Experiment ID: 20000329 Result: Up-regulated in Transcription
  misc_feature: MA Experiment 20000329 PARAMETER Experiment Name: At_4deg_Cold_Sub_P Parameter: Age (day) Value: 14
  misc_feature: MA Experiment 20000329 PARAMETER Experiment Name: At_4deg_Cold_Sub_P Parameter: Organism Value: A. thaliana
  misc_feature: MA Experiment 20000329 PARAMETER Experiment Name: At_4deg_Cold_Sub_P Parameter: Plant Line Value: WS
  misc_feature: MA Experiment 20000329 PARAMETER Experiment Name: At_4deg_Cold_Sub_P Parameter: Temperature (deg C) Value: 4 vs. 22
  misc_feature: MA Experiment 20000329 PARAMETER Experiment Name: At_4deg_Cold_Sub_P Parameter: Timepoint (hr) Value: 6
  misc_feature: MA Experiment 20000329 PARAMETER Experiment Name: At_4deg_Cold_Sub_P Parameter: Tissue Value: Aerial
  misc_feature: MA Experiment ID: 20000355 Result: Down-regulated in Transcription
  misc_feature: MA Experiment 20000355 PARAMETER Experiment Name: At_Siliques_Sub_P Parameter: Age (day) Value: 21
  misc_feature: MA Experiment 20000355 PARAMETER Experiment Name: At_Siliques_Sub_P Parameter: Organism Value: A. thaliana
  misc_feature: MA Experiment 20000355 PARAMETER Experiment Name: At_Siliques_Sub_P Parameter: Plant Line Value: WS
  misc_feature: MA Experiment 20000355 PARAMETER Experiment Name: At_Siliques_Sub_P Parameter: Tissue Value: Less Than 5mm Siliques vs. Whole Plant
atgacgagaaaagcaatgataaacatttgttgcgtggccacaacgccgtccaagtatccacctcctcctcctcttacgttaacccctcgccagagtttggaatcggcggctatctatggagtcattgaatccgcggcggatataatcgagagatggaacactgagaccaacactttcgctaaagttacttgtatgttctacgagaacaaacctgaagccatgatgttcatcgaacgtgtgaaggatcttcagaagacgatggacgtactcgtgagtgaggatccaaactctgagagactcttgagatcgcataagcttatgcaaatcgctatgaagaggttgcaaaaagagttttaccagattctttcgatgaatcgtgcttatcttgatccagaatcagtgtccactcgatcttcacttacttccgcaagatctagctactcagatttccccgactatgtcgaagatctagatacgatcatcgaactggaggaggtttctaccaacgtcatgacggatttgaaatccatcgctgagtgcatgatcggttctggttacgctaaggagtgtctaagcatctataaaagcattaggaaatcgatcatcgacgaagggatttatcgtttagaagtggagaagacgagtactgggaaggtgaagaaaatgtcatgggaagttatggagttgaagatcagaagctggttaaaagcagtcaaagtttctatggagactcttttcaaaggtgagaagattttgtgtgatcatgtctttgaatcctctgacgcaattagagagtcttgctttagtgatatctctcgagacggtgcgcttcttctctttggattcccggagatcattaatactaaaactagcaagaaacactctccgccggagaaagttttccggctgcttgacatgtacaccgccatcgccggaaactggcaagcgattgagtctatcttctcgtttgattcgatctccgtcgtcagatctcttgctcttaaatctctaatctctctcagcgaatcaattcgatcactacttgtggaattcgaatccggaatccagaaggactcgtcgaaggtggtggttcccggcggaggagtacatccactgacgatctccgtcatggatcacctctctctcctcgctgactacagcaacgtactagtcgatatcctcgccggatctccaccaccggacaggtcgctgttaccggagtcttacttcaacgtctcagaatccgacgactctccttcgtcggagctgacgatccgtttcgcttggatcatcctcgtcctcctttgtaaaatcgatcgtaaatcaattcactacaaagacttctctatacagtatctcttcctcaccaacaatctccagcacgtggtctcacgtgctcgttcctcaaacctgaagaaccttctcggcgaggattggatcacgagacatttcgctaagatgagacaattcgccggcagctataagcggctagcttggggaccggtggttgctactttacctgagaatcgtacggtggagatgacgccggaggaagtgaaggagcggtttgaaaaattcagcgagagcttcgaaaacgcgtatagtaagcacagtgtctgcgtcgtagctgatccaaatatacgagacgagatcaaagtatcgatatcgagaaagctggtgccgatctatcgcgagttttacaacacgagaggttctgttatcttgggagaaggcgatggcgcgagaaacctgaactcagttgtccgatttacccctgaagatattgaaaactatttgtctgatttgttcagagagaagggtagttcggggaattcgtcagcctcttctccttcctcttgtcggtcaaggcaatccatgtcctaa

SEQ ID NO: 72192 - protein, 627 aa, Arabidopsis thaliana; identical to SEQ ID NO: 71859
  peptide (1)..(627): Ceres Seq. ID no. 4920919
  misc_feature (30)..(604): Pfam Name: Exo70 exocyst complex subunit Pfam Description: Exo70 exocyst complex subunit
  misc_feature (23)..(620): Homolog of NCBI NO: 15232699 NR Description: hypothetical protein; protein id: At3g09530.1 thaliana] >gi|6682232|gb|AAF23284.1|AC016661_9 hypothetical
  misc_feature (17)..(622): Homolog of NCBI NO: 15225082 NR Description: hypothetical protein; protein id: At2g39380.1
  misc_feature (13)..(626): Homolog of NCBI NO: 11278980 NR Description: hypothetical protein T26I12.30 - Arabidopsis >gi|7019648|emb|CAB75749.1| putative protein [Arabidopsis
  misc_feature (13)..(626): Homolog of NCBI NO: 22331801 NR Description: putative protein; protein id: At3g55150.1, by cDNA: gi_18377617, supported by cDNA: gi_20465378 [Arabidopsis >gi|18377618|gb|AAL66959.1| unknown protein [Arabidopsis
  misc_feature (22)..(619): Homolog of NCBI NO: 15238510 NR Description: putative protein; protein id: At5g59730.1, by cDNA: gi_13430533, supported by cDNA: gi_14334437, supported cDNA: gi_15010739, supported by cDNA: gi_16974428, supported by
  misc_feature (22)..(619): Homolog of NCBI NO: 23397263 NR Description: unknown protein [Arabidopsis thaliana]
  misc_feature (22)..(560): Homolog of NCBI NO: 23397289 NR Description: unknown protein [Arabidopsis thaliana]
  misc_feature (29)..(609): Homolog of NCBI NO: 15226917 NR Description: unknown protein; protein id: At2g28640.1
  misc_feature (30)..(609): Homolog of NCBI NO: 25308573 NR Description: hypothetical protein [imported] - Arabidopsis >gi|8439895|gb|AAF75081.1|AC007583_17 It contains a interferon domain PF|00143. EST gb|N96176 comes from this gene. [Arabidopsis
  misc_feature (133)..(603): Homolog of NCBI NO: 15218495 NR Description: unknown protein; protein id: At1g72470.1

SEQ ID NO: 72193 - protein, 622 aa, Arabidopsis thaliana; identical to SEQ ID NO: 71860
  peptide (1)..(622): Ceres Seq. ID no. 4920920
  misc_feature (25)..(599): Pfam Name: Exo70 exocyst complex subunit Pfam Description: Exo70 exocyst complex subunit
  misc_feature (18)..(615): Homolog of NCBI NO: 15232699 NR Description: hypothetical protein; protein id: At3g09530.1 thaliana] >gi|6682232|gb|AAF23284.1|AC016661_9 hypothetical
  misc_feature (12)..(617): Homolog of NCBI NO: 15225082 NR Description: hypothetical protein; protein id: At2g39380.1
  misc_feature (8)..(621): Homolog of NCBI NO: 11278980 NR Description: hypothetical protein T26I12.30 - Arabidopsis >gi|7019648|emb|CAB75749.1| putative protein [Arabidopsis
  misc_feature (8)..(621): Homolog of NCBI NO: 22331801 NR Description: putative protein; protein id: At3g55150.1, by cDNA: gi_18377617, supported by cDNA: gi_20465378 [Arabidopsis >gi|18377618|gb|AAL66959.1| unknown protein [Arabidopsis
  misc_feature (17)..(614): Homolog of NCBI NO: 15238510 NR Description: putative protein; protein id: At5g59730.1, by cDNA: gi_13430533, supported by cDNA: gi_14334437, supported cDNA: gi_15010739, supported by cDNA: gi_16974428, supported by
  misc_feature (17)..(614): Homolog of NCBI NO: 23397263 NR Description: unknown protein [Arabidopsis thaliana]
  misc_feature (17)..(555): Homolog of NCBI NO: 23397289 NR Description: unknown protein [Arabidopsis thaliana]
  misc_feature (24)..(604): Homolog of NCBI NO: 15226917 NR Description: unknown protein; protein id: At2g28640.1
  misc_feature (25)..(604): Homolog of NCBI NO: 25308573 NR Description: hypothetical protein [imported] - Arabidopsis >gi|8439895|gb|AAF75081.1|AC007583_17 It contains a interferon domain PF|00143. EST gb|N96176 comes from this gene. [Arabidopsis
  misc_feature (128)..(598): Homolog of NCBI NO: 15218495 NR Description: unknown protein; protein id: At1g72470.1

SEQ ID NO: 72194 - protein, 563 aa, Arabidopsis thaliana
  peptide (1)..(563): Ceres Seq. ID no. 4920921
  misc_feature (1)..(540): Pfam Name: Exo70 exocyst complex subunit Pfam Description: Exo70 exocyst complex subunit
  misc_feature (1)..(556): Homolog of NCBI NO: 15232699 NR Description: hypothetical protein; protein id: At3g09530.1 thaliana] >gi|6682232|gb|AAF23284.1|AC016661_9 hypothetical
  misc_feature (1)..(558): Homolog of NCBI NO: 15225082 NR Description: hypothetical protein; protein id: At2g39380.1
  misc_feature (1)..(562): Homolog of NCBI NO: 11278980 NR Description: hypothetical protein T26I12.30 - Arabidopsis >gi|7019648|emb|CAB75749.1| putative protein [Arabidopsis
  misc_feature (1)..(562): Homolog of NCBI NO: 22331801 NR Description: putative protein; protein id: At3g55150.1, by cDNA: gi_18377617, supported by cDNA: gi_20465378 [Arabidopsis >gi|18377618|gb|AAL66959.1| unknown protein [Arabidopsis
  misc_feature (1)..(555): Homolog of NCBI NO: 15238510 NR Description: putative protein; protein id: At5g59730.1, by cDNA: gi_13430533, supported by cDNA: gi_14334437, supported cDNA: gi_15010739, supported by cDNA: gi_16974428, supported by
  misc_feature (1)..(555): Homolog of NCBI NO: 23397263 NR Description: unknown protein [Arabidopsis thaliana]
  misc_feature (1)..(496): Homolog of NCBI NO: 23397289 NR Description: unknown protein [Arabidopsis thaliana]
  misc_feature (1)..(545): Homolog of NCBI NO: 15226917 NR Description: unknown protein; protein id: At2g28640.1
  misc_feature (1)..(545): Homolog of NCBI NO: 25308573 NR Description: hypothetical protein [imported] - Arabidopsis >gi|8439895|gb|AAF75081.1|AC007583_17 It contains a interferon domain PF|00143. EST gb|N96176 comes from this gene. [Arabidopsis
  misc_feature (69)..(539): Homolog of NCBI NO: 15218495 NR Description: unknown protein; protein id: At1g72470.1
MFYENKPEAMMFIERVKDLQKTMDVLVSEDPNSERLLRSHKLMQIAMKRLQKEFYQILSMNRAYLDPESVSTRSSLTSARSSYSDFPDYVEDLDTIIELEEVSTNVMTDLKSIAECMIGSGYAKECLSIYKSIRKSIIDEGIYRLEVEKTSTGKVKKMSWEVMELKIRSWLKAVKVSMETLFKGEKILCDHVFESSDAIRESCFSDISRDGALLLFGFPEIINTKTSKKHSPPEKVFRLLDMYTAIAGNWQAIESIFSFDSISVVRSLALKSLISLSESIRSLLVEFESGIQKDSSKVVVPGGGVHPLTISVMDHLSLLADYSNVLVDILAGSPPPDRSLLPESYFNVSESDDSPSSELTIRFAWIILVLLCKIDRKSIHYKDFSIQYLFLTNNLQHVVSRARSSNLKNLLGEDWITRHFAKMRQFAGSYKRLAWGPVVATLPENRTVEMTPEEVKERFEKFSESFENAYSKHSVCVVADPNIRDEIKVSISRKLVPIYREFYNTRGSVILGEGDGARNLNSVVRFTPEDIENYLSDLFREKGSSGNSSASSPSSCRSRQSMS

SEQ ID NO: 72195 - DNA, 852 bp, Arabidopsis thaliana
  misc_feature (1)..(852): Ceres Seq. ID no. 4921051
  misc_feature: MA Experiment ID: 20000355 Result: Up-regulated in Transcription
  misc_feature: MA Experiment 20000355 PARAMETER Experiment Name: At_Siliques_Sub_P Parameter: Age (day) Value: 21
  misc_feature: MA Experiment 20000355 PARAMETER Experiment Name: At_Siliques_Sub_P Parameter: Organism Value: A. thaliana
  misc_feature: MA Experiment 20000355 PARAMETER Experiment Name: At_Siliques_Sub_P Parameter: Plant Line Value: WS
  misc_feature: MA Experiment 20000355 PARAMETER Experiment Name: At_Siliques_Sub_P Parameter: Tissue Value: Less Than 5mm Siliques vs. Whole Plant
atggcgtcgtcgtctctcatgtatgtctctcctccagagtctatcctgtgggagaaacgttcgaaggcgattcttgataatataaagaattttgaagctgatttcatctgtctacaagaagtagacgagtaccatagttttttcgatagaaacatggaagctcaaggatactctggaattcctattgaaaataaagaaggctatgaatgcgcaatctttttcaagcccaaatttgcagagttcattacataccaaacaaccagaatccaaggatacaccaaatatgaaaacctttgcgtggcgccgagtagtagtaccgtaagtagtgagtctagtgacgttgttaacgctgaagagctttctgtggtaatggtagcgttcaagattttaaaaccatttaatcatgtcgttattattgcaagctctcatttaaaatccgggaaacctgatcgatgggatgatttaaagctagctcaagtcaagactctaatgactgaattagcctcgttcaaggagattatatcagcgctaacaaattgcagtccatcggtgatccttgctggtgacttcaattcgaaaccctacgtgcataaatacataaattcagacaatataccgtctgatattgatctacgaagtgtgtatgaatttacgaaaggagagccaaggttcacaaataatgtgccagggtttgctgaaacactcgattacatgttctacacgcattctgaaattatttctcctgtgaagctcctggattcgccggacgaagtcgatttcttacccaatgaaattcatccgagtgatcatttacccatcggcgttgagtttgagatcaaccgaaacatatag

SEQ ID NO: 72196 - protein, 283 aa, Arabidopsis thaliana; identical to SEQ ID NO: 71596
  peptide (1)..(283): Ceres Seq. ID no. 4921052
  misc_feature (24)..(277): Pfam Name: Endonuclease/Exonuclease/phosphatase family Pfam Description: Endonuclease/Exonuclease/phosphatase family
  misc_feature (1)..(283): Homolog of NCBI NO: 15222370 NR Description: hypothetical protein; protein id: At1g31530.1 thaliana] >gi|12597850|gb|AAG60160.1|AC074360_25 hypothetical
  misc_feature (14)..(283): Homolog of NCBI NO: 12322536 NR Description: hypothetical protein [Arabidopsis thaliana]
  misc_feature (123)..(281): Homolog of NCBI NO: 15222367 NR Description: hypothetical protein; protein id: At1g31500.1 thaliana] >gi|12322547|gb|AAG51276.1|AC027135_17 hypothetical [Arabidopsis thaliana] >gi|12597833|gb|AAG60143.1|AC074360_8
  misc_feature (17)..(119): Homolog of NCBI NO: 15222367 NR Description: hypothetical protein; protein id: At1g31500.1 thaliana] >gi|12322547|gb|AAG51276.1|AC027135_17 hypothetical [Arabidopsis thaliana] >gi|12597833|gb|AAG60143.1|AC074360_8
  misc_feature (123)..(281): Homolog of NCBI NO: 28973671 NR Description: unknown protein [Arabidopsis thaliana]
  misc_feature (17)..(194): Homolog of NCBI NO: 28973671 NR Description: unknown protein [Arabidopsis thaliana]

SEQ ID NO: 72197 - protein, 277 aa, Arabidopsis thaliana; identical to SEQ ID NO: 71597
  peptide (1)..(277): Ceres Seq. ID no. 4921053
  misc_feature (18)..(271): Pfam Name: Endonuclease/Exonuclease/phosphatase family Pfam Description: Endonuclease/Exonuclease/phosphatase family
  misc_feature (1)..(277): Homolog of NCBI NO: 15222370 NR Description: hypothetical protein; protein id: At1g31530.1 thaliana] >gi|12597850|gb|AAG60160.1|AC074360_25 hypothetical
  misc_feature (8)..(277): Homolog of NCBI NO: 12322536 NR Description: hypothetical protein [Arabidopsis thaliana]
  misc_feature (117)..(275): Homolog of NCBI NO: 15222367 NR Description: hypothetical protein; protein id: At1g31500.1 thaliana] >gi|12322547|gb|AAG51276.1|AC027135_17 hypothetical [Arabidopsis thaliana] >gi|12597833|gb|AAG60143.1|AC074360_8
  misc_feature (11)..(113): Homolog of NCBI NO: 15222367 NR Description: hypothetical protein; protein id: At1g31500.1 thaliana] >gi|12322547|gb|AAG51276.1|AC027135_17 hypothetical [Arabidopsis thaliana] >gi|12597833|gb|AAG60143.1|AC074360_8
  misc_feature (117)..(275): Homolog of NCBI NO: 28973671 NR Description: unknown protein [Arabidopsis thaliana]
  misc_feature (11)..(188): Homolog of NCBI NO: 28973671 NR Description: unknown protein [Arabidopsis thaliana]

SEQ ID NO: 72198 - protein, 232 aa, Arabidopsis thaliana
  peptide (1)..(232): Ceres Seq. ID no. 4921054
  misc_feature (1)..(226): Pfam Name: Endonuclease/Exonuclease/phosphatase family Pfam Description: Endonuclease/Exonuclease/phosphatase family
  misc_feature (1)..(232): Homolog of NCBI NO: 15222370 NR Description: hypothetical protein; protein id: At1g31530.1 thaliana] >gi|12597850|gb|AAG60160.1|AC074360_25 hypothetical
  misc_feature (1)..(232): Homolog of NCBI NO: 12322536 NR Description: hypothetical protein [Arabidopsis thaliana]
  misc_feature (72)..(230): Homolog of NCBI NO: 15222367 NR Description: hypothetical protein; protein id: At1g31500.1 thaliana] >gi|12322547|gb|AAG51276.1|AC027135_17 hypothetical [Arabidopsis thaliana] >gi|12597833|gb|AAG60143.1|AC074360_8
  misc_feature (1)..(68): Homolog of NCBI NO: 15222367 NR Description: hypothetical protein; protein id: At1g31500.1 thaliana] >gi|12322547|gb|AAG51276.1|AC027135_17 hypothetical [Arabidopsis thaliana] >gi|12597833|gb|AAG60143.1|AC074360_8
  misc_feature (72)..(230): Homolog of NCBI NO: 28973671 NR Description: unknown protein [Arabidopsis thaliana]
  misc_feature (1)..(143): Homolog of NCBI NO: 28973671 NR Description: unknown protein [Arabidopsis thaliana]
MEAQGYSGIPIENKEGYECAIFFKPKFAEFITYQTTRIQGYTKYENLCVAPSSSTVSSESSDVVNAEELSVVMVAFKILKPFNHVVIIASSHLKSGKPDRWDDLKLAQVKTLMTELASFKEIISALTNCSPSVILAGDFNSKPYVHKYINSDNIPSDIDLRSVYEFTKGEPRFTNNVPGFAETLDYMFYTHSEIISPVKLLDSPDEVDFLPNEIHPSDHLPIGVEFEINRNI

SEQ ID NO: 72199 - DNA, 1200 bp, Arabidopsis thaliana
  misc_feature (1)..(1200): Ceres Seq. ID no. 4922754
  misc_feature: MA Experiment ID: 20000180 Result: Down-regulated in Transcription
  misc_feature: MA Experiment 20000180 PARAMETER Experiment Name: At_Germinating_Seeds_P Parameter: Age (hr) Value: 24 vs. 0
  misc_feature: MA Experiment 20000180 PARAMETER Experiment Name: At_Germinating_Seeds_P Parameter: Tissue Value: Germinating Seeds
  misc_feature: MA Experiment ID: 20000227 Result: Up-regulated in Transcription
  misc_feature: MA Experiment 20000227 PARAMETER Experiment Name: At_Root-Tips-vs-Tops_P Parameter: Tissue Value: Root Tips vs. Root Tops
  misc_feature: MA Experiment ID: 20000794 Result: Up-regulated in Transcription
  misc_feature: MA Experiment 20000794 PARAMETER Experiment Name: At_Petals_P Parameter: Age (day) Value: 23-25 days
  misc_feature: MA Experiment 20000794 PARAMETER Experiment Name: At_Petals_P Parameter: Plant Line Value: WS
  misc_feature: MA Experiment 20000794 PARAMETER Experiment Name: At_Petals_P Parameter: Tissue Value: Petals vs. Whole plant
atgggagcggtgacgtcatcaatggcggcgaagtttgcgtttttcccgccaaatccgccgtcgtacggcgtagaagtggtggaaggaaagctgaggctgattggtgtagagaacgtgaaggagaatgttgaagtattgaagctgaagacgaagagaggtaatcaggtggttgcggcgtatattaagaatcctacagcttcacttacgcttctttattctcatggtaacgccgcggatcttggtcagatgttcgagcttttctccgagcttagcctccatcttcgtgttaacttaattgggtatgattattcgggttatgggagatcttcagggaagcctagtgagcagaacacgtatagcgatatagaagcagtgtatagatgcttggaagagaagtatggtgtgaaggaacaagatgttatcttatatggacaatctgtaggaagcggcccgactttagaattggcttctcggttacctaacctacgagccgtggttcttcatagcgctattgcttccggacttagagtcatgtaccctgttaaacgaacttactggttcgacatttacaagaatgtcgagaagatatcgtttgtcaaatgtccggttttagtaatacacggaacatcagatgatgttgttaattggtctcatgggaagcaattatttgagctatgtaaagaaaaatatgaaccgctttggatcaaaggagggaaccattgtgatttagagttatatccgcaatacataaagcatctaagaaaatttgtatcggcgattgaaaagtcgccgatacttagaaatggaccggtgccactaacagagaaggcaaggagtagtacggatattagagaacctgcaagaccaagcacagatcagagagataaatcaagaacaagcacggatcaaagagagatgccgaagctgagtacagatatagcgagagcaagcgttgataagagggagagaacgagaagaagcgttgatgggactgagaaaccgagtaattccgcggaacagcaactagtacaaccagagaaaggaaggaatagcattgacaggtacatttctcagagtttctatgatgtgttgatgatcatgttgttgatgatcatgtatgataacaggtttggggagatgataagatcagtaggattttgcaacatagattgtttcaagcctacagcaacagctaagtga

SEQ ID NO: 72200 - protein, 399 aa, Arabidopsis thaliana
  peptide (1)..(399): Ceres Seq. ID no. 4922755
  misc_feature (99)..(167): Pfam Name: alpha/beta hydrolase fold Pfam Description: alpha/beta hydrolase fold
  misc_feature (1)..(399): Homolog of NCBI NO: 15230760 NR Description: unknown protein; protein id: At3g30380.1 thaliana] >gi|9294341|dbj|BAB02238.1| contains similarity to
  misc_feature (1)..(354): Homolog of NCBI NO: 15232168 NR Description: unknown protein; protein id: At3g01690.1 thaliana] >gi|6016726|gb|AAF01552.1|AC009325_22 unknown protein thaliana] >gi|6091713|gb|AAF03425.1|AC010797_1 unknown protein
  misc_feature (1)..(353): Homolog of NCBI NO: 15233975 NR Description: putative protein; protein id: At4g24760.1, by cDNA: 121159., supported by cDNA: gi_18175920 [Arabidopsis
  misc_feature (1)..(354): Homolog of NCBI NO: 15241394 NR Description: putative protein; protein id: At5g14390.1, by cDNA: gi_17529313 [Arabidopsis thaliana]
  misc_feature (1)..(328): Homolog of NCBI NO: 10177798 NR Description: emb|CAB87778.1~gene_id:MXA21.9~strong similarity unknown protein [Arabidopsis thaliana] unknown protein [Arabidopsis thaliana]
  misc_feature (40)..(339): Homolog of NCBI NO: 34911338 NR Description: P0519D04.38 [Oryza sativa (japonica
  misc_feature (1)..(33): Homolog of NCBI NO: 34911338 NR Description: P0519D04.38 [Oryza sativa (japonica
  misc_feature (1)..(328): Homolog of NCBI NO: 9802758 NR Description: Hypothetical protein [Arabidopsis thaliana]
  misc_feature (1)..(260): Homolog of NCBI NO: 22330474 NR Description: hypothetical protein; protein id: At1g66900.1, by cDNA: gi_17979070 [Arabidopsis thaliana] unknown protein [Arabidopsis thaliana]
  misc_feature (1)..(320): Homolog of NCBI NO: 25352159 NR Description: F21F23.4 protein - Arabidopsis thaliana Strong similarity to a hypothetical protein F22K18.40 gi|7485972
MGAVTSSMAAKFAFFPPNPPSYGVEVVEGKLRLIGVENVKENVEVLKLKTKRGNQVVAAYIKNPTASLTLLYSHGNAADLGQMFELFSELSLHLRVNLIGYDYSGYGRSSGKPSEQNTYSDIEAVYRCLEEKYGVKEQDVILYGQSVGSGPTLELASRLPNLRAVVLHSAIASGLRVMYPVKRTYWFDIYKNVEKISFVKCPVLVIHGTSDDVVNWSHGKQLFELCKEKYEPLWIKGGNHCDLELYPQYIKHLRKFVSAIEKSPILRNGPVPLTEKARSSTDIREPARPSTDQRDKSRTSTDQREMPKLSTDIARASVDKRERTRRSVDGTEKPSNSAEQQLVQPEKGRNSIDRYISQSFYDVLMIMLLMIMYDNRFGEMIRSVGFCNIDCFKPTATAK

SEQ ID NO: 72201 - protein, 392 aa, Arabidopsis thaliana
  peptide (1)..(392): Ceres Seq. ID no. 4922756
  misc_feature (92)..(160): Pfam Name: alpha/beta hydrolase fold Pfam Description: alpha/beta hydrolase fold
  misc_feature (1)..(392): Homolog of NCBI NO: 15230760 NR Description: unknown protein; protein id: At3g30380.1 thaliana] >gi|9294341|dbj|BAB02238.1| contains similarity to
  misc_feature (1)..(347): Homolog of NCBI NO: 15232168 NR Description: unknown protein; protein id: At3g01690.1 thaliana] >gi|6016726|gb|AAF01552.1|AC009325_22 unknown protein thaliana] >gi|6091713|gb|AAF03425.1|AC010797_1 unknown protein
  misc_feature (1)..(346): Homolog of NCBI NO: 15233975 NR Description: putative protein; protein id: At4g24760.1, by cDNA: 121159., supported by cDNA: gi_18175920 [Arabidopsis
  misc_feature (1)..(347): Homolog of NCBI NO: 15241394 NR Description: putative protein; protein id: At5g14390.1, by cDNA: gi_17529313 [Arabidopsis thaliana]
  misc_feature (1)..(321): Homolog of NCBI NO: 10177798 NR Description: emb|CAB87778.1~gene_id:MXA21.9~strong similarity unknown protein [Arabidopsis thaliana] unknown protein [Arabidopsis thaliana]
  misc_feature (33)..(332): Homolog of NCBI NO: 34911338 NR Description: P0519D04.38 [Oryza sativa (japonica
  misc_feature (1)..(26): Homolog of NCBI NO: 34911338 NR Description: P0519D04.38 [Oryza sativa (japonica
  misc_feature (1)..(321): Homolog of NCBI NO: 9802758 NR Description: Hypothetical protein [Arabidopsis thaliana]
  misc_feature (1)..(253): Homolog of NCBI NO: 22330474 NR Description: hypothetical protein; protein id: At1g66900.1, by cDNA: gi_17979070 [Arabidopsis thaliana] unknown protein [Arabidopsis thaliana]
  misc_feature (1)..(313): Homolog of NCBI NO: 25352159 NR Description: F21F23.4 protein - Arabidopsis thaliana Strong similarity to a hypothetical protein F22K18.40 gi|7485972
MAAKFAFFPPNPPSYGVEVVEGKLRLIGVENVKENVEVLKLKTKRGNQVVAAYIKNPTASLTLLYSHGNAADLGQMFELFSELSLHLRVNLIGYDYSGYGRSSGKPSEQNTYSDIEAVYRCLEEKYGVKEQDVILYGQSVGSGPTLELASRLPNLRAVVLHSAIASGLRVMYPVKRTYWFDIYKNVEKISFVKCPVLVIHGTSDDVVNWSHGKQLFELCKEKYEPLWIKGGNHCDLELYPQYIKHLRKFVSAIEKSPILRNGPVPLTEKARSSTDIREPARPSTDQRDKSRTSTDQREMPKLSTDIARASVDKRERTRRSVDGTEKPSNSAEQQLVQPEKGRNSIDRYISQSFYDVLMIMLLMIMYDNRFGEMIRSVGFCNIDCFKPTATAK

SEQ ID NO: 72202 - protein, 317 aa, Arabidopsis thaliana
  peptide (1)..(317): Ceres Seq. ID no. 4922757
  misc_feature (17)..(85): Pfam Name: alpha/beta hydrolase fold Pfam Description: alpha/beta hydrolase fold
  misc_feature (1)..(317): Homolog of NCBI NO: 15230760 NR Description: unknown protein; protein id: At3g30380.1 thaliana] >gi|9294341|dbj|BAB02238.1| contains similarity to
  misc_feature (1)..(272): Homolog of NCBI NO: 15232168 NR Description: unknown protein; protein id: At3g01690.1 thaliana] >gi|6016726|gb|AAF01552.1|AC009325_22 unknown protein thaliana] >gi|6091713|gb|AAF03425.1|AC010797_1 unknown protein
  misc_feature (1)..(271): Homolog of NCBI NO: 15233975 NR Description: putative protein; protein id: At4g24760.1, by cDNA: 121159., supported by cDNA: gi_18175920 [Arabidopsis
  misc_feature (1)..(272): Homolog of NCBI NO: 15241394 NR Description: putative protein; protein id: At5g14390.1, by cDNA: gi_17529313 [Arabidopsis thaliana]
  misc_feature (1)..(246): Homolog of NCBI NO: 10177798 NR Description: emb|CAB87778.1~gene_id:MXA21.9~strong similarity unknown protein [Arabidopsis thaliana] unknown protein [Arabidopsis thaliana]
  misc_feature (1)..(257): Homolog of NCBI NO: 34911338 NR Description: P0519D04.38 [Oryza sativa (japonica
  misc_feature (1)..(246): Homolog of NCBI NO: 9802758 NR Description: Hypothetical protein [Arabidopsis thaliana]
  misc_feature (1)..(178): Homolog of NCBI NO: 22330474 NR Description: hypothetical protein; protein id: At1g66900.1, by cDNA: gi_17979070 [Arabidopsis thaliana] unknown protein [Arabidopsis thaliana]
  misc_feature (1)..(238): Homolog of NCBI NO: 25352159 NR Description: F21F23.4 protein - Arabidopsis thaliana Strong similarity to a hypothetical protein F22K18.40 gi|7485972
  misc_feature (1)..(194): Homolog of NCBI NO: 28393521 NR Description: unknown protein [Arabidopsis thaliana]
MFELFSELSLHLRVNLIGYDYSGYGRSSGKPSEQNTYSDIEAVYRCLEEKYGVKEQDVILYGQSVGSGPTLELASRLPNLRAVVLHSAIASGLRVMYPVKRTYWFDIYKNVEKISFVKCPVLVIHGTSDDVVNWSHGKQLFELCKEKYEPLWIKGGNHCDLELYPQYIKHLRKFVSAIEKSPILRNGPVPLTEKARSSTDIREPARPSTDQRDKSRTSTDQREMPKLSTDIARASVDKRERTRRSVDGTEKPSNSAEQQLVQPEKGRNSIDRYISQSFYDVLMIMLLMIMYDNRFGEMIRSVGFCNIDCFKPTATAK

SEQ ID NO: 72203 - DNA, 570 bp, Arabidopsis thaliana
  misc_feature (1)..(570): Ceres Seq. ID no. 4923683
  misc_feature: MA Experiment ID: 20000265 Result: Up-regulated in Transcription
  misc_feature: MA Experiment 20000265 PARAMETER Experiment Name: At_Open_Flower_P Parameter: Age (day) Value: 21
  misc_feature: MA Experiment 20000265 PARAMETER Experiment Name: At_Open_Flower_P Parameter: Plant Line Value: WS
  misc_feature: MA Experiment 20000265 PARAMETER Experiment Name: At_Open_Flower_P Parameter: Tissue Value: Closed Flower vs. Whole Plant
  misc_feature: MA Experiment ID: 20000573 Result: Down-regulated in Transcription
  misc_feature: MA Experiment 20000573 PARAMETER Experiment Name: At_100uM_ABA_Mutants__P Parameter: Organism Value: A. thaliana
  misc_feature: MA Experiment 20000573 PARAMETER Experiment Name: At_100uM_ABA_Mutants__P Parameter: Plant Line Value: CS22 vs. Ler wt
  misc_feature: MA Experiment 20000573 PARAMETER Experiment Name: At_100uM_ABA_Mutants__P Parameter: Timepoint (hr) Value: N/A
  misc_feature: MA Experiment 20000573 PARAMETER Experiment Name: At_100uM_ABA_Mutants__P Parameter: Tissue Value: Whole Plant
  misc_feature: MA Experiment 20000573 PARAMETER Experiment Name: At_100uM_ABA_Mutants__P Parameter: Treatment Value: None
  misc_feature: MA Experiment ID: 20001558 Result: Up-regulated in Transcription
  misc_feature: MA Experiment 20001558 PARAMETER Experiment Name: At_Drought_Soil_Dry_P Parameter: Age (day) Value: 27
  misc_feature: MA Experiment 20001558 PARAMETER Experiment Name: At_Drought_Soil_Dry_P Parameter: Organism Value: A. thaliana
  misc_feature: MA Experiment 20001558 PARAMETER Experiment Name: At_Drought_Soil_Dry_P Parameter: Plant Line Value: WS
  misc_feature: MA Experiment 20001558 PARAMETER Experiment Name: At_Drought_Soil_Dry_P Parameter: Post Timepoint (hr) Value: 6
  misc_feature: MA Experiment 20001558 PARAMETER Experiment Name: At_Drought_Soil_Dry_P Parameter: Post-Treatment Value: Re-Water vs. No Drought
  misc_feature: MA Experiment 20001558 PARAMETER Experiment Name: At_Drought_Soil_Dry_P Parameter: Timepoint (day) Value: 13
  misc_feature: MA Experiment 20001558 PARAMETER Experiment Name: At_Drought_Soil_Dry_P Parameter: Treatment Value: Drought vs. No Drought
  misc_feature: MA Experiment ID: 20001909 Result: Up-regulated in Transcription
  misc_feature: MA Experiment 20001909 PARAMETER Experiment Name: At_Drought_Reproduction_P Parameter: Age (day) Value: 35
  misc_feature: MA Experiment 20001909 PARAMETER Experiment Name: At_Drought_Reproduction_P Parameter: Organism Value: A. thaliana
  misc_feature: MA Experiment 20001909 PARAMETER Experiment Name: At_Drought_Reproduction_P Parameter: Plant Line Value: WS
  misc_feature: MA Experiment 20001909 PARAMETER Experiment Name: At_Drought_Reproduction_P Parameter: Timepoint (day) Value: 5
  misc_feature: MA Experiment 20001909 PARAMETER Experiment Name: At_Drought_Reproduction_P Parameter: Tissue Value: Flowers
  misc_feature: MA Experiment 20001909 PARAMETER Experiment Name: At_Drought_Reproduction_P Parameter: Treatment Value: Drought vs. No Drought
atgaatgttttatcatgttccatcaacacactaataaaagaagggttatatgagatatttggtgtagaagtaggccaacatttctactggcaaatagggggtttccgggtccatgcccaagttcttagtaattcttgggttgtaattgctatcttattaggttctgcagttctagcgattcacaatccacaaacaattccaactgacggccaaaatttctttgaatttgtgcttgaattcattcgaaacataagtaaaacccagattggacaagaatatggtccatgggttccctttattggaaccctgtttttactatttttgtttctaattggtcaggagcccttttactggaaaattatccagttattacaaggggagttagtagcaccaacgaatgatataaatacgacggttgttttagctttactcacattagtagcctatttttatgcggggcttagcaaaaaacgattagggaatttcagtaaatacattcaaccaaccccaattcttttacacattaatatcttagaagattttacgaaacccctatcacttagtttttaa

SEQ ID NO: 72204 - protein, 189 aa, Arabidopsis thaliana
  peptide (1)..(189): Ceres Seq. ID no. 4923684
  misc_feature (93)..(189): Pfam Name: ATP synthase A chain Pfam Description: ATP synthase A chain
  misc_feature (1)..(172): Homolog of NCBI NO: 9884627 NR Description: ATP synthase CF0 A chain (subunit IV)-like
  misc_feature (1)..(189): Homolog of NCBI NO: 7525021 NR Description: ATP synthase CF0 A chain [Arabidopsis thaliana] ATP synthase A chain precursor (Subunit IV)
  misc_feature (1)..(189): Homolog of NCBI NO: 11465942 NR Description: ATP synthase CF0 A chain [Nicotiana tabacum] ATPase subunit IV [Atropa belladonna]
  misc_feature (1)..(189): Homolog of NCBI NO: 13518332 NR Description: ATP synthase CF0 A chain [Oenothera elata subsp. >gi|6723747|emb|CAB67156.1| ATP synthase subunit IV [Oenothera
  misc_feature (1)..(189): Homolog of NCBI NO: 32480831 NR Description: ATPase a subunit [Calycanthus fertilis var. >gi|32399367|emb|CAD28709.1| ATPase a subunit [Calycanthus
  misc_feature (1)..(189): Homolog of NCBI NO: 11466781 NR Description: ATP synthase CF0 A chain [Oryza sativa (japonica group)] >gi|114657|sp|P12083|ATPI_ORYSA ATP synthase A chain
  misc_feature (1)..(189): Homolog of NCBI NO: 14017566 NR Description: ATP synthase CF0 A chain [Triticum aestivum]
  misc_feature (1)..(189): Homolog of NCBI NO: 37533318 NR Description: putative ATPase a subunit from chromosome 10
  misc_feature (1)..(189): Homolog of NCBI NO: 11467186 NR Description: ATP synthase CF0 A chain [Zea mays]
  misc_feature (1)..(189): Homolog of NCBI NO: 31616543 NR Description: ATPase subunit IV [Chenopodium rubrum]
MNVLSCSINTLIKEGLYEIFGVEVGQHFYWQIGGFRVHAQVLSNSWVVIAILLGSAVLAIHNPQTIPTDGQNFFEFVLEFIRNISKTQIGQEYGPWVPFIGTLFLLFLFLIGQEPFYWKIIQLLQGELVAPTNDINTTVVLALLTLVAYFYAGLSKKRLGNFSKYIQPTPILLHINILEDFTKPLSLSF

SEQ ID NO: 72205 - DNA, 690 bp, Arabidopsis thaliana
  misc_feature (1)..(690): Ceres Seq. ID no. 4923701
  misc_feature: MA Experiment ID: 20000171 Result: Up-regulated in Transcription
  misc_feature: MA Experiment 20000171 PARAMETER Experiment Name: At_42deg_Heat_P Parameter: Age (day) Value: 14
  misc_feature: MA Experiment 20000171 PARAMETER Experiment Name: At_42deg_Heat_P Parameter: Organism Value: A. thaliana
  misc_feature: MA Experiment 20000171 PARAMETER Experiment Name: At_42deg_Heat_P Parameter: Plant Line Value: WS
  misc_feature: MA Experiment 20000171 PARAMETER Experiment Name: At_42deg_Heat_P Parameter: Temperature (deg C) Value: 42 vs. 22
  misc_feature: MA Experiment 20000171 PARAMETER Experiment Name: At_42deg_Heat_P Parameter: Timepoint (hr) Value: 1
  misc_feature: MA Experiment 20000171 PARAMETER Experiment Name: At_42deg_Heat_P Parameter: Tissue Value: Aerial
  misc_feature: MA Experiment ID: 20000173 Result: Up-regulated in Transcription
  misc_feature: MA Experiment 20000173 PARAMETER Experiment Name: At_42deg_Heat_P Parameter: Age (day) Value: 14
  misc_feature: MA Experiment 20000173 PARAMETER Experiment Name: At_42deg_Heat_P Parameter: Organism Value: A. thaliana
  misc_feature: MA Experiment 20000173 PARAMETER Experiment Name: At_42deg_Heat_P Parameter: Plant Line Value: WS
  misc_feature: MA Experiment 20000173 PARAMETER Experiment Name: At_42deg_Heat_P Parameter: Temperature (deg C) Value: 42 vs. 22
  misc_feature: MA Experiment 20000173 PARAMETER Experiment Name: At_42deg_Heat_P Parameter: Timepoint (hr) Value: 6
  misc_feature: MA Experiment 20000173 PARAMETER Experiment Name: At_42deg_Heat_P Parameter: Tissue Value: Aerial
atgtatctcagtcgtgctgtttctcctcgaaatgtcccggttttctctaccggatcttttgcccttgatgtagctttgggagttggtggccttcctaaggggcgtcttgtggagatatatggtcctgaagcatcgggaaagacagcacttgctcttcatatgctgagcatgctcttgattcgatcacttgctaaggcaatcggtgtaaatacagaaaatctgcttctatcacagcctgattgtggcaaacaggcccttagtcttgtggatactttgatccaaagtggttcagttgatgttattgtagttgatagtgtaagtaaggtggctgctcttgtacctaaaggagaactcgatggagagatgggtgatgcccatatggctattcaagccagattgatgagtcaagctttgcgtaaatttagccattctttattgttatcgcaaacacttctgatctttataaatcaggtaagagaacgatttggaggtccaacagaagttactagtggtggaaatgctttgaagttttatgcgcctatgcgtttggatattaagcgaattggacttatcaagaaaggcgaagagttcttcagaatgactaaatgcttgtgtttgaatgcttgtgcacacaacgggaagtcaagtctccgtgaagatagtgaagaacaagctcgctccgccatttaa

SEQ ID NO: 72206 - protein, 229 aa, Arabidopsis thaliana
  peptide (1)..(229): Ceres Seq. ID no. 4923702
  misc_feature (1)..(196): Pfam Name: recA bacterial DNA recombination protein Pfam Description: recA bacterial DNA recombination protein
  misc_feature (1)..(229): Homolog of NCBI NO: 15232794 NR Description: recA, putative; protein id: At3g32920.1
  misc_feature (1)..(196): Homolog of NCBI NO: 34907710 NR Description: putative RecA protein [Oryza sativa (japonica group)] >gi|20161025|dbj|BAB89958.1| putative RecA protein [Oryza
  misc_feature (1)..(164): Homolog of NCBI NO: 15224783 NR Description: putative recA protein; protein id: At2g19490.1
  misc_feature (62)..(196): Homolog of NCBI NO: 15224783 NR Description: putative recA protein; protein id: At2g19490.1
  misc_feature (12)..(196): Homolog of NCBI NO: 585797 NR Description: RecA protein (Recombinase A)
  misc_feature (10)..(195): Homolog of NCBI NO: 1350557 NR Description: RecA protein 2 (Recombinase A 2)
  misc_feature (10)..(196): Homolog of NCBI NO: 132241 NR Description: RecA protein (Recombinase A)
  misc_feature (1)..(196): Homolog of NCBI NO: 48781 NR Description: recA [Legionella pneumophila]
  misc_feature (1)..(196): Homolog of NCBI NO: 13186174 NR Description: RecA protein [Legionella pneumophila]
  misc_feature (1)..(196): Homolog of NCBI NO: 464597 NR Description: RecA protein (Recombinase A)
MYLSRAVSPRNVPVFSTGSFALDVALGVGGLPKGRLVEIYGPEASGKTALALHMLSMLLIRSLAKAIGVNTENLLLSQPDCGKQALSLVDTLIQSGSVDVIVVDSVSKVAALVPKGELDGEMGDAHMAIQARLMSQALRKFSHSLLLSQTLLIFINQVRERFGGPTEVTSGGNALKFYAPMRLDIKRIGLIKKGEEFFRMTKCLCLNACAHNGKSSLREDSEEQARSAI

SEQ ID NO: 72207 - protein, 176 aa, Arabidopsis thaliana
  peptide (1)..(176): Ceres Seq. ID no. 4923703
  misc_feature (1)..(143): Pfam Name: recA bacterial DNA recombination protein Pfam Description: recA bacterial DNA recombination protein
  misc_feature (1)..(176): Homolog of NCBI NO: 15232794 NR Description: recA, putative; protein id: At3g32920.1
  misc_feature (1)..(143): Homolog of NCBI NO: 34907710 NR Description: putative RecA protein [Oryza sativa (japonica group)] >gi|20161025|dbj|BAB89958.1| putative RecA protein [Oryza
  misc_feature (1)..(111): Homolog of NCBI NO: 15224783 NR Description: putative recA protein; protein id: At2g19490.1
  misc_feature (9)..(143): Homolog of NCBI NO: 15224783 NR Description: putative recA protein; protein id: At2g19490.1
  misc_feature (1)..(143): Homolog of NCBI NO: 585797 NR Description: RecA protein (Recombinase A)
  misc_feature (1)..(142): Homolog of NCBI NO: 1350557 NR Description: RecA protein 2 (Recombinase A 2)
  misc_feature (1)..(143): Homolog of NCBI NO: 132241 NR Description: RecA protein (Recombinase A)
  misc_feature (1)..(143): Homolog of NCBI NO: 48781 NR Description: recA [Legionella pneumophila]
  misc_feature (1)..(143): Homolog of NCBI NO: 464597 NR Description: RecA protein (Recombinase A)
  misc_feature (1)..(143): Homolog of NCBI NO: 13186174 NR Description: RecA protein [Legionella pneumophila]
MLSMLLIRSLAKAIGVNTENLLLSQPDCGKQALSLVDTLIQSGSVDVIVVDSVSKVAALVPKGELDGEMGDAHMAIQARLMSQALRKFSHSLLLSQTLLIFINQVRERFGGPTEVTSGGNALKFYAPMRLDIKRIGLIKKGEEFFRMTKCLCLNACAHNGKSSLREDSEEQARSAI

SEQ ID NO: 72208 - protein, 173 aa, Arabidopsis thaliana
  peptide (1)..(173): Ceres Seq. ID no. 4923704
  misc_feature (1)..(140): Pfam Name: recA bacterial DNA recombination protein Pfam Description: recA bacterial DNA recombination protein
  misc_feature (1)..(173): Homolog of NCBI NO: 15232794 NR Description: recA, putative; protein id: At3g32920.1
  misc_feature (1)..(140): Homolog of NCBI NO: 34907710 NR Description: putative RecA protein [Oryza sativa (japonica group)] >gi|20161025|dbj|BAB89958.1| putative RecA protein [Oryza
  misc_feature (1)..(108): Homolog of NCBI NO: 15224783 NR Description: putative recA protein; protein id: At2g19490.1
  misc_feature (6)..(140): Homolog of NCBI NO: 15224783 NR Description: putative recA protein; protein id: At2g19490.1
  misc_feature (1)..(140): Homolog of NCBI NO: 585797 NR Description: RecA protein (Recombinase A)
  misc_feature (1)..(139): Homolog of NCBI NO: 1350557 NR Description: RecA protein 2 (Recombinase A 2)
  misc_feature (1)..(140): Homolog of NCBI NO: 132241 NR Description: RecA protein (Recombinase A)
  misc_feature (1)..(140): Homolog of NCBI NO: 48781 NR Description: recA [Legionella pneumophila]
  misc_feature (1)..(140): Homolog of NCBI NO: 464597 NR Description: RecA protein (Recombinase A)
  misc_feature (1)..(140): Homolog of NCBI NO: 13186174 NR Description: RecA protein [Legionella pneumophila]
MLLIRSLAKAIGVNTENLLLSQPDCGKQALSLVDTLIQSGSVDVIVVDSVSKVAALVPKGELDGEMGDAHMAIQARLMSQALRKFSHSLLLSQTLLIFINQVRERFGGPTEVTSGGNALKFYAPMRLDIKRIGLIKKGEEFFRMTKCLCLNACAHNGKSSLREDSEEQARSAI

SEQ ID NO: 72209 - DNA, 1854 bp, Arabidopsis thaliana
  misc_feature (1)..(1854): Ceres Seq. ID no. 4924786
  misc_feature: MA Experiment ID: 20000439 Result: Down-regulated in Transcription
  misc_feature: MA Experiment 20000439 PARAMETER Experiment Name: At_Roots__P Parameter: Age (day) Value: 14 vs. 21
  misc_feature: MA Experiment 20000439 PARAMETER Experiment Name: At_Roots__P Parameter: Organism Value: A. thaliana
  misc_feature: MA Experiment 20000439 PARAMETER Experiment Name: At_Roots__P Parameter: Tissue Value: Roots vs. Whole Plant
atgttttcgttatcgttaatccaaccgcgtctccggatttcagagattccggtgactcaatcctacaaatctccgacgatatgttacagtagcgattcaagaactaagcgagaggaacagagacacgtgagattacctgggtttcgattagtttctggaaagagagcatctttcgattcgggttttagtggtttcaaaggagagaatgtgaatcaggatgattcgtcttctttcgatagcgaaagagttgattatgctctgttagcggagtggctacagtcttctaatgggatgcgactcattaaaaggatccatgcgatggcgttgaagtgttttgatgatcaagttatctattttgggaacaatttgattagttcttgtgttagacttggtgatttggtttatgcacgtaaagtgttcgacagtatgcctgagaaaaatactgttacttggactgctatgattgatgggtatttgaagtatggtcttgaggatgaggcttttgcactgtttgaggattatgtgaagcatggaatacgttttacgaacgagaggatgtttgtgtgtttgttgaatctgtgtagtaggagagcagagtttgagttagggagacaagttcatggtaatatggtgaaagttggagtggggaatctcattgtggagagttctcttgtttatttttatgcgcaatgcggtgaattgacaagtgcgttacgagcttttgatatgatggaggagaaagatgtgatatcttggactgctgttatatcggcgtgttcgagaaaagggcatggaattaaagctataggcatgtttatcggaatgttgaatcactggtttttgcctaacgagtttacggtgtgcagtattttgaaggcttgtagtgaggagaaagcgttaagattcggaaggcaagtacacagcttggttgttaagaggatgataaagacagatgtttttgtgggaacttcgctgatggacatgtatgctaagtgtggggagatttctgattgcagaaaagtgtttgatggaatgagtaatagaaacacggtcacatggacttcgattatagctgctcatgctcgggaaggttttggtgaggaagctatcagcctcttccggataatgaagaggcggcatttgattgctaacaatttgacagtagtaagcattcttagagcgtgtggatctgttggagctttattgttggggaaggaacttcatgcacagattatcaagaattcgatcgaaaagaatgtctatataggaagtactttggtgtggctgtattgtaaatgcggagaatctcgtgacgctttcaatgttctccagcaattgccatctagagatgtggtttcatggaccgctatgatctctggatgttcgagcttaggacatgaatcggaagcgctagacttcttgaaagagatgattcaagaaggtgtagagccaaacccatttacatactcctcggctttaaaagcttgtgcgaattcagaatctcttcttatcggtagatcaatccattccattgcaaagaagaatcatgctctatcaaatgtctttgtgggaagtgctttgattcacatgtatgcaaaatgtggatttgtctcggaagcttttcgggtttttgacagtatgcctgagaagaacttggtttcatggaaggcgatgataatgggttatgcgaggaatgggttttgcagggaagcattgaagctaatgtatagaatggaggcagagggatttgaagttgatgattatatatttgcaacaattctctctacttgtggagatattgagctcgatgaagctgttgaatcttctgcaacttgttacttggagacatcttga

SEQ ID NO: 72210 - protein, 617 aa, Arabidopsis thaliana
  peptide (1)..(617): Ceres Seq. ID no. 4924787
  misc_feature (250)..(284): Pfam Name: PPR repeat Pfam Description: PPR repeat
  misc_feature (128)..(388): Homolog of NCBI NO: 30684439 NR Description: pentatricopeptide (PPR) repeat-containing protein
  misc_feature (406)..(617): Homolog of NCBI NO: 30684439 NR Description: pentatricopeptide (PPR) repeat-containing protein
  misc_feature (128)..(388): Homolog of NCBI NO: 7486295 NR Description: hypothetical protein F28J12.180 - Arabidopsis >gi|2832657|emb|CAA16732.1| putative protein [Arabidopsis >gi|7268645|emb|CAB78854.1| putative protein [Arabidopsis
  misc_feature (406)..(617): Homolog of NCBI NO: 7486295 NR Description: hypothetical protein F28J12.180 - Arabidopsis >gi|2832657|emb|CAA16732.1| putative protein [Arabidopsis >gi|7268645|emb|CAB78854.1| putative protein [Arabidopsis
  misc_feature (1)..(163): Homolog of NCBI NO: 30684439 NR Description: pentatricopeptide (PPR) repeat-containing protein
  misc_feature (1)..(163): Homolog of NCBI NO: 7486295 NR Description: hypothetical protein F28J12.180 - Arabidopsis >gi|2832657|emb|CAA16732.1| putative protein [Arabidopsis >gi|7268645|emb|CAB78854.1| putative protein [Arabidopsis
  misc_feature (78)..(320): Homolog of NCBI NO: 30684439 NR Description: pentatricopeptide (PPR) repeat-containing protein
  misc_feature (78)..(320): Homolog of NCBI NO: 7486295 NR Description: hypothetical protein F28J12.180 - Arabidopsis >gi|2832657|emb|CAA16732.1| putative protein [Arabidopsis >gi|7268645|emb|CAB78854.1| putative protein [Arabidopsis
  misc_feature (205)..(398): Homolog of NCBI NO: 30684439 NR Description: pentatricopeptide (PPR) repeat-containing protein
  misc_feature (305)..(500): Homolog of NCBI NO: 30684439 NR Description: pentatricopeptide (PPR) repeat-containing protein
MFSLSLIQPRLRISEIPVTQSYKSPTICYSSDSRTKREEQRHVRLPGFRLVSGKRASFDSGFSGFKGENVNQDDSSSFDSERVDYALLAEWLQSSNGMRLIKRIHAMALKCFDDQVIYFGNNLISSCVRLGDLVYARKVFDSMPEKNTVTWTAMIDGYLKYGLEDEAFALFEDYVKHGIRFTNERMFVCLLNLCSRRAEFELGRQVHGNMVKVGVGNLIVESSLVYFYAQCGELTSALRAFDMMEEKDVISWTAVISACSRKGHGIKAIGMFIGMLNHWFLPNEFTVCSILKACSEEKALRFGRQVHSLVVKRMIKTDVFVGTSLMDMYAKCGEISDCRKVFDGMSNRNTVTWTSIIAAHAREGFGEEAISLFRIMKRRHLIANNLTVVSILRACGSVGALLLGKELHAQIIKNSIEKNVYIGSTLVWLYCKCGESRDAFNVLQQLPSRDVVSWTAMISGCSSLGHESEALDFLKEMIQEGVEPNPFTYSSALKACANSESLLIGRSIHSIAKKNHALSNVFVGSALIHMYAKCGFVSEAFRVFDSMPEKNLVSWKAMIMGYARNGFCREALKLMYRMEAEGFEVDDYIFATILSTCGDIELDEAVESSATCYLETS

SEQ ID NO: 72211 - protein, 520 aa, Arabidopsis thaliana
  peptide (1)..(520): Ceres Seq. ID no. 4924788
  misc_feature (153)..(187): Pfam Name: PPR repeat Pfam Description: PPR repeat
  misc_feature (31)..(291): Homolog of NCBI NO: 30684439 NR Description: pentatricopeptide (PPR) repeat-containing protein
  misc_feature (309)..(520): Homolog of NCBI NO: 30684439 NR Description: pentatricopeptide (PPR) repeat-containing protein
  misc_feature (31)..(291): Homolog of NCBI NO: 7486295 NR Description: hypothetical protein F28J12.180 - Arabidopsis >gi|2832657|emb|CAA16732.1| putative protein [Arabidopsis >gi|7268645|emb|CAB78854.1| putative protein [Arabidopsis
  misc_feature (309)..(520): Homolog of NCBI NO: 7486295 NR Description: hypothetical protein F28J12.180 - Arabidopsis >gi|2832657|emb|CAA16732.1| putative protein [Arabidopsis >gi|7268645|emb|CAB78854.1| putative protein [Arabidopsis
  misc_feature (1)..(66): Homolog of NCBI NO: 30684439 NR Description: pentatricopeptide (PPR) repeat-containing protein
  misc_feature (1)..(66): Homolog of NCBI NO: 7486295 NR Description: hypothetical protein F28J12.180 - Arabidopsis >gi|2832657|emb|CAA16732.1| putative protein [Arabidopsis >gi|7268645|emb|CAB78854.1| putative protein [Arabidopsis
  misc_feature (1)..(223): Homolog of NCBI NO: 30684439 NR Description: pentatricopeptide (PPR) repeat-containing protein
  misc_feature (1)..(223): Homolog of NCBI NO: 7486295 NR Description: hypothetical protein F28J12.180 - Arabidopsis >gi|2832657|emb|CAA16732.1| putative protein [Arabidopsis >gi|7268645|emb|CAB78854.1| putative protein [Arabidopsis
  misc_feature (108)..(301): Homolog of NCBI NO: 30684439 NR Description: pentatricopeptide (PPR) repeat-containing protein
  misc_feature (208)..(403): Homolog of NCBI NO: 30684439 NR Description: pentatricopeptide (PPR) repeat-containing protein
MRLIKRIHAMALKCFDDQVIYFGNNLISSCVRLGDLVYARKVFDSMPEKNTVTWTAMIDGYLKYGLEDEAFALFEDYVKHGIRFTNERMFVCLLNLCSRRAEFELGRQVHGNMVKVGVGNLIVESSLVYFYAQCGELTSALRAFDMMEEKDVISWTAVISACSRKGHGIKAIGMFIGMLNHWFLPNEFTVCSILKACSEEKALRFGRQVHSLVVKRMIKTDVFVGTSLMDMYAKCGEISDCRKVFDGMSNRNTVTWTSIIAAHAREGFGEEAISLFRIMKRRHLIANNLTVVSILRACGSVGALLLGKELHAQIIKNSIEKNVYIGSTLVWLYCKCGESRDAFNVLQQLPSRDVVSWTAMISGCSSLGHESEALDFLKEMIQEGVEPNPFTYSSALKACANSESLLIGRSIHSIAKKNHALSNVFVGSALIHMYAKCGFVSEAFRVFDSMPEKNLVSWKAMIMGYARNGFCREALKLMYRMEAEGFEVDDYIFATILSTCGDIELDEAVESSATCYLETS

SEQ ID NO: 72212 - protein, 511 aa, Arabidopsis thaliana
  peptide (1)..(511): Ceres Seq. ID no. 4924789
  misc_feature (144)..(178): Pfam Name: PPR repeat Pfam Description: PPR repeat
  misc_feature (22)..(282): Homolog of NCBI NO: 30684439 NR Description: pentatricopeptide (PPR) repeat-containing protein
  misc_feature (300)..(511): Homolog of NCBI NO: 30684439 NR Description: pentatricopeptide (PPR) repeat-containing protein
  misc_feature (22)..(282): Homolog of NCBI NO: 7486295 NR Description: hypothetical protein F28J12.180 - Arabidopsis >gi|2832657|emb|CAA16732.1| putative protein [Arabidopsis >gi|7268645|emb|CAB78854.1| putative protein [Arabidopsis
  misc_feature (300)..(511): Homolog of NCBI NO: 7486295 NR Description: hypothetical protein F28J12.180 - Arabidopsis >gi|2832657|emb|CAA16732.1| putative protein [Arabidopsis >gi|7268645|emb|CAB78854.1| putative protein [Arabidopsis
  misc_feature (1)..(57): Homolog of NCBI NO: 30684439 NR Description: pentatricopeptide (PPR) repeat-containing protein
  misc_feature (1)..(57): Homolog of NCBI NO: 7486295 NR Description: hypothetical protein F28J12.180 - Arabidopsis >gi|2832657|emb|CAA16732.1| putative protein [Arabidopsis >gi|7268645|emb|CAB78854.1| putative protein [Arabidopsis
  misc_feature (1)..(214): Homolog of NCBI NO: 30684439 NR Description: pentatricopeptide (PPR) repeat-containing protein
  misc_feature (1)..(214): Homolog of NCBI NO: 7486295 NR Description: hypothetical protein F28J12.180 - Arabidopsis >gi|2832657|emb|CAA16732.1| putative protein [Arabidopsis >gi|7268645|emb|CAB78854.1| putative protein [Arabidopsis
  misc_feature (99)..(292): Homolog of NCBI NO: 30684439 NR Description: pentatricopeptide (PPR) repeat-containing protein
  misc_feature (199)..(394): Homolog of NCBI NO: 30684439 NR Description: pentatricopeptide (PPR) repeat-containing protein
MALKCFDDQVIYFGNNLISSCVRLGDLVYARKVFDSMPEKNTVTWTAMIDGYLKYGLEDEAFALFEDYVKHGIRFTNERMFVCLLNLCSRRAEFELGRQVHGNMVKVGVGNLIVESSLVYFYAQCGELTSALRAFDMMEEKDVISWTAVISACSRKGHGIKAIGMFIGMLNHWFLPNEFTVCSILKACSEEKALRFGRQVHSLVVKRMIKTDVFVGTSLMDMYAKCGEISDCRKVFDGMSNRNTVTWTSIIAAHAREGFGEEAISLFRIMKRRHLIANNLTVVSILRACGSVGALLLGKELHAQIIKNSIEKNVYIGSTLVWLYCKCGESRDAFNVLQQLPSRDVVSWTAMISGCSSLGHESEALDFLKEMIQEGVEPNPFTYSSALKACANSESLLIGRSIHSIAKKNHALSNVFVGSALIHMYAKCGFVSEAFRVFDSMPEKNLVSWKAMIMGYARNGFCREALKLMYRMEAEGFEVDDYIFATILSTCGDIELDEAVESSATCYLETS

SEQ ID NO: 72213 - DNA, 1885 bp, Arabidopsis thaliana
  misc_feature (1)..(1885): Ceres Seq. ID no. 4924830
  misc_feature: MA Experiment ID: 108461 Result: Down-regulated in Transcription
  misc_feature: MA Experiment 108461 PARAMETER Experiment Name: At_Germinating_Seeds_cDNA_P Parameter: Age (day) Value: 1 vs. 0
  misc_feature: MA Experiment 108461 PARAMETER Experiment Name: At_Germinating_Seeds_cDNA_P Parameter: Tissue Value: Germinating Seeds
  misc_feature: MA Experiment ID: 108561 Result: Up-regulated in Transcription
  misc_feature: MA Experiment 108561 PARAMETER Experiment Name: At_100uM_ABA_cDNA_P Parameter: Timepoint (hr) Value: 6
  misc_feature: MA Experiment 108561 PARAMETER Experiment Name: At_100uM_ABA_cDNA_P Parameter: Tissue Value: Aerial
  misc_feature: MA Experiment 108561 PARAMETER Experiment Name: At_100uM_ABA_cDNA_P Parameter: Treatment Value: 100uM ABA vs. No Treatment
  misc_feature: MA Experiment ID: 108573 Result: Up-regulated in Transcription
  misc_feature: MA Experiment 108573 PARAMETER Experiment Name: At_Drought_cDNA_P Parameter: Timepoint (hr) Value: 6
  misc_feature: MA Experiment 108573 PARAMETER Experiment Name: At_Drought_cDNA_P Parameter: Tissue Value: Aerial
  misc_feature: MA Experiment 108573 PARAMETER Experiment Name: At_Drought_cDNA_P Parameter: Treatment Value: Drought vs. No Drought
  misc_feature: MA Experiment ID: 108574 Result: Up-regulated in Transcription
  misc_feature: MA Experiment 108574 PARAMETER Experiment Name: At_Wounding__cDNA_P Parameter: Timepoint (hr) Value: 1
  misc_feature: MA Experiment 108574 PARAMETER Experiment Name: At_Wounding__cDNA_P Parameter: Tissue Value: Aerial
  misc_feature: MA Experiment 108574 PARAMETER Experiment Name: At_Wounding__cDNA_P Parameter: Treatment Value: Wounding vs. No Wounding
  misc_feature: MA Experiment ID: 20000173 Result: Down-regulated in Transcription
  misc_feature: MA Experiment 20000173 PARAMETER Experiment Name: At_42deg_Heat_P Parameter: Age (day) Value: 14
  misc_feature: MA Experiment 20000173 PARAMETER Experiment Name: At_42deg_Heat_P Parameter: Organism Value: A. thaliana
  misc_feature: MA Experiment 20000173 PARAMETER Experiment Name: At_42deg_Heat_P Parameter: Plant Line Value: WS
  misc_feature: MA Experiment 20000173 PARAMETER Experiment Name: At_42deg_Heat_P Parameter: Temperature (deg C) Value: 42 vs. 22
  misc_feature: MA Experiment 20000173 PARAMETER Experiment Name: At_42deg_Heat_P Parameter: Timepoint (hr) Value: 6
  misc_feature: MA Experiment 20000173 PARAMETER Experiment Name: At_42deg_Heat_P Parameter: Tissue Value: Aerial
  misc_feature: MA Experiment ID: 20000227 Result: Down-regulated in Transcription
  misc_feature: MA Experiment 20000227 PARAMETER Experiment Name: At_Root-Tips-vs-Tops_P Parameter: Tissue Value: Root Tips vs. Root Tops
  misc_feature: MA Experiment ID: 20001248 Result: Down-regulated in Transcription
  misc_feature: MA Experiment 20001248 PARAMETER Experiment Name: At_Far-red-induction_P Parameter: Age (day) Value: 7
  misc_feature: MA Experiment 20001248 PARAMETER Experiment Name: At_Far-red-induction_P Parameter: Light Value: Far-red vs. White
  misc_feature: MA Experiment 20001248 PARAMETER Experiment Name: At_Far-red-induction_P Parameter: Organism Value: A. thaliana
  misc_feature: MA Experiment 20001248 PARAMETER Experiment Name: At_Far-red-induction_P Parameter: Plant Line Value: Columbia
  misc_feature: MA Experiment 20001248 PARAMETER Experiment Name: At_Far-red-induction_P Parameter: Timepoint (hr) Value: 4
  misc_feature: MA Experiment 20001248 PARAMETER Experiment Name: At_Far-red-induction_P Parameter: Tissue Value: Whole Plant
aaaaccaaacccacaaagtctctctctcttgctctctcggtgattcgattttcagaaccgaaactccggcgaaaagattatggcgggacagtcacgaaaatggatgatactggtggcgacgatatggattcaagctttcaccgggacgaatttcgatttctcagcttactcgtcagatttgaaatcggttctagggatttcacaggtgcagctaaactacctcgccgtggcttcggatctcggaaaagtattcggatggtcgtcgggactagcgcttatgtatttcccgctttggacggtgcttttcgcggcggcgtttatgggattcgtcggttatggagttcagtggcttgtcatcactcatttcatctctttgccttatatcatggtgtttctctgttgcttacttgctggtttaagtatctgttggttcaacactgtctgctttgtgctctgcattagtaacttccctgcaaacagatcacttgctctttccctcacagtgagtttcaatggtgtaagcgctgctttatatactcttgcttacaacgcaatcaatccaacttctccagagctatatcttcttttgaacgctcttataccgctcattgtctctttcactgctatcatcccgattcttcgtcaaccgccttttgagcctcttccaccagatggagttcgtcgtgactctctcatgtttctattgctcaacatactcgctgctttaaacggtgtttatctccttctctttggatcaaactcctctgatttaacctctgctcgtctactctttggtggagcaatcctcctcttggtattccctttatgtattcccggtttagtcatcgcccggaattggtataaccgcacaatccacactagtttccgtctagaaggttctggtttcattcttgttgatcctgatgagcttgagttgcataaagggatgcttgcacatgaagcaaaccgtgaaggttaccaattgctgagtgacgatgtggtgcaaaacccggttaagtccgtagctgttgaggaagaggatagtgatgagtcatgttgcaagaaacttatcacaagagatcagcttgaaggtttggggattgaacattctttgtcgctgctcttaaccagatcagatttttggttatactatatcacgtacttctgcggtggaaccattggacttgtgtacagcaacaaccttggacagattgctcaatctttaggacaaagctcaaataccacaactcttgtcacactttattctgctttctcattctttggaagattgctttctgcaacaccagattatatccgagcgaaggtttattttgccagaaccgggtggttagcaatcgcgctattaccaacccccttcgcacttttcttgcttgcatcatcaggaactgcatcagcattacaagctggaacagcgctgatgggtttaagctccgggtttatctttgcagcagcggtttccatcacatcagagctttttggaccaaacagtgttggagttaaccacaatatcttaatcacaaacataccgataggatcattgatctatggattcttggctgcattggtctatgactcacatggtttcaccgggaccaaatcaatgacctcggagtcggtggtgtgtatgggacgagattgttattacttgacctttgtgtggtggggttgcttgtctcttcttgggctaggttcgagtcttgtgttgtttattagaactagacgagcttatcaacggtttgaacaagctcgtataagttcgaacatcaacgactcttagaaatttgcatcaaccccaacggtttgtgtgtatatgtaggatctaaattataacagacggattaatggtattttagtggattttggc

SEQ ID NO: 72214 - protein, 572 aa, Arabidopsis thaliana; identical to SEQ ID NO: 38704
  peptide (1)..(572): Ceres Seq. ID no. 4924831
  misc_feature (344)..(508): Pfam Name: Sugar (and other) transporter Pfam Description: Sugar (and other) transporter
  misc_feature (1)..(572): Homolog of NCBI NO: 18415316 NR Description: putative protein; protein id: At4g19450.1, by cDNA: 100165. [Arabidopsis thaliana]
  misc_feature (1)..(572): Homolog of NCBI NO: 21536488 NR Description: unknown [Arabidopsis thaliana]
  misc_feature (142)..(572): Homolog of NCBI NO: 7487718 NR Description: hypothetical protein T5K18.230 - Arabidopsis >gi|3080375|emb|CAA18632.1| putative protein [Arabidopsis >gi|7268740|emb|CAB78947.1| putative protein [Arabidopsis
  misc_feature (1)..(313): Homolog of NCBI NO: 15222361 NR Description: hypothetical protein; protein id: At1g31470.1
  misc_feature (291)..(566): Homolog of NCBI NO: 15222361 NR Description: hypothetical protein; protein id: At1g31470.1
  misc_feature (277)..(567): Homolog of NCBI NO: 34907888 NR Description: P0031D02.33 [Oryza sativa (japonica
  misc_feature (5)..(256): Homolog of NCBI NO: 34907888 NR Description: P0031D02.33 [Oryza sativa (japonica
  misc_feature (174)..(565): Homolog of NCBI NO: 15232155 NR Description: hypothetical protein; protein id: At3g01630.1 thaliana] >gi|6016721|gb|AAF01547.1|AC009325_17 hypothetical
  misc_feature (6)..(298): Homolog of NCBI NO: 15232155 NR Description: hypothetical protein; protein id: At3g01630.1 thaliana] >gi|6016721|gb|AAF01547.1|AC009325_17 hypothetical
  misc_feature (6)..(298): Homolog of NCBI NO: 28393720 NR Description: unknown protein [Arabidopsis thaliana]

SEQ ID NO: 72215 - protein, 564 aa, Arabidopsis thaliana; identical to SEQ ID NO: 38705
  peptide (1)..(564): Ceres Seq. ID no. 4924832
  misc_feature (336)..(500): Pfam Name: Sugar (and other) transporter Pfam Description: Sugar (and other) transporter
  misc_feature (1)..(564): Homolog of NCBI NO: 18415316 NR Description: putative protein; protein id: At4g19450.1, by cDNA: 100165. [Arabidopsis thaliana]
  misc_feature (1)..(564): Homolog of NCBI NO: 21536488 NR Description: unknown [Arabidopsis thaliana]
  misc_feature (134)..(564): Homolog of NCBI NO: 7487718 NR Description: hypothetical protein T5K18.230 - Arabidopsis >gi|3080375|emb|CAA18632.1| putative protein [Arabidopsis >gi|7268740|emb|CAB78947.1| putative protein [Arabidopsis
  misc_feature (1)..(305): Homolog of NCBI NO: 15222361 NR Description: hypothetical protein; protein id: At1g31470.1
  misc_feature (283)..(558): Homolog of NCBI NO: 15222361 NR Description: hypothetical protein; protein id: At1g31470.1
  misc_feature (269)..(559): Homolog of NCBI NO: 34907888 NR Description: P0031D02.33 [Oryza sativa (japonica
  misc_feature (1)..(248): Homolog of NCBI NO: 34907888 NR Description: P0031D02.33 [Oryza sativa (japonica
  misc_feature (166)..(557): Homolog of NCBI NO: 15232155 NR Description: hypothetical protein; protein id: At3g01630.1 thaliana] >gi|6016721|gb|AAF01547.1|AC009325_17 hypothetical
  misc_feature (1)..(290): Homolog of NCBI NO: 15232155 NR Description: hypothetical protein; protein id: At3g01630.1 thaliana] >gi|6016721|gb|AAF01547.1|AC009325_17 hypothetical
  misc_feature (1)..(290): Homolog of NCBI NO: 28393720 NR Description: unknown protein [Arabidopsis thaliana]

SEQ ID NO: 72216 - protein, 506 aa, Arabidopsis thaliana; identical to SEQ ID NO: 38706
  peptide (1)..(506): Ceres Seq. ID no. 4924833
  misc_feature (278)..(442): Pfam Name: Sugar (and other) transporter Pfam Description: Sugar (and other) transporter
  misc_feature (1)..(506): Homolog of NCBI NO: 18415316 NR Description: putative protein; protein id: At4g19450.1, by cDNA: 100165. [Arabidopsis thaliana]
  misc_feature (1)..(506): Homolog of NCBI NO: 21536488 NR Description: unknown [Arabidopsis thaliana]
  misc_feature (76)..(506): Homolog of NCBI NO: 7487718 NR Description: hypothetical protein T5K18.230 - Arabidopsis >gi|3080375|emb|CAA18632.1| putative protein [Arabidopsis >gi|7268740|emb|CAB78947.1| putative protein [Arabidopsis
  misc_feature (1)..(247): Homolog of NCBI NO: 15222361 NR Description: hypothetical protein; protein id: At1g31470.1
  misc_feature (225)..(500): Homolog of NCBI NO: 15222361 NR Description: hypothetical protein; protein id: At1g31470.1
  misc_feature (211)..(501): Homolog of NCBI NO: 34907888 NR Description: P0031D02.33 [Oryza sativa (japonica
  misc_feature (1)..(190): Homolog of NCBI NO: 34907888 NR Description: P0031D02.33 [Oryza sativa (japonica
  misc_feature (108)..(499): Homolog of NCBI NO: 15232155 NR Description: hypothetical protein; protein id: At3g01630.1 thaliana] >gi|6016721|gb|AAF01547.1|AC009325_17 hypothetical
  misc_feature (1)..(232): Homolog of NCBI NO: 15232155 NR Description: hypothetical protein; protein id: At3g01630.1 thaliana] >gi|6016721|gb|AAF01547.1|AC009325_17 hypothetical
  misc_feature (1)..(232): Homolog of NCBI NO: 28393720 NR Description: unknown protein [Arabidopsis thaliana]

SEQ ID NO: 72217 - DNA, 720 bp, Arabidopsis thaliana
  misc_feature (1)..(720): Ceres Seq. ID no. 4925096
  misc_feature: MA Experiment ID: 20000234 Result: Up-regulated in Transcription
  misc_feature: MA Experiment 20000234 PARAMETER Experiment Name: At_Siliques_P Parameter: Age (day) Value: 21
  misc_feature: MA Experiment 20000234 PARAMETER Experiment Name: At_Siliques_P Parameter: Organism Value: A. thaliana
  misc_feature: MA Experiment 20000234 PARAMETER Experiment Name: At_Siliques_P Parameter: Plant Line Value: WS
  misc_feature: MA Experiment 20000234 PARAMETER Experiment Name: At_Siliques_P Parameter: Tissue Value: Less Than 5mm Siliques vs. Whole Plant
  misc_feature: MA Experiment ID: 20000264 Result: Up-regulated in Transcription
  misc_feature: MA Experiment 20000264 PARAMETER Experiment Name: At_Open_Flower_P Parameter: Age (day) Value: 21
  misc_feature: MA Experiment 20000264 PARAMETER Experiment Name: At_Open_Flower_P Parameter: Plant Line Value: WS
  misc_feature: MA Experiment 20000264 PARAMETER Experiment Name: At_Open_Flower_P Parameter: Tissue Value: Open Flower vs. Whole Plant
  misc_feature: MA Experiment ID: 20000265 Result: Up-regulated in Transcription
  misc_feature: MA Experiment 20000265 PARAMETER Experiment Name: At_Open_Flower_P Parameter: Age (day) Value: 21
  misc_feature: MA Experiment 20000265 PARAMETER Experiment Name: At_Open_Flower_P Parameter: Plant Line Value: WS
  misc_feature: MA Experiment 20000265 PARAMETER Experiment Name: At_Open_Flower_P Parameter: Tissue Value: Closed Flower vs. Whole Plant
  misc_feature: MA Experiment ID: 20000286 Result: Up-regulated in Transcription
  misc_feature: MA Experiment 20000286 PARAMETER Experiment Name: At_Open_Flower_P Parameter: Age (day) Value: 21
  misc_feature: MA Experiment 20000286 PARAMETER Experiment Name: At_Open_Flower_P Parameter: Plant Line Value: WS
  misc_feature: MA Experiment 20000286 PARAMETER Experiment Name: At_Open_Flower_P Parameter: Tissue Value: Half Open vs. Whole Plant
  misc_feature: MA Experiment ID: 20000794 Result: Up-regulated in Transcription
  misc_feature: MA Experiment 20000794 PARAMETER Experiment Name: At_Petals_P Parameter: Age (day) Value: 23-25 days
  misc_feature: MA Experiment 20000794 PARAMETER Experiment Name: At_Petals_P Parameter: Plant Line Value: WS
  misc_feature: MA Experiment 20000794 PARAMETER Experiment Name: At_Petals_P Parameter: Tissue Value: Petals vs. Whole plant
atgaactcacctcctccttcttctaatgatggcttggcgaagcgaaaaagaggtcgaccgcgcaaagatgaaaactcaactccaaaaccggacatgaatttggtaggtaaggtggttactggtgtaatcgaaggatctttcgacgcaggctatctccttaacgttaaggttaaagacagtgacacccaactcagaggtctcgtgttcatacggggcagagtcactccgatcactccagaaaacgacgtggctcctcttgttaaaatgtacggaagagaagatatcaagaacaaccaaaccgatcattctttccctactgatcaaccaatgcaagatgctgctgtcactactactgacatggatatttctgaatcctctcgagctttggtcgtagttccacaagcgaccaatggccaagcgaaggaagctacgaaggatgaagatggagtcattgaaggacaagctgacactcggttagtggagttttttccaactccaggcacaatgatgatgactgctcaaccaaatcttgtcttggtaccgaaagagacagaacaacagaaaacaactggtgggagtcatggattcgatcttatggaagaggaaccagttcgtcaaggagagaagttgccagaggagctattacatctagagcttggaaacaagacaacattgagtgtagacaacaacatctctacaacagaggcgcctgatctataa

SEQ ID NO: 72218 - protein, 239 aa, Arabidopsis thaliana
  peptide (1)..(239): Ceres Seq. ID no. 4925097
  misc_feature (1)..(239): Homolog of NCBI NO: 15234633 NR Description: putative protein; protein id: At4g21900.1
  misc_feature (7)..(130): Homolog of NCBI NO: 15237296 NR Description: putative protein; protein id: At5g52890.1 thaliana] >gi|10177103|dbj|BAB10437.1|
  misc_feature (21)..(98): Homolog of NCBI NO: 18423689 NR Description: putative protein; protein id: At5g54930.1, by cDNA: 30073. [Arabidopsis thaliana] AT5g54930/MBG8_20 [Arabidopsis thaliana]
  misc_feature (21)..(98): Homolog of NCBI NO: 9758273 NR Description: gene_id:MBG8.20~pir||T05472~similar to unknown
MNSPPPSSNDGLAKRKRGRPRKDENSTPKPDMNLVGKVVTGVIEGSFDAGYLLNVKVKDSDTQLRGLVFIRGRVTPITPENDVAPLVKMYGREDIKNNQTDHSFPTDQPMQDAAVTTTDMDISESSRALVVVPQATNGQAKEATKDEDGVIEGQADTRLVEFFPTPGTMMMTAQPNLVLVPKETEQQKTTGGSHGFDLMEEEPVRQGEKLPEELLHLELGNKTTLSVDNNISTTEAPDL

SEQ ID NO: 72219 - protein, 208 aa, Arabidopsis thaliana
  peptide (1)..(208): Ceres Seq. ID no. 4925098
  misc_feature (1)..(208): Homolog of NCBI NO: 15234633 NR Description: putative protein; protein id: At4g21900.1
  misc_feature (1)..(99): Homolog of NCBI NO: 15237296 NR Description: putative protein; protein id: At5g52890.1 thaliana] >gi|10177103|dbj|BAB10437.1|
  misc_feature (1)..(67): Homolog of NCBI NO: 18423689 NR Description: putative protein; protein id: At5g54930.1, by cDNA: 30073. [Arabidopsis thaliana] AT5g54930/MBG8_20 [Arabidopsis thaliana]
  misc_feature (1)..(67): Homolog of NCBI NO: 9758273 NR Description: gene_id:MBG8.20~pir||T05472~similar to unknown
MNLVGKVVTGVIEGSFDAGYLLNVKVKDSDTQLRGLVFIRGRVTPITPENDVAPLVKMYGREDIKNNQTDHSFPTDQPMQDAAVTTTDMDISESSRALVVVPQATNGQAKEATKDEDGVIEGQADTRLVEFFPTPGTMMMTAQPNLVLVPKETEQQKTTGGSHGFDLMEEEPVRQGEKLPEELLHLELGNKTTLSVDNNISTTEAPDL

SEQ ID NO: 72220 - protein, 151 aa, Arabidopsis thaliana
  peptide (1)..(151): Ceres Seq. ID no. 4925099
  misc_feature (1)..(151): Homolog of NCBI NO: 15234633 NR Description: putative protein; protein id: At4g21900.1
  misc_feature (1)..(42): Homolog of NCBI NO: 15237296 NR Description: putative protein; protein id: At5g52890.1 thaliana] >gi|10177103|dbj|BAB10437.1|
MYGREDIKNNQTDHSFPTDQPMQDAAVTTTDMDISESSRALVVVPQATNGQAKEATKDEDGVIEGQADTRLVEFFPTPGTMMMTAQPNLVLVPKETEQQKTTGGSHGFDLMEEEPVRQGEKLPEELLHLELGNKTTLSVDNNISTTEAPDL

SEQ ID NO: 72221 - DNA, 1590 bp, Arabidopsis thaliana
  misc_feature (1)..(1590): Ceres Seq. ID no. 4925263
  misc_feature: MA Experiment ID: 108434 Result: Down-regulated in Transcription
  misc_feature: MA Experiment 108434 PARAMETER Experiment Name: At_Root_Tips_cDNA_P Parameter: Tissue Value: Root Tips
  misc_feature: MA Experiment ID: 108463 Result: Up-regulated in Transcription
  misc_feature: MA Experiment 108463 PARAMETER Experiment Name: At_Germinating_Seeds_cDNA_P Parameter: Age (day) Value: 3 vs. 0
  misc_feature: MA Experiment 108463 PARAMETER Experiment Name: At_Germinating_Seeds_cDNA_P Parameter: Tissue Value: Germinating Seeds
  misc_feature: MA Experiment ID: 108561 Result: Up-regulated in Transcription
  misc_feature: MA Experiment 108561 PARAMETER Experiment Name: At_100uM_ABA_cDNA_P Parameter: Timepoint (hr) Value: 6
  misc_feature: MA Experiment 108561 PARAMETER Experiment Name: At_100uM_ABA_cDNA_P Parameter: Tissue Value: Aerial
  misc_feature: MA Experiment 108561 PARAMETER Experiment Name: At_100uM_ABA_cDNA_P Parameter: Treatment Value: 100uM ABA vs. No Treatment
  misc_feature: MA Experiment ID: 108573 Result: Up-regulated in Transcription
  misc_feature: MA Experiment 108573 PARAMETER Experiment Name: At_Drought_cDNA_P Parameter: Timepoint (hr) Value: 6
  misc_feature: MA Experiment 108573 PARAMETER Experiment Name: At_Drought_cDNA_P Parameter: Tissue Value: Aerial
  misc_feature: MA Experiment 108573 PARAMETER Experiment Name: At_Drought_cDNA_P Parameter: Treatment Value: Drought vs. No Drought
  misc_feature: MA Experiment ID: 108605 Result: Up-regulated in Transcription
  misc_feature: MA Experiment 108605 PARAMETER Experiment Name: At_100uM_ABA_cDNA_P Parameter: Timepoint (hr) Value: 6
  misc_feature: MA Experiment 108605 PARAMETER Experiment Name: At_100uM_ABA_cDNA_P Parameter: Tissue Value: Aerial
  misc_feature: MA Experiment 108605 PARAMETER Experiment Name: At_100uM_ABA_cDNA_P Parameter: Treatment Value: 100uM ABA vs. No Treatment
  misc_feature: MA Experiment ID: 108607 Result: Up-regulated in Transcription
  misc_feature: MA Experiment 108607 PARAMETER Experiment Name: At_100uM_ABA_cDNA_P Parameter: Timepoint (hr) Value: 4
  misc_feature: MA Experiment 108607 PARAMETER Experiment Name: At_100uM_ABA_cDNA_P Parameter: Tissue Value: Aerial
  misc_feature: MA Experiment 108607 PARAMETER Experiment Name: At_100uM_ABA_cDNA_P Parameter: Treatment Value: 100uM ABA vs. No Treatment
  misc_feature: MA Experiment ID: 20000069 Result: Up-regulated in Transcription
  misc_feature: MA Experiment 20000069 PARAMETER Experiment Name: At_100uM_ABA_Mutants_cDNA_P Parameter: Plant Line Value: CS23
  misc_feature: MA Experiment 20000069 PARAMETER Experiment Name: At_100uM_ABA_Mutants_cDNA_P Parameter: Timepoint (hr) Value: 6
  misc_feature: MA Experiment 20000069 PARAMETER Experiment Name: At_100uM_ABA_Mutants_cDNA_P Parameter: Tissue Value: Aerial
  misc_feature: MA Experiment 20000069 PARAMETER Experiment Name: At_100uM_ABA_Mutants_cDNA_P Parameter: Treatment Value: 100uM ABA vs. No Treatment
  misc_feature: MA Experiment ID: 20000070 Result: Up-regulated in Transcription
  misc_feature: MA Experiment 20000070 PARAMETER Experiment Name: At_100uM_ABA_Mutants_cDNA_P Parameter: Plant Line Value: CS24
  misc_feature: MA Experiment 20000070 PARAMETER Experiment Name: At_100uM_ABA_Mutants_cDNA_P Parameter: Timepoint (hr) Value: 6
  misc_feature: MA Experiment 20000070 PARAMETER Experiment Name: At_100uM_ABA_Mutants_cDNA_P Parameter: Tissue Value: Aerial
  misc_feature: MA Experiment 20000070 PARAMETER Experiment Name: At_100uM_ABA_Mutants_cDNA_P Parameter: Treatment Value: 100uM ABA vs. No Treatment
  misc_feature: MA Experiment ID: 20000071 Result: Up-regulated in Transcription
  misc_feature: MA Experiment 20000071 PARAMETER Experiment Name: At_100uM_ABA_Mutants_cDNA_P Parameter: Plant Line Value: CS8104
  misc_feature: MA Experiment 20000071 PARAMETER Experiment Name: At_100uM_ABA_Mutants_cDNA_P Parameter: Timepoint (hr) Value: 6
  misc_feature: MA Experiment 20000071 PARAMETER Experiment Name: At_100uM_ABA_Mutants_cDNA_P Parameter: Tissue Value: Aerial
  misc_feature: MA Experiment 20000071 PARAMETER Experiment Name: At_100uM_ABA_Mutants_cDNA_P Parameter: Treatment Value: 100uM ABA vs. No Treatment
  misc_feature: MA Experiment ID: 20000072 Result: Up-regulated in Transcription
  misc_feature: MA Experiment 20000072 PARAMETER Experiment Name: At_100uM_ABA_Mutants_cDNA_P Parameter: Plant Line Value: CS8105
  misc_feature: MA Experiment 20000072 PARAMETER Experiment Name: At_100uM_ABA_Mutants_cDNA_P Parameter: Timepoint (hr) Value: 6
  misc_feature: MA Experiment 20000072 PARAMETER Experiment Name: At_100uM_ABA_Mutants_cDNA_P Parameter: Tissue Value: Aerial
  misc_feature: MA Experiment 20000072 PARAMETER Experiment Name: At_100uM_ABA_Mutants_cDNA_P Parameter: Treatment Value: 100uM ABA vs. No Treatment
  misc_feature: MA Experiment ID: 20000086 Result: Up-regulated in Transcription
  misc_feature: MA Experiment 20000086 PARAMETER Experiment Name: At_100uM_ABA_Mutants_cDNA_P Parameter: Plant Line Value: CS22
  misc_feature: MA Experiment 20000086 PARAMETER Experiment Name: At_100uM_ABA_Mutants_cDNA_P Parameter: Timepoint (hr) Value: 6
  misc_feature: MA Experiment 20000086 PARAMETER Experiment Name: At_100uM_ABA_Mutants_cDNA_P Parameter: Tissue Value: Aerial
  misc_feature: MA Experiment 20000086 PARAMETER Experiment Name: At_100uM_ABA_Mutants_cDNA_P Parameter: Treatment Value: 100uM ABA vs. No Treatment
  misc_feature: MA Experiment ID: 20000088 Result: Up-regulated in Transcription
  misc_feature: MA Experiment 20000088 PARAMETER Experiment Name: At_100uM_ABA_Mutants_cDNA_P Parameter: Plant Line Value: Landsberg
  misc_feature: MA Experiment 20000088 PARAMETER Experiment Name: At_100uM_ABA_Mutants_cDNA_P Parameter: Timepoint (hr) Value: 6
  misc_feature: MA Experiment 20000088 PARAMETER Experiment Name: At_100uM_ABA_Mutants_cDNA_P Parameter: Tissue Value: Aerial
  misc_feature: MA Experiment 20000088 PARAMETER Experiment Name: At_100uM_ABA_Mutants_cDNA_P Parameter: Treatment Value: 100uM ABA vs. No Treatment
  misc_feature: MA Experiment ID: 20000111 Result: Down-regulated in Transcription
  misc_feature: MA Experiment 20000111 PARAMETER Experiment Name: At_42deg_Heat_cDNA_P Parameter: Temperature (deg C) Value: 42 vs. 22
  misc_feature: MA Experiment 20000111 PARAMETER Experiment Name: At_42deg_Heat_cDNA_P Parameter: Timepoint (hr) Value: 6
  misc_feature: MA Experiment 20000111 PARAMETER Experiment Name: At_42deg_Heat_cDNA_P Parameter: Tissue Value: Aerial
  misc_feature: MA Experiment ID: 20000184 Result: Down-regulated in Transcription
  misc_feature: MA Experiment 20000184 PARAMETER Experiment Name: At_Shoots__P Parameter: Age (day) Value: 7
  misc_feature: MA Experiment 20000184 PARAMETER Experiment Name: At_Shoots__P Parameter: Tissue Value: Shoots vs. Whole Plant
  misc_feature: MA Experiment ID: 20000224 Result: Up-regulated in Transcription
  misc_feature: MA Experiment ID: 20000794 Result: Up-regulated in Transcription
  misc_feature: MA Experiment 20000794 PARAMETER Experiment Name: At_Petals_P Parameter: Age (day) Value: 23-25 days
  misc_feature: MA Experiment 20000794 PARAMETER Experiment Name: At_Petals_P Parameter: Plant Line Value: WS
  misc_feature: MA Experiment 20000794 PARAMETER Experiment Name: At_Petals_P Parameter: Tissue Value: Petals vs. Whole plant
  misc_feature: MA Experiment ID: 20001905 Result: Up-regulated in Transcription
  misc_feature: MA Experiment 20001905 PARAMETER Experiment Name: At_Drought_Reproduction_P Parameter: Age (day) Value: 40
  misc_feature: MA Experiment 20001905 PARAMETER Experiment Name: At_Drought_Reproduction_P Parameter: Organism Value: A. thaliana
  misc_feature: MA Experiment 20001905 PARAMETER Experiment Name: At_Drought_Reproduction_P Parameter: Plant Line Value: WS
  misc_feature: MA Experiment 20001905 PARAMETER Experiment Name: At_Drought_Reproduction_P Parameter: Timepoint (day) Value: 10
  misc_feature: MA Experiment 20001905 PARAMETER Experiment Name: At_Drought_Reproduction_P Parameter: Tissue Value: Rosettes
  misc_feature: MA Experiment 20001905 PARAMETER Experiment Name: At_Drought_Reproduction_P Parameter: Treatment Value: Drought vs. No Drought
ataaatttaattttaaaattcgaaactttttttctgcctttcctctttctctctctctatctatcaaacactagacttgaagaaatgcagtgaaattgaaattgagtagaagcagaagagaatatggtggtaaggaaggtgggcaagtatgaattaggtagaacaatcggcgaaggtactttcgctaaagtcaagttcgctcagaatacagagaccggtgagagcgtcgccatgaaaatcgtggatcgtagcacaatcatcaagcgcaagatggtggatcagattaagagagagatctcgattatgaagcttgttcgtcatccttgtgttgttcgtctttatgaggttctagcaagccgtacaaagatttatatcatcctggagtacattactggtggtgaactgtttgataagattgttcgtaatggacgacttagtgagtcagaagctaggaaatactttcaccagcttattgatggagttgattactgtcatagtaaaggtgtttaccacagagatctaaagccggaaaatcttctgttggattctcaaggaaatctcaagatatctgattttggcctcagtgcattacctgaacaaggagttaccatcctaaagacaacatgtggaactcccaattacgttgctcctgaggttctcagtcacaagggttacaatggtgccgttgcagatatttggtcctgtggggtcatcctttatgttcttatggcaggatatcttccatttgatgaaatggatctaccaactttatatagtaagatcgacaaagctgagttctcttgcccctcatattttgccctgggggcaaagtccttgattaatagaattttggatccaaatccagaaactcggattacaattgcagaaatcaggaaagatgagtggtttctaaaggattacactcctgtacaacttatcgattacgaacatgtaaacctggatgatgtatatgctgcttttgatgatccggaggaacaaacatatgcacaggatggaacaagagacacaggtccactaactctaaatgcgtttgacctaattattctatctcagggcctgaacctcgcaactctttttgaccgtggaaaggactccatgaagcaccagacaaggttcatctcacacaagccagcaaacgtggttctctcaagcatggaagttgtgtcacagtctatgggctttaagacacacattcgtaattacaagatgagagtggaaggattatctgcaaataagacatctcatttctccgtcatactagaacaggagacgcagaagaataccttaagttctacaagactttttgtagtaagcttgatgacatcatttggaagccgccagatgcatctatgagaaatcgagtcaccaaggccaagagtaaaagacgttgaatccacgtgcgtggtattcaagcagagctttcacagaagacagttagaaacaatatttaactctctgtgtttcttaagtgctttagtcgagtgaatatgtacaagcttgttgatttggttttaatttatgaatacatagaagattgtactaaacttatacgatatcaagactaaattg

SEQ ID NO: 72222 - protein, 416 aa, Arabidopsis thaliana; identical to SEQ ID NO: 41559
  peptide (1)..(416): Ceres Seq. ID no. 4925264
  misc_feature (9)..(262): Pfam Name: Protein kinase domain Pfam Description: Protein kinase domain
  misc_feature (1)..(387): Homolog of NCBI NO: 15233820 NR Description: serine/threonine kinase-like protein; protein id:
  misc_feature (3)..(368): Homolog of NCBI NO: 34913564 NR Description: putative serine/threonine-specific protein kinase
  misc_feature (3)..(387): Homolog of NCBI NO: 15238499 NR Description: serine/threonine protein kinase SOS2 protein id: At5g35410.1, supported by cDNA: gi_14701909, by cDNA: gi_20466309 [Arabidopsis thaliana]
  misc_feature (2)..(387): Homolog of NCBI NO: 7446372 NR Description: probable serine/threonine kinase (EC 2.7.1.-) - sorghum >gi|2632254|emb|CAA73068.1| serine/threonine kinase
  misc_feature (2)..(387): Homolog of NCBI NO: 7446371 NR Description: probable serine/threonine kinase (EC 2.7.1.-) - sorghum >gi|2632252|emb|CAA73067.1| serine/threonine kinase
  misc_feature (5)..(387): Homolog of NCBI NO: 34393400 NR Description: putative CBL-interacting protein kinase 23 [Oryza
  misc_feature (5)..(387): Homolog of NCBI NO: 25387051 NR Description: probable serine/threonine kinase [imported] - thaliana >gi|12320856|gb|AAG50566.1|AC073506_8 serine/threonine
  misc_feature (2)..(387): Homolog of NCBI NO: 30683336 NR Description: CBL-interacting protein kinase 3 [Arabidopsis
  misc_feature (5)..(387): Homolog of NCBI NO: 18397430 NR Description: serine/threonine kinase, putative; protein id: supported by cDNA: gi_14486385, supported by cDNA: gi_15912282,
  misc_feature (5)..(387): Homolog of NCBI NO: 34902248 NR Description: Putative serine/threonine kinase [Oryza sativa

SEQ ID NO: 72223 - protein, 380 aa, Arabidopsis thaliana; identical to SEQ ID NO: 41560
  peptide (1)..(380): Ceres Seq. ID no. 4925265
  misc_feature (1)..(226): Pfam Name: Protein kinase domain Pfam Description: Protein kinase domain
  misc_feature (1)..(351): Homolog of NCBI NO: 15233820 NR Description: serine/threonine kinase-like protein; protein id:
  misc_feature (1)..(332): Homolog of NCBI NO: 34913564 NR Description: putative serine/threonine-specific protein kinase
  misc_feature (1)..(351): Homolog of NCBI NO: 15238499 NR Description: serine/threonine protein kinase SOS2 protein id: At5g35410.1, supported by cDNA: gi_14701909, by cDNA: gi_20466309 [Arabidopsis thaliana]
  misc_feature (1)..(351): Homolog of NCBI NO: 7446372 NR Description: probable serine/threonine kinase (EC 2.7.1.-) - sorghum >gi|2632254|emb|CAA73068.1| serine/threonine kinase
  misc_feature (1)..(351): Homolog of NCBI NO: 7446371 NR Description: probable serine/threonine kinase (EC 2.7.1.-) - sorghum >gi|2632252|emb|CAA73067.1| serine/threonine kinase
  misc_feature (1)..(351): Homolog of NCBI NO: 34393400 NR Description: putative CBL-interacting protein kinase 23 [Oryza
  misc_feature (1)..(351): Homolog of NCBI NO: 25387051 NR Description: probable serine/threonine kinase [imported] - thaliana >gi|12320856|gb|AAG50566.1|AC073506_8 serine/threonine
  misc_feature (1)..(351): Homolog of NCBI NO: 30683336 NR Description: CBL-interacting protein kinase 3 [Arabidopsis
  misc_feature (1)..(351): Homolog of NCBI NO: 18397430 NR Description: serine/threonine kinase, putative; protein id: supported by cDNA: gi_14486385, supported by cDNA: gi_15912282,
  misc_feature (1)..(351): Homolog of NCBI NO: 34902248 NR Description: Putative serine/threonine kinase [Oryza sativa

SEQ ID NO: 72224 - protein, 367 aa, Arabidopsis thaliana; identical to SEQ ID NO: 41561
  peptide (1)..(367): Ceres Seq. ID no. 4925266
  misc_feature (1)..(213): Pfam Name: Protein kinase domain Pfam Description: Protein kinase domain
  misc_feature (1)..(338): Homolog of NCBI NO: 15233820 NR Description: serine/threonine kinase-like protein; protein id:
  misc_feature (1)..(319): Homolog of NCBI NO: 34913564 NR Description: putative serine/threonine-specific protein kinase
  misc_feature (1)..(338): Homolog of NCBI NO: 15238499 NR Description: serine/threonine protein kinase SOS2 protein id: At5g35410.1, supported by cDNA: gi_14701909, by cDNA: gi_20466309 [Arabidopsis thaliana]
  misc_feature (1)..(338): Homolog of NCBI NO: 7446372 NR Description: probable serine/threonine kinase (EC 2.7.1.-) - sorghum >gi|2632254|emb|CAA73068.1| serine/threonine kinase
  misc_feature (1)..(338): Homolog of NCBI NO: 7446371 NR Description: probable serine/threonine kinase (EC 2.7.1.-) - sorghum >gi|2632252|emb|CAA73067.1| serine/threonine kinase
  misc_feature (1)..(338): Homolog of NCBI NO: 34393400 NR Description: putative CBL-interacting protein kinase 23 [Oryza
  misc_feature (1)..(338): Homolog of NCBI NO: 25387051 NR Description: probable serine/threonine kinase [imported] - thaliana >gi|12320856|gb|AAG50566.1|AC073506_8 serine/threonine
  misc_feature (1)..(338): Homolog of NCBI NO: 30683336 NR Description: CBL-interacting protein kinase 3 [Arabidopsis
  misc_feature (1)..(338): Homolog of NCBI NO: 18397430 NR Description: serine/threonine kinase, putative; protein id: supported by cDNA: gi_14486385, supported by cDNA: gi_15912282,
  misc_feature (1)..(338): Homolog of NCBI NO: 34902248 NR Description: Putative serine/threonine kinase [Oryza sativa

SEQ ID NO: 72225 - DNA, 981 bp, Arabidopsis thaliana
  misc_feature (1)..(981): Ceres Seq. ID no. 4925476
  misc_feature: MA Experiment ID: 20000443 Result: Up-regulated in Transcription
  misc_feature: MA Experiment 20000443 PARAMETER Experiment Name: At_1uM_BR-BRZ__P Parameter: Tissue Value: Shoot Apices
  misc_feature: MA Experiment 20000443 PARAMETER Experiment Name: At_1uM_BR-BRZ__P Parameter: Treatment Value: 1uM BRZ vs. No Treatment
atggtttgggcaaatgctaagatgaggctagctttgtctcttgttacggttttcttcggcatctctcttgctaatcttgaagtcggattttactccaatacatgccctcaagccgagtcaatcgttaagagggttgtctcaggggctgctctttccgaccctaacctcccagccatacttctacggctccatttccatgattgctttgttgagggatgtgatggctcgatcctcgtgaacaacggagcaatctctgaaaagaatgcatttggacatgaaggcgttagaggatttgagatagtagaagccgtcaaagccgagcttgaagctgcatgccccggtgttgtctcctgctcagacattgttgccttggctgcacgtgatgccatatctttggcgaatggaccggcgtatgaggtgccaactgggcggagagatggtcgggtttcgaacatgtcattggctaaggacatgccggaggtgagtgactcgattgagatactaaaggctaagttcatgcagaaaggactcaacgccaaagacctcgtgcttctcagtgctgctcacactatcggaacaacggcctgcttcttcatgtccaaacggctctatgatttcttacctggtggccaacctgacccgactatcaatccaacattcctacccgaattaaccactcagtgcccacaaaatggtgacataaacgtccgtttaccaattgaccggttcagcgaacggctattcgacaagcagattctgcaaaacataaaggatggttttgctgtgcttcagaccgacgcaggtctttacgaggatgtaacgaccagacaggtcgtggattcctatcttgggatgctaaatccattctttgggccaacattcgagtctgatttcgttaaggcgatcgtaaagatggggaagattggtgtgaagactggtttcaaaggggagattcgacgggtttgctcggccttcaattga

SEQ ID NO: 72226 - protein, 326 aa, Arabidopsis thaliana; identical to SEQ ID NO: 69630
  peptide (1)..(326): Ceres Seq. ID no. 4925477
  misc_feature (1)..(326): Homolog of NCBI NO: 15236089 NR Description: cationic peroxidase, putative; protein id:
  misc_feature (1)..(326): Homolog of NCBI NO: 26397928 NR Description: Peroxidase 43 precursor (Atperox P43)
  misc_feature (14)..(326): Homolog of NCBI NO: 19698450 NR Description: gaiacol peroxidase [Gossypium hirsutum]

SEQ ID NO: 72227 - protein, 319 aa, Arabidopsis thaliana
  peptide (1)..(319): Ceres Seq. ID no. 4925478
  misc_feature (1)..(319): Homolog of NCBI NO: 15236089 NR Description: cationic peroxidase, putative; protein id:
  misc_feature (1)..(319): Homolog of NCBI NO: 26397928 NR Description: Peroxidase 43 precursor (Atperox P43)
  misc_feature (7)..(319): Homolog of NCBI NO: 19698450 NR Description: gaiacol peroxidase [Gossypium hirsutum]
MRLALSLVTVFFGISLANLEVGFYSNTCPQAESIVKRVVSGAALSDPNLPAILLRLHFHDCFVEGCDGSILVNNGAISEKNAFGHEGVRGFEIVEAVKAELEAACPGVVSCSDIVALAARDAISLANGPAYEVPTGRRDGRVSNMSLAKDMPEVSDSIEILKAKFMQKGLNAKDLVLLSAAHTIGTTACFFMSKRLYDFLPGGQPDPTINPTFLPELTTQCPQNGDINVRLPIDRFSERLFDKQILQNIKDGFAVLQTDAGLYEDVTTRQVVDSYLGMLNPFFGPTFESDFVKAIVKMGKIGVKTGFKGEIRRVCSAFN

SEQ ID NO: 72228 - protein, 175 aa, Arabidopsis thaliana
  peptide (1)..(175): Ceres Seq. ID no. 4925479
  misc_feature (1)..(175): Homolog of NCBI NO: 15236089 NR Description: cationic peroxidase, putative; protein id:
  misc_feature (1)..(175): Homolog of NCBI NO: 26397928 NR Description: Peroxidase 43 precursor (Atperox P43)
  misc_feature (1)..(175): Homolog of NCBI NO: 19698450 NR Description: gaiacol peroxidase [Gossypium hirsutum]
MSLAKDMPEVSDSIEILKAKFMQKGLNAKDLVLLSAAHTIGTTACFFMSKRLYDFLPGGQPDPTINPTFLPELTTQCPQNGDINVRLPIDRFSERLFDKQILQNIKDGFAVLQTDAGLYEDVTTRQVVDSYLGMLNPFFGPTFESDFVKAIVKMGKIGVKTGFKGEIRRVCSAFN

SEQ ID NO: 72229 - DNA, 956 bp, Arabidopsis thaliana
  misc_feature (1)..(956): Ceres Seq. ID no. 4925743
  misc_feature: MA Experiment ID: 108434 Result: Down-regulated in Transcription
  misc_feature: MA Experiment 108434 PARAMETER Experiment Name: At_Root_Tips_cDNA_P Parameter: Tissue Value: Root Tips
  misc_feature: MA Experiment ID: 108462 Result: Up-regulated in Transcription
  misc_feature: MA Experiment 108462 PARAMETER Experiment Name: At_Germinating_Seeds_cDNA_P Parameter: Age (day) Value: 2 vs. 0
  misc_feature: MA Experiment 108462 PARAMETER Experiment Name: At_Germinating_Seeds_cDNA_P Parameter: Tissue Value: Germinating Seeds
  misc_feature: MA Experiment ID: 108463 Result: Up-regulated in Transcription
  misc_feature: MA Experiment 108463 PARAMETER Experiment Name: At_Germinating_Seeds_cDNA_P Parameter: Age (day) Value: 3 vs. 0
  misc_feature: MA Experiment 108463 PARAMETER Experiment Name: At_Germinating_Seeds_cDNA_P Parameter: Tissue Value: Germinating Seeds
  misc_feature: MA Experiment ID: 108464 Result: Up-regulated in Transcription
  misc_feature: MA Experiment 108464 PARAMETER Experiment Name: At_Germinating_Seeds_cDNA_P Parameter: Age (day) Value: 4 vs. 0
  misc_feature: MA Experiment 108464 PARAMETER Experiment Name: At_Germinating_Seeds_cDNA_P Parameter: Tissue Value: Germinating Seeds
  misc_feature: MA Experiment ID: 108488 Result: Down-regulated in Transcription
  misc_feature: MA Experiment ID: 108668 Result: Up-regulated in Transcription
  misc_feature: MA Experiment 108668 PARAMETER Experiment Name: At_2mM_SA_cDNA_P Parameter: Plant Line Value: WS
  misc_feature: MA Experiment 108668 PARAMETER Experiment Name: At_2mM_SA_cDNA_P Parameter: Timepoint (hr) Value: 6
  misc_feature: MA Experiment 108668 PARAMETER Experiment Name: At_2mM_SA_cDNA_P Parameter: Treatment Value: 2mM SA vs. No Treatment
  misc_feature: MA Experiment ID: 20000182 Result: Up-regulated in Transcription
  misc_feature: MA Experiment 20000182 PARAMETER Experiment Name: At_2mM_SA_P Parameter: Age (day) Value: 14
  misc_feature: MA Experiment 20000182 PARAMETER Experiment Name: At_2mM_SA_P Parameter: Organism Value: A. thaliana
  misc_feature: MA Experiment 20000182 PARAMETER Experiment Name: At_2mM_SA_P Parameter: Plant Line Value: WS
  misc_feature: MA Experiment 20000182 PARAMETER Experiment Name: At_2mM_SA_P Parameter: Timepoint (hr) Value: 6
  misc_feature: MA Experiment 20000182 PARAMETER Experiment Name: At_2mM_SA_P Parameter: Tissue Value: Aerial
  misc_feature: MA Experiment 20000182 PARAMETER Experiment Name: At_2mM_SA_P Parameter: Treatment Value: 2mM SA vs. No Treatment
atacaattgatcttcccccatctccaattcagatttggacagagtaacctgtgatcgtgtcggttggggtagaagagatcgaagtgggagcaaaatcatgatgaatcggctattcgggaaacccaagcaggaggctaatgctctccaaactttagacaagcttaacgagacgcttgagatgctagagaaaaaggagaaagtactcttgaagaaagctggtgcagaggttgagaaggcaaaagaatactcccgggctaagaacaaacgagcggctatacagtgtttgaaaaggaagaggttatatgagggacaagtcgaacagcttgggaatttccagctccgtattcatgatcaaatgattatgttagaaggtgcaaaagcaacaaccgaaactgttgatgcattgaggagtggagcttctgcaatgaaggcaatgcagaaagcaacaaatattgatgatgtggataagaccatggacgagatcaatgagcaaaccgagaacatgaaacagatccaagaagcattggcgactccaatgggggcagcggctgacttcgacgaggatgagcttgcagcagagcttgatgaactagaaagtgaagagcttgaatcgcaacttctacagccggcaacaacagctcctccattgccttcagttccagtgcctgcagggcgtcaaccggctcgtcctgttccccagaagcggactgctgaggaagaagaactcgctgcattacaggctgagatggccctctaaggttattcacctctccgagcagagacatgtatgcattgatagacacgaacagacgatgtatataaggatctgaatcagattaattcggagcgaaaaacttttataatccccgtcgttaatgttatctgcaatttgagtgttcttcacataatttatcttttgtaatttttgtatctttttatgacactttttcctttgg

SEQ ID NO: 72230 - protein, 219 aa, Arabidopsis thaliana; identical to SEQ ID NO: 26925
  peptide (1)..(219): Ceres Seq. ID no. 4925744
  misc_feature (17)..(189): Pfam Name: SNF7 Pfam Description: SNF7
  misc_feature (1)..(219): Homolog of NCBI NO: 15233464 NR Description: putative protein; protein id: At4g29160.1, by cDNA: 7471., supported by cDNA: gi_14596130, supported by
  misc_feature (2)..(219): Homolog of NCBI NO: 21594892 NR Description: copia-like retroelement pol polyprotein
  misc_feature (1)..(219): Homolog of NCBI NO: 15224854 NR Description: copia-like retroelement pol polyprotein; protein At2g19830.1, supported by cDNA: gi_15028176, supported by cDNA:
  misc_feature (7)..(215): Homolog of NCBI NO: 28277855 NR Description: Unknown (protein for MGC:56112) [Danio rerio]
  misc_feature (4)..(219): Homolog of NCBI NO: 19115183 NR Description: similar to yeast Snf7 protein involved in glucose
  misc_feature (7)..(209): Homolog of NCBI NO: 28278647 NR Description: Similar to RIKEN cDNA 2010012F05 gene [Danio
  misc_feature (17)..(214): Homolog of NCBI NO: 28077049 NR Description: RIKEN cDNA 2010012F05 [Mus musculus] Protein c20orf178 homolog >gi|15030308|gb|AAH11429.1| Unknown
  misc_feature (17)..(214): Homolog of NCBI NO: 28827795 NR Description: chromosome 20 open reading frame 178 [Homo >gi|24636296|sp|Q9H444|CTH8_HUMAN Protein c20orf178 dJ553F4.4 (Novel protein similar to Drosophila CG8055 protein)
  misc_feature (4)..(219): Homolog of NCBI NO: 28850339 NR Description: similar to C56C10.3.p [Caenorhabditis elegans]
  misc_feature (1)..(213): Homolog of NCBI NO: 40548422 NR Description: Snf7 homologue associated with Alix 2 [Homo >gi|28071136|emb|CAD61949.1| unnamed protein product [Homo

SEQ ID NO: 72231 - protein, 218 aa, Arabidopsis thaliana; identical to SEQ ID NO: 26926
  peptide (1)..(218): Ceres Seq. ID no. 4925745
  misc_feature (16)..(188): Pfam Name: SNF7 Pfam Description: SNF7
  misc_feature (1)..(218): Homolog of NCBI NO: 15233464 NR Description: putative protein; protein id: At4g29160.1, by cDNA: 7471., supported by cDNA: gi_14596130, supported by
  misc_feature (1)..(218): Homolog of NCBI NO: 21594892 NR Description: copia-like retroelement pol polyprotein
  misc_feature (1)..(218): Homolog of NCBI NO: 15224854 NR Description: copia-like retroelement pol polyprotein; protein At2g19830.1, supported by cDNA: gi_15028176, supported by cDNA:
  misc_feature (6)..(214): Homolog of NCBI NO: 28277855 NR Description: Unknown (protein for MGC:56112) [Danio rerio]
  misc_feature (3)..(218): Homolog of NCBI NO: 19115183 NR Description: similar to yeast Snf7 protein involved in glucose
  misc_feature (6)..(208): Homolog of NCBI NO: 28278647 NR Description: Similar to RIKEN cDNA 2010012F05 gene [Danio
  misc_feature (16)..(213): Homolog of NCBI NO: 28077049 NR Description: RIKEN cDNA 2010012F05 [Mus musculus] Protein c20orf178 homolog >gi|15030308|gb|AAH11429.1| Unknown
  misc_feature (16)..(213): Homolog of NCBI NO: 28827795 NR Description: chromosome 20 open reading frame 178 [Homo >gi|24636296|sp|Q9H444|CTH8_HUMAN Protein c20orf178 dJ553F4.4 (Novel protein similar to Drosophila CG8055 protein)
  misc_feature (3)..(218): Homolog of NCBI NO: 28850339 NR Description: similar to C56C10.3.p [Caenorhabditis elegans]
  misc_feature (1)..(212): Homolog of NCBI NO: 40548422 NR Description: Snf7 homologue associated with Alix 2 [Homo >gi|28071136|emb|CAD61949.1| unnamed protein product [Homo

SEQ ID NO: 72232 - protein, 192 aa, Arabidopsis thaliana
  peptide (1)..(192): Ceres Seq. ID no. 4925746
  misc_feature (1)..(162): Pfam Name: SNF7 Pfam Description: SNF7
  misc_feature (1)..(192): Homolog of NCBI NO: 15233464 NR Description: putative protein; protein id: At4g29160.1, by cDNA: 7471., supported by cDNA: gi_14596130, supported by
  misc_feature (1)..(192): Homolog of NCBI NO: 21594892 NR Description: copia-like retroelement pol polyprotein
  misc_feature (1)..(192): Homolog of NCBI NO: 15224854 NR Description: copia-like retroelement pol polyprotein; protein At2g19830.1, supported by cDNA: gi_15028176, supported by cDNA:
  misc_feature (1)..(188): Homolog of NCBI NO: 28277855 NR Description: Unknown (protein for MGC:56112) [Danio rerio]
  misc_feature (1)..(192): Homolog of NCBI NO: 19115183 NR Description: similar to yeast Snf7 protein involved in glucose
  misc_feature (1)..(182): Homolog of NCBI NO: 28278647 NR Description: Similar to RIKEN cDNA 2010012F05 gene [Danio
  misc_feature (1)..(187): Homolog of NCBI NO: 28077049 NR Description: RIKEN cDNA 2010012F05 [Mus musculus] Protein c20orf178 homolog >gi|15030308|gb|AAH11429.1| Unknown
  misc_feature (1)..(187): Homolog of NCBI NO: 28827795 NR Description: chromosome 20 open reading frame 178 [Homo >gi|24636296|sp|Q9H444|CTH8_HUMAN Protein c20orf178 dJ553F4.4 (Novel protein similar to Drosophila CG8055 protein)
  misc_feature (1)..(192): Homolog of NCBI NO: 28850339 NR Description: similar to C56C10.3.p [Caenorhabditis elegans]
  misc_feature (1)..(186): Homolog of NCBI NO: 40548422 NR Description: Snf7 homologue associated with Alix 2 [Homo >gi|28071136|emb|CAD61949.1| unnamed protein product [Homo
MLEKKEKVLLKKAGAEVEKAKEYSRAKNKRAAIQCLKRKRLYEGQVEQLGNFQLRIHDQMIMLEGAKATTETVDALRSGASAMKAMQKATNIDDVDKTMDEINEQTENMKQIQEALATPMGAAADFDEDELAAELDELESEELESQLLQPATTAPPLPSVPVPAGRQPARPVPQKRTAEEEELAALQAEMAL

SEQ ID NO: 72233 - DNA, 2304 bp, Arabidopsis thaliana
  misc_feature (1)..(2304): Ceres Seq. ID no. 4926014
  misc_feature: MA Experiment ID: 108434 Result: Down-regulated in Transcription
  misc_feature: MA Experiment 108434 PARAMETER Experiment Name: At_Root_Tips_cDNA_P Parameter: Tissue Value: Root Tips
  misc_feature: MA Experiment ID: 108435 Result: Down-regulated in Transcription
  misc_feature: MA Experiment 108435 PARAMETER Experiment Name: At_stm_Mutants_cDNA_P Parameter: Plant Line Value: wt Landsburg vs stm
  misc_feature: MA Experiment 108435 PARAMETER Experiment Name: At_stm_Mutants_cDNA_P Parameter: Tissue Value: Shoot Apical Meristem Region
  misc_feature: MA Experiment ID: 108572 Result: Up-regulated in Transcription
  misc_feature: MA Experiment 108572 PARAMETER Experiment Name: At_Drought_cDNA_P Parameter: Timepoint (hr) Value: 1
  misc_feature: MA Experiment 108572 PARAMETER Experiment Name: At_Drought_cDNA_P Parameter: Tissue Value: Aerial
  misc_feature: MA Experiment 108572 PARAMETER Experiment Name: At_Drought_cDNA_P Parameter: Treatment Value: Drought vs. No Drought
  misc_feature: MA Experiment ID: 108577 Result: Down-regulated in Transcription
  misc_feature: MA Experiment 108577 PARAMETER Experiment Name: At_42deg_Heat_cDNA_P Parameter: Temperature (deg C) Value: 42 vs. 22
  misc_feature: MA Experiment 108577 PARAMETER Experiment Name: At_42deg_Heat_cDNA_P Parameter: Timepoint (hr) Value: 6
  misc_feature: MA Experiment 108577 PARAMETER Experiment Name: At_42deg_Heat_cDNA_P Parameter: Tissue Value: Aerial
  misc_feature: MA Experiment ID: 108579 Result: Down-regulated in Transcription
  misc_feature: MA Experiment 108579 PARAMETER Experiment Name: At_4deg_Cold_cDNA_P Parameter: Temperature (deg C) Value: 4 vs. 22
  misc_feature: MA Experiment 108579 PARAMETER Experiment Name: At_4deg_Cold_cDNA_P Parameter: Timepoint (hr) Value: 6
  misc_feature: MA Experiment 108579 PARAMETER Experiment Name: At_4deg_Cold_cDNA_P Parameter: Tissue Value: Aerial
  misc_feature: MA Experiment ID: 108585 Result: Down-regulated in Transcription
  misc_feature: MA Experiment 108585 PARAMETER Experiment Name: At_5mM_NaNP_cDNA_P Parameter: Timepoint (hr) Value: 6
  misc_feature: MA Experiment 108585 PARAMETER Experiment Name: At_5mM_NaNP_cDNA_P Parameter: Tissue Value: Aerial
  misc_feature: MA Experiment 108585 PARAMETER Experiment Name: At_5mM_NaNP_cDNA_P Parameter: Treatment Value: null
  misc_feature: MA Experiment ID: 108595 Result: Down-regulated in Transcription
  misc_feature: MA Experiment 108595 PARAMETER Experiment Name: At_Ler-pi_Ovule_cDNA_P Parameter: Plant Line Value: null
  misc_feature: MA Experiment ID: 108668 Result: Down-regulated in Transcription
  misc_feature: MA Experiment 108668 PARAMETER Experiment Name: At_2mM_SA_cDNA_P Parameter: Plant Line Value: WS
  misc_feature: MA Experiment 108668 PARAMETER Experiment Name: At_2mM_SA_cDNA_P Parameter: Timepoint (hr) Value: 6
  misc_feature: MA Experiment 108668 PARAMETER Experiment Name: At_2mM_SA_cDNA_P Parameter: Treatment Value: 2mM SA vs. No Treatment
  misc_feature: MA Experiment ID: 20000069 Result: Up-regulated in Transcription
  misc_feature: MA Experiment 20000069 PARAMETER Experiment Name: At_100uM_ABA_Mutants_cDNA_P Parameter: Plant Line Value: CS23
  misc_feature: MA Experiment 20000069 PARAMETER Experiment Name: At_100uM_ABA_Mutants_cDNA_P Parameter: Timepoint (hr) Value: 6
  misc_feature: MA Experiment 20000069 PARAMETER Experiment Name: At_100uM_ABA_Mutants_cDNA_P Parameter: Tissue Value: Aerial
  misc_feature: MA Experiment 20000069 PARAMETER Experiment Name: At_100uM_ABA_Mutants_cDNA_P Parameter: Treatment Value: 100uM ABA vs. No Treatment
  misc_feature: MA Experiment ID: 20000070 Result: Up-regulated in Transcription
  misc_feature: MA Experiment 20000070 PARAMETER Experiment Name: At_100uM_ABA_Mutants_cDNA_P Parameter: Plant Line Value: CS24
  misc_feature: MA Experiment 20000070 PARAMETER Experiment Name: At_100uM_ABA_Mutants_cDNA_P Parameter: Timepoint (hr) Value: 6
  misc_feature: MA Experiment 20000070 PARAMETER Experiment Name: At_100uM_ABA_Mutants_cDNA_P Parameter: Tissue Value: Aerial
  misc_feature: MA Experiment 20000070 PARAMETER Experiment Name: At_100uM_ABA_Mutants_cDNA_P Parameter: Treatment Value: 100uM ABA vs. No Treatment
  misc_feature: MA Experiment ID: 20000071 Result: Up-regulated in Transcription
  misc_feature: MA Experiment 20000071 PARAMETER Experiment Name: At_100uM_ABA_Mutants_cDNA_P Parameter: Plant Line Value: CS8104
  misc_feature: MA Experiment 20000071 PARAMETER Experiment Name: At_100uM_ABA_Mutants_cDNA_P Parameter: Timepoint (hr) Value: 6
  misc_feature: MA Experiment 20000071 PARAMETER Experiment Name: At_100uM_ABA_Mutants_cDNA_P Parameter: Tissue Value: Aerial
  misc_feature: MA Experiment 20000071 PARAMETER Experiment Name: At_100uM_ABA_Mutants_cDNA_P Parameter: Treatment Value: 100uM ABA vs. No Treatment
  misc_feature: MA Experiment ID: 20000072 Result: Up-regulated in Transcription
  misc_feature: MA Experiment 20000072 PARAMETER Experiment Name: At_100uM_ABA_Mutants_cDNA_P Parameter: Plant Line Value: CS8105
  misc_feature: MA Experiment 20000072 PARAMETER Experiment Name: At_100uM_ABA_Mutants_cDNA_P Parameter: Timepoint (hr) Value: 6
  misc_feature: MA Experiment 20000072 PARAMETER Experiment Name: At_100uM_ABA_Mutants_cDNA_P Parameter: Tissue Value: Aerial
  misc_feature: MA Experiment 20000072 PARAMETER Experiment Name: At_100uM_ABA_Mutants_cDNA_P Parameter: Treatment Value: 100uM ABA vs. No Treatment
  misc_feature: MA Experiment ID: 20000086 Result: Up-regulated in Transcription
  misc_feature: MA Experiment 20000086 PARAMETER Experiment Name: At_100uM_ABA_Mutants_cDNA_P Parameter: Plant Line Value: CS22
  misc_feature: MA Experiment 20000086 PARAMETER Experiment Name: At_100uM_ABA_Mutants_cDNA_P Parameter: Timepoint (hr) Value: 6
  misc_feature: MA Experiment 20000086 PARAMETER Experiment Name: At_100uM_ABA_Mutants_cDNA_P Parameter: Tissue Value: Aerial
  misc_feature: MA Experiment 20000086 PARAMETER Experiment Name: At_100uM_ABA_Mutants_cDNA_P Parameter: Treatment Value: 100uM ABA vs. No Treatment
  misc_feature: MA Experiment ID: 20000088 Result: Up-regulated in Transcription
  misc_feature: MA Experiment 20000088 PARAMETER Experiment Name: At_100uM_ABA_Mutants_cDNA_P Parameter: Plant Line Value: Landsberg
  misc_feature: MA Experiment 20000088 PARAMETER Experiment Name: At_100uM_ABA_Mutants_cDNA_P Parameter: Timepoint (hr) Value: 6
  misc_feature: MA Experiment 20000088 PARAMETER Experiment Name: At_100uM_ABA_Mutants_cDNA_P Parameter: Tissue Value: Aerial
  misc_feature: MA Experiment 20000088 PARAMETER Experiment Name: At_100uM_ABA_Mutants_cDNA_P Parameter: Treatment Value: 100uM ABA vs. No Treatment
  misc_feature: MA Experiment ID: 20000089 Result: Up-regulated in Transcription
  misc_feature: MA Experiment ID: 20000090 Result: Up-regulated in Transcription
  misc_feature: MA Experiment ID: 20000117 Result: Up-regulated in Transcription
  misc_feature: MA Experiment 20000117 PARAMETER Experiment Name: At_100uM_ABA_Mutants_cDNA_P Parameter: Plant Line Value: Columbia
  misc_feature: MA Experiment 20000117 PARAMETER Experiment Name: At_100uM_ABA_Mutants_cDNA_P Parameter: Timepoint (hr) Value: 6
  misc_feature: MA Experiment 20000117 PARAMETER Experiment Name: At_100uM_ABA_Mutants_cDNA_P Parameter: Tissue Value: Aerial
  misc_feature: MA Experiment 20000117 PARAMETER Experiment Name: At_100uM_ABA_Mutants_cDNA_P Parameter: Treatment Value: 100uM ABA vs. No Treatment
atggagaaaatgaatgtccgttttatgattgtgttgatggtaatgtctctggttctgggtttttcgtcggcagttgatttcagatggaggaaaactgcaggattctcagatagattcaccagagctgtttcttcagtcgtgttcccagttcatggcaacgtttatcctcttgggtactataatgtaaccatcaacataggacaaccaccaagaccttattatcttgatcttgatactggtagtgatctcacttggctccaatgtgatgctccttgtgttcgttgcttggaggcgcctcatccactgtatcagcctagtagtgatcttattccttgcaatgatccactgtgtaaggctttgcatttgaatagtaatcagagatgtgagactccagagcaatgtgactatgaggttgagtatgctgatggaggatcttctctcggtgttcttgttagagatgtcttctctatgaactatacacagggtctccggctcactccccgtcttgctctaggttgtggatacgatcaaatcccaggggcttcgagtcatcatcctctagatggagtattagggcttggtagggggaaagtaagcattctgtcacagcttcatagccaaggttatgtaaagaatgttatcggtcattgcctaagcagtttaggtggaggaattctcttttttggcgacgatctttatgattcttcaagagtctcatggacaccaatgtctcgtgaatactcaaaacactactctcctgcaatgggaggggaacttctattcgggggaagaacaacaggattgaagaatctattaacagtatttgacagtggaagttcttacacatacttcaattccaaggcataccaagccgtaacatatttgctaaagagagaactaagcggaaaaccgttgaaagaagcacgggatgaccacacgctgcctctatgctggcaaggacgtagaccattcatgagcattgaagaagtcaagaagtatttcaagcctctagctcttagcttcaaaacaggctggagatcaaaaactctgtttgagatacccccagaagcttatctaatcatttctatgaaggggaatgtatgtttgggaatcttgaatggcacagaaataggtctccagaacctaaacctcatcggcgatatatcgatgcaagatcagatgataatctacgataacgagaaacaatcaatcgggtggatgccagtggattgcgatgaacttgcttcactaaaagcagctcaagagactcaagtttctcactttctctcttccatggctttctcatactctttaacttctccgtcaccaaattcgactctctcctattccagtacccatcaatttctcaacccgtcttcttcgtttcccgtctcgttatcagtctcatctccgaagaatacccgccatcttcgtctcctcatcacctccgctttgaatccacagacgggacagccgacgaagaaggcctccaccggtagtgataagagtagtacgaacaagaaacgtaagaaaaaggggaaaattgcgaaacctgtggaggattgggaattgagagattcagaagacgcttttgaggaagatgatgatgccgattattcttcttcttcgagttctctagcaacttttaactctcctcctaccatacccaaaccacctgctgggtttgtgattaatgaaactggtagggttcttatggcctctaagaagcgtatcaccactgtgattgatccaacaaacaatagccctttggattgtgtgataagaagagtatttacaagtagtaaaggagaggattgtatgcttctttgccctgtggatacgccagttcagattttgaagagcacaaatattgatggatggtcagctgtcagtgatgaagaggtcgaatctcttcttcctgctgctgcttatgctcttgcaaagatccatatgcatctagtacacagcgggttctgttacactgcaaggggaggcttttgctacacggaagataatgtctttgattttcgcacagatgatggccaagatgttgaaggcttgccaactgaaggggttgagattacgtgtttccatctggatggatcacactatatggtctacacaccttcagatccacttctctttgttgctgctaaggatcaaaatgggctgctgcaaatcgctgatgatgaactcttagacgatccagctgtgatcagcgccatagacgaggaaaccgaattcaatgccttggtggaggaagaggcggctctcctggaatcactgcttggggaaagaatttga

SEQ ID NO: 72234 - protein, 767 aa, Arabidopsis thaliana
  peptide (1)..(767): Ceres Seq. ID no. 4926015
  misc_feature (42)..(363): Pfam Name: Eukaryotic aspartyl protease Pfam Description: Eukaryotic aspartyl protease
  misc_feature (1)..(421): Homolog of NCBI NO: 18418224 NR Description: nucellin -like protein; protein id: At4g33490.1,
  misc_feature (13)..(421): Homolog of NCBI NO: 26452545 NR Description: putative nucellin [Arabidopsis thaliana]
  misc_feature (42)..(363): Homolog of NCBI NO: 7484812 NR Description: aspartic proteinase homolog F17M5.250 -
  misc_feature (345)..(421): Homolog of NCBI NO: 7484812 NR Description: aspartic proteinase homolog F17M5.250 -
  misc_feature (1)..(25): Homolog of NCBI NO: 7484812 NR Description: aspartic proteinase homolog F17M5.250 -
  misc_feature (432)..(767): Homolog of NCBI NO: 30689705 NR Description: expressed protein [Arabidopsis thaliana]
  misc_feature (432)..(658): Homolog of NCBI NO: 7485657 NR Description: hypothetical protein F17M5.240 - Arabidopsis >gi|4490315|emb|CAB38806.1| hypothetical protein [Arabidopsis >gi|7270296|emb|CAB80065.1| hypothetical protein [Arabidopsis
  misc_feature (31)..(414): Homolog of NCBI NO: 15219354 NR Description: nucellin, putative; protein id: At1g44130.1
  misc_feature (41)..(417): Homolog of NCBI NO: 30699261 NR Description: nucellin protein, putative [Arabidopsis thaliana]
  misc_feature (41)..(414): Homolog of NCBI NO: 30699263 NR Description: nucellin protein, putative [Arabidopsis thaliana]
MEKMNVRFMIVLMVMSLVLGFSSAVDFRWRKTAGFSDRFTRAVSSVVFPVHGNVYPLGYYNVTINIGQPPRPYYLDLDTGSDLTWLQCDAPCVRCLEAPHPLYQPSSDLIPCNDPLCKALHLNSNQRCETPEQCDYEVEYADGGSSLGVLVRDVFSMNYTQGLRLTPRLALGCGYDQIPGASSHHPLDGVLGLGRGKVSILSQLHSQGYVKNVIGHCLSSLGGGILFFGDDLYDSSRVSWTPMSREYSKHYSPAMGGELLFGGRTTGLKNLLTVFDSGSSYTYFNSKAYQAVTYLLKRELSGKPLKEARDDHTLPLCWQGRRPFMSIEEVKKYFKPLALSFKTGWRSKTLFEIPPEAYLIISMKGNVCLGILNGTEIGLQNLNLIGDISMQDQMIIYDNEKQSIGWMPVDCDELASLKAAQETQVSHFLSSMAFSYSLTSPSPNSTLSYSSTHQFLNPSSSFPVSLSVSSPKNTRHLRLLITSALNPQTGQPTKKASTGSDKSSTNKKRKKKGKIAKPVEDWELRDSEDAFEEDDDADYSSSSSSLATFNSPPTIPKPPAGFVINETGRVLMASKKRITTVIDPTNNSPLDCVIRRVFTSSKGEDCMLLCPVDTPVQILKSTNIDGWSAVSDEEVESLLPAAAYALAKIHMHLVHSGFCYTARGGFCYTEDNVFDFRTDDGQDVEGLPTEGVEITCFHLDGSHYMVYTPSDPLLFVAAKDQNGLLQIADDELLDDPAVISAIDEETEFNALVEEEAALLESLLGERI

SEQ ID NO: 72235 - protein, 764 aa, Arabidopsis thaliana
  peptide (1)..(764): Ceres Seq. ID no. 4926016
  misc_feature (39)..(360): Pfam Name: Eukaryotic aspartyl protease Pfam Description: Eukaryotic aspartyl protease
  misc_feature (1)..(418): Homolog of NCBI NO: 18418224 NR Description: nucellin -like protein; protein id: At4g33490.1,
  misc_feature (10)..(418): Homolog of NCBI NO: 26452545 NR Description: putative nucellin [Arabidopsis thaliana]
  misc_feature (39)..(360): Homolog of NCBI NO: 7484812 NR Description: aspartic proteinase homolog F17M5.250 -
  misc_feature (342)..(418): Homolog of NCBI NO: 7484812 NR Description: aspartic proteinase homolog F17M5.250 -
  misc_feature (1)..(22): Homolog of NCBI NO: 7484812 NR Description: aspartic proteinase homolog F17M5.250 -
  misc_feature (429)..(764): Homolog of NCBI NO: 30689705 NR Description: expressed protein [Arabidopsis thaliana]
  misc_feature (429)..(655): Homolog of NCBI NO: 7485657 NR Description: hypothetical protein F17M5.240 - Arabidopsis >gi|4490315|emb|CAB38806.1| hypothetical protein [Arabidopsis >gi|7270296|emb|CAB80065.1| hypothetical protein [Arabidopsis
  misc_feature (28)..(411): Homolog of NCBI NO: 15219354 NR Description: nucellin, putative; protein id: At1g44130.1
  misc_feature (38)..(414): Homolog of NCBI NO: 30699261 NR Description: nucellin protein, putative [Arabidopsis thaliana]
  misc_feature (38)..(411): Homolog of NCBI NO: 30699263 NR Description: nucellin protein, putative [Arabidopsis thaliana]
MNVRFMIVLMVMSLVLGFSSAVDFRWRKTAGFSDRFTRAVSSVVFPVHGNVYPLGYYNVTINIGQPPRPYYLDLDTGSDLTWLQCDAPCVRCLEAPHPLYQPSSDLIPCNDPLCKALHLNSNQRCETPEQCDYEVEYADGGSSLGVLVRDVFSMNYTQGLRLTPRLALGCGYDQIPGASSHHPLDGVLGLGRGKVSILSQLHSQGYVKNVIGHCLSSLGGGILFFGDDLYDSSRVSWTPMSREYSKHYSPAMGGELLFGGRTTGLKNLLTVFDSGSSYTYFNSKAYQAVTYLLKRELSGKPLKEARDDHTLPLCWQGRRPFMSIEEVKKYFKPLALSFKTGWRSKTLFEIPPEAYLIISMKGNVCLGILNGTEIGLQNLNLIGDISMQDQMIIYDNEKQSIGWMPVDCDELASLKAAQETQVSHFLSSMAFSYSLTSPSPNSTLSYSSTHQFLNPSSSFPVSLSVSSPKNTRHLRLLITSALNPQTGQPTKKASTGSDKSSTNKKRKKKGKIAKPVEDWELRDSEDAFEEDDDADYSSSSSSLATFNSPPTIPKPPAGFVINETGRVLMASKKRITTVIDPTNNSPLDCVIRRVFTSSKGEDCMLLCPVDTPVQILKSTNIDGWSAVSDEEVESLLPAAAYALAKIHMHLVHSGFCYTARGGFCYTEDNVFDFRTDDGQDVEGLPTEGVEITCFHLDGSHYMVYTPSDPLLFVAAKDQNGLLQIADDELLDDPAVISAIDEETEFNALVEEEAALLESLLGERI

SEQ ID NO: 72236 - protein, 759 aa, Arabidopsis thaliana
  peptide (1)..(759): Ceres Seq. ID no. 4926017
  misc_feature (34)..(355): Pfam Name: Eukaryotic aspartyl protease Pfam Description: Eukaryotic aspartyl protease
  misc_feature (1)..(413): Homolog of NCBI NO: 18418224 NR Description: nucellin -like protein; protein id: At4g33490.1,
  misc_feature (5)..(413): Homolog of NCBI NO: 26452545 NR Description: putative nucellin [Arabidopsis thaliana]
  misc_feature (34)..(355): Homolog of NCBI NO: 7484812 NR Description: aspartic proteinase homolog F17M5.250 -
  misc_feature (337)..(413): Homolog of NCBI NO: 7484812 NR Description: aspartic proteinase homolog F17M5.250 -
  misc_feature (1)..(17): Homolog of NCBI NO: 7484812 NR Description: aspartic proteinase homolog F17M5.250 -
  misc_feature (424)..(759): Homolog of NCBI NO: 30689705 NR Description: expressed protein [Arabidopsis thaliana]
  misc_feature (424)..(650): Homolog of NCBI NO: 7485657 NR Description: hypothetical protein F17M5.240 - Arabidopsis >gi|4490315|emb|CAB38806.1| hypothetical protein [Arabidopsis >gi|7270296|emb|CAB80065.1| hypothetical protein [Arabidopsis
  misc_feature (23)..(406): Homolog of NCBI NO: 15219354 NR Description: nucellin, putative; protein id: At1g44130.1
  misc_feature (33)..(409): Homolog of NCBI NO: 30699261 NR Description: nucellin protein, putative [Arabidopsis thaliana]
  misc_feature (33)..(406): Homolog of NCBI NO: 30699263 NR Description: nucellin protein, putative [Arabidopsis thaliana]
MIVLMVMSLVLGFSSAVDFRWRKTAGFSDRFTRAVSSVVFPVHGNVYPLGYYNVTINIGQPPRPYYLDLDTGSDLTWLQCDAPCVRCLEAPHPLYQPSSDLIPCNDPLCKALHLNSNQRCETPEQCDYEVEYADGGSSLGVLVRDVFSMNYTQGLRLTPRLALGCGYDQIPGASSHHPLDGVLGLGRGKVSILSQLHSQGYVKNVIGHCLSSLGGGILFFGDDLYDSSRVSWTPMSREYSKHYSPAMGGELLFGGRTTGLKNLLTVFDSGSSYTYFNSKAYQAVTYLLKRELSGKPLKEARDDHTLPLCWQGRRPFMSIEEVKKYFKPLALSFKTGWRSKTLFEIPPEAYLIISMKGNVCLGILNGTEIGLQNLNLIGDISMQDQMIIYDNEKQSIGWMPVDCDELASLKAAQETQVSHFLSSMAFSYSLTSPSPNSTLSYSSTHQFLNPSSSFPVSLSVSSPKNTRHLRLLITSALNPQTGQPTKKASTGSDKSSTNKKRKKKGKIAKPVEDWELRDSEDAFEEDDDADYSSSSSSLATFNSPPTIPKPPAGFVINETGRVLMASKKRITTVIDPTNNSPLDCVIRRVFTSSKGEDCMLLCPVDTPVQILKSTNIDGWSAVSDEEVESLLPAAAYALAKIHMHLVHSGFCYTARGGFCYTEDNVFDFRTDDGQDVEGLPTEGVEITCFHLDGSHYMVYTPSDPLLFVAAKDQNGLLQIADDELLDDPAVISAIDEETEFNALVEEEAALLESLLGERI

SEQ ID NO: 72237 - DNA, 1155 bp, Arabidopsis thaliana
  misc_feature (1)..(1155): Ceres Seq. ID no. 4926052
  misc_feature: MA Experiment ID: 108434 Result: Down-regulated in Transcription
  misc_feature: MA Experiment 108434 PARAMETER Experiment Name: At_Root_Tips_cDNA_P Parameter: Tissue Value: Root Tips
  misc_feature: MA Experiment ID: 108462 Result: Up-regulated in Transcription
  misc_feature: MA Experiment 108462 PARAMETER Experiment Name: At_Germinating_Seeds_cDNA_P Parameter: Age (day) Value: 2 vs. 0
  misc_feature: MA Experiment 108462 PARAMETER Experiment Name: At_Germinating_Seeds_cDNA_P Parameter: Tissue Value: Germinating Seeds
  misc_feature: MA Experiment ID: 108463 Result: Up-regulated in Transcription
  misc_feature: MA Experiment 108463 PARAMETER Experiment Name: At_Germinating_Seeds_cDNA_P Parameter: Age (day) Value: 3 vs. 0
  misc_feature: MA Experiment 108463 PARAMETER Experiment Name: At_Germinating_Seeds_cDNA_P Parameter: Tissue Value: Germinating Seeds
  misc_feature: MA Experiment ID: 108464 Result: Up-regulated in Transcription
  misc_feature: MA Experiment 108464 PARAMETER Experiment Name: At_Germinating_Seeds_cDNA_P Parameter: Age (day) Value: 4 vs. 0
  misc_feature: MA Experiment 108464 PARAMETER Experiment Name: At_Germinating_Seeds_cDNA_P Parameter: Tissue Value: Germinating Seeds
  misc_feature: MA Experiment ID: 20000227 Result: Down-regulated in Transcription
  misc_feature: MA Experiment 20000227 PARAMETER Experiment Name: At_Root-Tips-vs-Tops_P Parameter: Tissue Value: Root Tips vs. Root Tops
  misc_feature: MA Experiment ID: 20001451 Result: Down-regulated in Transcription
  misc_feature: MA Experiment 20001451 PARAMETER Experiment Name: At_Far-red-induction_P Parameter: Age (day) Value: 7
  misc_feature: MA Experiment 20001451 PARAMETER Experiment Name: At_Far-red-induction_P Parameter: Light Value: Far-red vs. White
  misc_feature: MA Experiment 20001451 PARAMETER Experiment Name: At_Far-red-induction_P Parameter: Organism Value: A. thaliana
  misc_feature: MA Experiment 20001451 PARAMETER Experiment Name: At_Far-red-induction_P Parameter: Plant Line Value: Columbia
  misc_feature: MA Experiment 20001451 PARAMETER Experiment Name: At_Far-red-induction_P Parameter: Timepoint (hr) Value: 24
  misc_feature: MA Experiment 20001451 PARAMETER Experiment Name: At_Far-red-induction_P Parameter: Tissue Value: Whole Plant
atactctctttttttctcggacaagaaggctacagaaagatatgtcgctgtcgtcttacctcagcccgacgcgccttctagaaggctacctccgccgttgtctcagggcggcaggactgacgtcgcagacgctttccatagactctgaaacaaccatccacttctggggcccaccacctctagaccaccggagcgacgatgacagaccggttatgcttctcctccacggcttcggtccgtcgtccatgtggcagtggcggcgacagatgcaagccttctctccctccgctttcagggtttattctcccgatcttgtcttcttcggcgactctacctcttcctccaccaatcgcaccgaagtcttccaggcggaatgtatggcaaagctaatggcgaaaataggaatagggaagtataatgtggctggaacaagctacggggggtttgttgcgtaccacatggccaaaatgtggccggaaaaagtggagaaagtggtgattgcaagctccggcatcaacatgcgaaagtgtgacggtgaaagtttattgcaaagatccaattgtgagtgcatcgagaaggttatgttaccatccactgcaactgagtttcgcacacttatggctttggcatcttcatggcggttagttcgtatgtttcctgatgctctctggaacgacgtaatcaataatttgtataaaaagaatagaaaagagaagatagaattgttgaagggagtgactttcggccggagcgaaaatttaaacatcgattctctttctcaggaggtcctaattgtatggggagacaaagatcagatatttcctgtgaagatggcttacgaattaaaagagattcttggagacaaaacgaaactagaaatcattgacaacacttcacatgttcctcagattgaatgtgctcaagagttcaacaatattgttttgagatttttgaagggttcttaagagccgtaattttattccatgctacatgattcttcagttttttttaagtgttaaactattggttacgtaattttgcgactttacttgccatgctttctcatttttcatgtaagaactttatccattactgtcattgtagagaactctatttatagcaaaaagcaatactaatatgcaacttaattttcgt

SEQ ID NO: 72238 - protein, 320 aa, Arabidopsis thaliana
  peptide (1)..(320): Ceres Seq. ID no. 4926053
  misc_feature (97)..(315): Pfam Name: alpha/beta hydrolase fold Pfam Description: alpha/beta hydrolase fold
  misc_feature (14)..(320): Homolog of NCBI NO: 30689631 NR Description: hydrolase, alpha/beta fold family [Arabidopsis
  misc_feature (71)..(320): Homolog of NCBI NO: 21592805 NR Description: unknown [Arabidopsis thaliana]
  misc_feature (18)..(317): Homolog of NCBI NO: 22326938 NR Description: similar to putative hydrolase; protein id: [Arabidopsis thaliana] >gi|29294062|gb|AAO73899.1| hydrolase,
  misc_feature (18)..(225): Homolog of NCBI NO: 13374854 NR Description: putative protein [Arabidopsis thaliana]
  misc_feature (14)..(122): Homolog of NCBI NO: 7486444 NR Description: hypothetical protein F4I10.110 - Arabidopsis >gi|4455332|emb|CAB36792.1| putative protein [Arabidopsis >gi|7270266|emb|CAB80035.1| putative protein [Arabidopsis
  misc_feature (120)..(317): Homolog of NCBI NO: 26451507 NR Description: unknown protein [Arabidopsis thaliana]
  misc_feature (126)..(228): Homolog of NCBI NO: 7486445 NR Description: hypothetical protein F4I10.120 - Arabidopsis >gi|4455333|emb|CAB36793.1| hypothetical protein [Arabidopsis >gi|7270267|emb|CAB80036.1| hypothetical protein [Arabidopsis
  misc_feature (25)..(320): Homolog of NCBI NO: 27436745 NR Description: Hypothetical protein [Oryza sativa (japonica
  misc_feature (16)..(320): Homolog of NCBI NO: 27436746 NR Description: Unknown protein [Oryza sativa (japonica
  misc_feature (47)..(317): Homolog of NCBI NO: 21592821 NR Description: unknown [Arabidopsis thaliana]
TLFFSRTRRLQKDMSLSSYLSPTRLLEGYLRRCLRAAGLTSQTLSIDSETTIHFWGPPPLDHRSDDDRPVMLLLHGFGPSSMWQWRRQMQAFSPSAFRVYSPDLVFFGDSTSSSTNRTEVFQAECMAKLMAKIGIGKYNVAGTSYGGFVAYHMAKMWPEKVEKVVIASSGINMRKCDGESLLQRSNCECIEKVMLPSTATEFRTLMALASSWRLVRMFPDALWNDVINNLYKKNRKEKIELLKGVTFGRSENLNIDSLSQEVLIVWGDKDQIFPVKMAYELKEILGDKTKLEIIDNTSHVPQIECAQEFNNIVLRFLKGS

SEQ ID NO: 72239 - protein, 307 aa, Arabidopsis thaliana
  peptide (1)..(307): Ceres Seq. ID no. 4926054
  misc_feature (84)..(302): Pfam Name: alpha/beta hydrolase fold Pfam Description: alpha/beta hydrolase fold
  misc_feature (1)..(307): Homolog of NCBI NO: 30689631 NR Description: hydrolase, alpha/beta fold family [Arabidopsis
  misc_feature (58)..(307): Homolog of NCBI NO: 21592805 NR Description: unknown [Arabidopsis thaliana]
  misc_feature (5)..(304): Homolog of NCBI NO: 22326938 NR Description: similar to putative hydrolase; protein id: [Arabidopsis thaliana] >gi|29294062|gb|AAO73899.1| hydrolase,
  misc_feature (5)..(212): Homolog of NCBI NO: 13374854 NR Description: putative protein [Arabidopsis thaliana]
  misc_feature (1)..(109): Homolog of NCBI NO: 7486444 NR Description: hypothetical protein F4I10.110 - Arabidopsis >gi|4455332|emb|CAB36792.1| putative protein [Arabidopsis >gi|7270266|emb|CAB80035.1| putative protein [Arabidopsis
  misc_feature (107)..(304): Homolog of NCBI NO: 26451507 NR Description: unknown protein [Arabidopsis thaliana]
  misc_feature (113)..(215): Homolog of NCBI NO: 7486445 NR Description: hypothetical protein F4I10.120 - Arabidopsis >gi|4455333|emb|CAB36793.1| hypothetical protein [Arabidopsis >gi|7270267|emb|CAB80036.1| hypothetical protein [Arabidopsis
  misc_feature (12)..(307): Homolog of NCBI NO: 27436745 NR Description: Hypothetical protein [Oryza sativa (japonica
  misc_feature (3)..(307): Homolog of NCBI NO: 27436746 NR Description: Unknown protein [Oryza sativa (japonica
  misc_feature (34)..(304): Homolog of NCBI NO: 21592821 NR Description: unknown [Arabidopsis thaliana]
MSLSSYLSPTRLLEGYLRRCLRAAGLTSQTLSIDSETTIHFWGPPPLDHRSDDDRPVMLLLHGFGPSSMWQWRRQMQAFSPSAFRVYSPDLVFFGDSTSSSTNRTEVFQAECMAKLMAKIGIGKYNVAGTSYGGFVAYHMAKMWPEKVEKVVIASSGINMRKCDGESLLQRSNCECIEKVMLPSTATEFRTLMALASSWRLVRMFPDALWNDVINNLYKKNRKEKIELLKGVTFGRSENLNIDSLSQEVLIVWGDKDQIFPVKMAYELKEILGDKTKLEIIDNTSHVPQIECAQEFNNIVLRFLKGS

SEQ ID NO: 72240 - protein, 250 aa, Arabidopsis thaliana; identical to SEQ ID NO: 22157
  peptide (1)..(250): Ceres Seq. ID no. 4926055
  misc_feature (27)..(245): Pfam Name: alpha/beta hydrolase fold Pfam Description: alpha/beta hydrolase fold
  misc_feature (1)..(250): Homolog of NCBI NO: 30689631 NR Description: hydrolase, alpha/beta fold family [Arabidopsis
  misc_feature (1)..(250): Homolog of NCBI NO: 21592805 NR Description: unknown [Arabidopsis thaliana]
  misc_feature (1)..(247): Homolog of NCBI NO: 22326938 NR Description: similar to putative hydrolase; protein id: [Arabidopsis thaliana] >gi|29294062|gb|AAO73899.1| hydrolase,
  misc_feature (1)..(155): Homolog of NCBI NO: 13374854 NR Description: putative protein [Arabidopsis thaliana]
  misc_feature (1)..(52): Homolog of NCBI NO: 7486444 NR Description: hypothetical protein F4I10.110 - Arabidopsis >gi|4455332|emb|CAB36792.1| putative protein [Arabidopsis >gi|7270266|emb|CAB80035.1| putative protein [Arabidopsis
  misc_feature (50)..(247): Homolog of NCBI NO: 26451507 NR Description: unknown protein [Arabidopsis thaliana]
  misc_feature (56)..(158): Homolog of NCBI NO: 7486445 NR Description: hypothetical protein F4I10.120 - Arabidopsis >gi|4455333|emb|CAB36793.1| hypothetical protein [Arabidopsis >gi|7270267|emb|CAB80036.1| hypothetical protein [Arabidopsis
  misc_feature (1)..(250): Homolog of NCBI NO: 27436745 NR Description: Hypothetical protein [Oryza sativa (japonica
  misc_feature (1)..(250): Homolog of NCBI NO: 27436746 NR Description: Unknown protein [Oryza sativa (japonica
  misc_feature (1)..(247): Homolog of NCBI NO: 21592821 NR Description: unknown [Arabidopsis thaliana]

SEQ ID NO: 72241 - DNA, 1401 bp, Arabidopsis thaliana
  misc_feature (1)..(1401): Ceres Seq. ID no. 4926239
  misc_feature: MA Experiment ID: 20000173 Result: Up-regulated in Transcription
  misc_feature: MA Experiment 20000173 PARAMETER Experiment Name: At_42deg_Heat_P Parameter: Age (day) Value: 14
  misc_feature: MA Experiment 20000173 PARAMETER Experiment Name: At_42deg_Heat_P Parameter: Organism Value: A. thaliana
  misc_feature: MA Experiment 20000173 PARAMETER Experiment Name: At_42deg_Heat_P Parameter: Plant Line Value: WS
  misc_feature: MA Experiment 20000173 PARAMETER Experiment Name: At_42deg_Heat_P Parameter: Temperature (deg C) Value: 42 vs. 22
  misc_feature: MA Experiment 20000173 PARAMETER Experiment Name: At_42deg_Heat_P Parameter: Timepoint (hr) Value: 6
  misc_feature: MA Experiment 20000173 PARAMETER Experiment Name: At_42deg_Heat_P Parameter: Tissue Value: Aerial
  misc_feature: MA Experiment ID: 20000234 Result: Up-regulated in Transcription
  misc_feature: MA Experiment 20000234 PARAMETER Experiment Name: At_Siliques_P Parameter: Age (day) Value: 21
  misc_feature: MA Experiment 20000234 PARAMETER Experiment Name: At_Siliques_P Parameter: Organism Value: A. thaliana
  misc_feature: MA Experiment 20000234 PARAMETER Experiment Name: At_Siliques_P Parameter: Plant Line Value: WS
  misc_feature: MA Experiment 20000234 PARAMETER Experiment Name: At_Siliques_P Parameter: Tissue Value: Less Than 5mm Siliques vs. Whole Plant
  misc_feature: MA Experiment ID: 20000495 Result: Up-regulated in Transcription
  misc_feature: MA Experiment 20000495 PARAMETER Experiment Name: At_Guard_Cells_P Parameter: Harvest Date Value: 8/2/2002
  misc_feature: MA Experiment 20000495 PARAMETER Experiment Name: At_Guard_Cells_P Parameter: Organism Value: A. thaliana
  misc_feature: MA Experiment 20000495 PARAMETER Experiment Name: At_Guard_Cells_P Parameter: Tissue Value: Guard Cells vs. Leaves
  misc_feature: MA Experiment ID: 20000496 Result: Up-regulated in Transcription
  misc_feature: MA Experiment 20000496 PARAMETER Experiment Name: At_Guard_Cells_P Parameter: Harvest Date Value: 7/19/2002
  misc_feature: MA Experiment 20000496 PARAMETER Experiment Name: At_Guard_Cells_P Parameter: Organism Value: Canola
  misc_feature: MA Experiment 20000496 PARAMETER Experiment Name: At_Guard_Cells_P Parameter: Tissue Value: Guard Cells vs. Leaves
atgacggcggccgaagtagcttctgcgcagaccaagaagctcatgaagtttagtctttctctcttccgtcgtggctttaactcctctaaatgcaaaacggcggcgaagatggctgtggctcgtataaagcttataaggaacaagagattagttgtggtgaagcaaatgaggcgtgacatcgctgttcttcttcaatccggtcaagatgccactgctcgaatcagagttgagcatgtgataagggaacagaacattcaggcagcaaacgaaatcattgagcttttctgtgaacttattgtttctcgtctcactatcatcactaagcaaaagcaatgtcctgtggatcttaaggaaggtattgctagtttgatttttgctgcgcctagatgctctgaaattcctgagcttggagatcttagagacatctttgcgaagaaatatgggaaagattttgtatctgctgctactgatttgcgtcctagctgcggtgttaaccggatgttgattgataagctttcggttagaaatcccggtggagaatacaaactgaaaatcatgaaggaaattgcaaaggaattccaggttgattgggatactacagagacagagcaagaacttctcaaacctcaagaagaaagcatagacgggccacgtaagtttgttagcgcttcaagcttaccagttaatcgtgcagctatcaacgagcctattgatcctaccaaagcagtgccaagatcgactagtagcatgagcatcaacacgcattatcatgacaccgagtcagcagcggaagcagctacagaattagccaaacaggcagttgcagcagcacaagtagcctccttattagctaccagaagagacagcagcaacaaggagttctctgtatcttctgatcattcaacacaccagaaggattcacagtacatggatcatcatcatcatcatccaggttcaagaagacaatcacgagactccgaaacaagttcctattacgcaaaacctggtgcagaaaacagaggaatgggtaggagacacagctacaacaatccgggtattaatgaatctgactacgaggaagagtataccaataccgaagcagaagcaaaagaaacaatgaggaggagacacagctacaaccctcgatcagttcctcctcctgcaacttctgagatcaagtttgatgagtcagactactacgaggaagagacagagccagatgaaccatcacagggtcgtgtttcttctctcccgccaaaccgagcaccgcctcaggctcctcagtccggtgagtccagacaggactcgagcggtcaccaggttcacccaaaactgcctgactatgatattttggctgcacgttttgaagcaatcagacacagtaaagggccattgatctga

SEQ ID NO: 72242 - protein, 466 aa, Arabidopsis thaliana
  peptide (1)..(466): Ceres Seq. ID no. 4926240
  misc_feature (37)..(158): Pfam Name: Eukaryotic protein of unknown function, DUF292 Pfam Description: Eukaryotic protein of unknown function, DUF292
  misc_feature (37)..(466): Homolog of NCBI NO: 15237108 NR Description: putative protein; protein id: At4g35730.1
  misc_feature (25)..(427): Homolog of NCBI NO: 40253290 NR Description: unknown protein [Oryza sativa (japonica
  misc_feature (20)..(313): Homolog of NCBI NO: 15218545 NR Description: hypothetical protein; protein id: At1g34220.1
  misc_feature (168)..(313): Homolog of NCBI NO: 33589706 NR Description: At1g34220 [Arabidopsis thaliana]
  misc_feature (20)..(166): Homolog of NCBI NO: 33589706 NR Description: At1g34220 [Arabidopsis thaliana]
  misc_feature (21)..(219): Homolog of NCBI NO: 18395668 NR Description: expressed protein; protein id: At1g25420.1, by cDNA: 7917., supported by cDNA: gi_20465253 [Arabidopsis
  misc_feature (21)..(219): Homolog of NCBI NO: 21595428 NR Description: unknown [Arabidopsis thaliana]
  misc_feature (3)..(265): Homolog of NCBI NO: 34910388 NR Description: P0692C11.15 [Oryza sativa (japonica
  misc_feature (37)..(450): Homolog of NCBI NO: 15224833 NR Description: hypothetical protein; protein id: At2g19710.1
  misc_feature (37)..(450): Homolog of NCBI NO: 34222084 NR Description: At2g19710 [Arabidopsis thaliana]
MTAAEVASAQTKKLMKFSLSLFRRGFNSSKCKTAAKMAVARIKLIRNKRLVVVKQMRRDIAVLLQSGQDATARIRVEHVIREQNIQAANEIIELFCELIVSRLTIITKQKQCPVDLKEGIASLIFAAPRCSEIPELGDLRDIFAKKYGKDFVSAATDLRPSCGVNRMLIDKLSVRNPGGEYKLKIMKEIAKEFQVDWDTTETEQELLKPQEESIDGPRKFVSASSLPVNRAAINEPIDPTKAVPRSTSSMSINTHYHDTESAAEAATELAKQAVAAAQVASLLATRRDSSNKEFSVSSDHSTHQKDSQYMDHHHHHPGSRRQSRDSETSSYYAKPGAENRGMGRRHSYNNPGINESDYEEEYTNTEAEAKETMRRRHSYNPRSVPPPATSEIKFDESDYYEEETEPDEPSQGRVSSLPPNRAPPQAPQSGESRQDSSGHQVHPKLPDYDILAARFEAIRHSKGPLI

SEQ ID NO: 72243 - protein, 452 aa, Arabidopsis thaliana
  peptide (1)..(452): Ceres Seq. ID no. 4926241
  misc_feature (23)..(144): Pfam Name: Eukaryotic protein of unknown function, DUF292 Pfam Description: Eukaryotic protein of unknown function, DUF292
  misc_feature (23)..(452): Homolog of NCBI NO: 15237108 NR Description: putative protein; protein id: At4g35730.1
  misc_feature (11)..(413): Homolog of NCBI NO: 40253290 NR Description: unknown protein [Oryza sativa (japonica
  misc_feature (6)..(299): Homolog of NCBI NO: 15218545 NR Description: hypothetical protein; protein id: At1g34220.1
  misc_feature (154)..(299): Homolog of NCBI NO: 33589706 NR Description: At1g34220 [Arabidopsis thaliana]
  misc_feature (6)..(152): Homolog of NCBI NO: 33589706 NR Description: At1g34220 [Arabidopsis thaliana]
  misc_feature (7)..(205): Homolog of NCBI NO: 18395668 NR Description: expressed protein; protein id: At1g25420.1, by cDNA: 7917., supported by cDNA: gi_20465253 [Arabidopsis
  misc_feature (7)..(205): Homolog of NCBI NO: 21595428 NR Description: unknown [Arabidopsis thaliana]
  misc_feature (1)..(251): Homolog of NCBI NO: 34910388 NR Description: P0692C11.15 [Oryza sativa (japonica
  misc_feature (23)..(436): Homolog of NCBI NO: 15224833 NR Description: hypothetical protein; protein id: At2g19710.1
  misc_feature (23)..(436): Homolog of NCBI NO: 34222084 NR Description: At2g19710 [Arabidopsis thaliana]
MKFSLSLFRRGFNSSKCKTAAKMAVARIKLIRNKRLVVVKQMRRDIAVLLQSGQDATARIRVEHVIREQNIQAANEIIELFCELIVSRLTIITKQKQCPVDLKEGIASLIFAAPRCSEIPELGDLRDIFAKKYGKDFVSAATDLRPSCGVNRMLIDKLSVRNPGGEYKLKIMKEIAKEFQVDWDTTETEQELLKPQEESIDGPRKFVSASSLPVNRAAINEPIDPTKAVPRSTSSMSINTHYHDTESAAEAATELAKQAVAAAQVASLLATRRDSSNKEFSVSSDHSTHQKDSQYMDHHHHHPGSRRQSRDSETSSYYAKPGAENRGMGRRHSYNNPGINESDYEEEYTNTEAEAKETMRRRHSYNPRSVPPPATSEIKFDESDYYEEETEPDEPSQGRVSSLPPNRAPPQAPQSGESRQDSSGHQVHPKLPDYDILAARFEAIRHSKGPLI

SEQ ID NO: 72244 - protein, 430 aa, Arabidopsis thaliana; identical to SEQ ID NO: 69693
  peptide (1)..(430): Ceres Seq. ID no. 4926242
  misc_feature (1)..(122): Pfam Name: Eukaryotic protein of unknown function, DUF292 Pfam Description: Eukaryotic protein of unknown function, DUF292
  misc_feature (1)..(430): Homolog of NCBI NO: 15237108 NR Description: putative protein; protein id: At4g35730.1
  misc_feature (1)..(391): Homolog of NCBI NO: 40253290 NR Description: unknown protein [Oryza sativa (japonica
  misc_feature (1)..(277): Homolog of NCBI NO: 15218545 NR Description: hypothetical protein; protein id: At1g34220.1
  misc_feature (132)..(277): Homolog of NCBI NO: 33589706 NR Description: At1g34220 [Arabidopsis thaliana]
  misc_feature (1)..(130): Homolog of NCBI NO: 33589706 NR Description: At1g34220 [Arabidopsis thaliana]
  misc_feature (1)..(183): Homolog of NCBI NO: 18395668 NR Description: expressed protein; protein id: At1g25420.1, by cDNA: 7917., supported by cDNA: gi_20465253 [Arabidopsis
  misc_feature (1)..(183): Homolog of NCBI NO: 21595428 NR Description: unknown [Arabidopsis thaliana]
  misc_feature (1)..(229): Homolog of NCBI NO: 34910388 NR Description: P0692C11.15 [Oryza sativa (japonica
  misc_feature (1)..(414): Homolog of NCBI NO: 15224833 NR Description: hypothetical protein; protein id: At2g19710.1
  misc_feature (1)..(414): Homolog of NCBI NO: 34222084 NR Description: At2g19710 [Arabidopsis thaliana]

SEQ ID NO: 72245 - DNA, 1161 bp, Arabidopsis thaliana
  misc_feature (1)..(1161): Ceres Seq. ID no. 4926550
  misc_feature: MA Experiment ID: 108434 Result: Down-regulated in Transcription
  misc_feature: MA Experiment 108434 PARAMETER Experiment Name: At_Root_Tips_cDNA_P Parameter: Tissue Value: Root Tips
  misc_feature: MA Experiment ID: 108435 Result: Down-regulated in Transcription
  misc_feature: MA Experiment 108435 PARAMETER Experiment Name: At_stm_Mutants_cDNA_P Parameter: Plant Line Value: wt Landsburg vs stm
  misc_feature: MA Experiment 108435 PARAMETER Experiment Name: At_stm_Mutants_cDNA_P Parameter: Tissue Value: Shoot Apical Meristem Region
  misc_feature: MA Experiment ID: 108461 Result: Up-regulated in Transcription
  misc_feature: MA Experiment 108461 PARAMETER Experiment Name: At_Germinating_Seeds_cDNA_P Parameter: Age (day) Value: 1 vs. 0
  misc_feature: MA Experiment 108461 PARAMETER Experiment Name: At_Germinating_Seeds_cDNA_P Parameter: Tissue Value: Germinating Seeds
  misc_feature: MA Experiment ID: 108462 Result: Up-regulated in Transcription
  misc_feature: MA Experiment 108462 PARAMETER Experiment Name: At_Germinating_Seeds_cDNA_P Parameter: Age (day) Value: 2 vs. 0
  misc_feature: MA Experiment 108462 PARAMETER Experiment Name: At_Germinating_Seeds_cDNA_P Parameter: Tissue Value: Germinating Seeds
  misc_feature: MA Experiment ID: 108463 Result: Up-regulated in Transcription
  misc_feature: MA Experiment 108463 PARAMETER Experiment Name: At_Germinating_Seeds_cDNA_P Parameter: Age (day) Value: 3 vs. 0
  misc_feature: MA Experiment 108463 PARAMETER Experiment Name: At_Germinating_Seeds_cDNA_P Parameter: Tissue Value: Germinating Seeds
  misc_feature: MA Experiment ID: 108464 Result: Up-regulated in Transcription
  misc_feature: MA Experiment 108464 PARAMETER Experiment Name: At_Germinating_Seeds_cDNA_P Parameter: Age (day) Value: 4 vs. 0
  misc_feature: MA Experiment 108464 PARAMETER Experiment Name: At_Germinating_Seeds_cDNA_P Parameter: Tissue Value: Germinating Seeds
  misc_feature: MA Experiment ID: 108595 Result: Down-regulated in Transcription
  misc_feature: MA Experiment 108595 PARAMETER Experiment Name: At_Ler-pi_Ovule_cDNA_P Parameter: Plant Line Value: null
  misc_feature: MA Experiment ID: 20000180 Result: Up-regulated in Transcription
  misc_feature: MA Experiment 20000180 PARAMETER Experiment Name: At_Germinating_Seeds_P Parameter: Age (hr) Value: 24 vs. 0
  misc_feature: MA Experiment 20000180 PARAMETER Experiment Name: At_Germinating_Seeds_P Parameter: Tissue Value: Germinating Seeds
  misc_feature: MA Experiment ID: 20000185 Result: Down-regulated in Transcription
  misc_feature: MA Experiment 20000185 PARAMETER Experiment Name: At_Roots__P Parameter: Age (day) Value: 7 vs. 21
  misc_feature: MA Experiment 20000185 PARAMETER Experiment Name: At_Roots__P Parameter: Organism Value: A. thaliana
  misc_feature: MA Experiment 20000185 PARAMETER Experiment Name: At_Roots__P Parameter: Tissue Value: Roots vs. Whole Plant
  misc_feature: MA Experiment ID: 20000227 Result: Down-regulated in Transcription
  misc_feature: MA Experiment 20000227 PARAMETER Experiment Name: At_Root-Tips-vs-Tops_P Parameter: Tissue Value: Root Tips vs. Root Tops
  misc_feature: MA Experiment ID: 20000439 Result: Down-regulated in Transcription
  misc_feature: MA Experiment 20000439 PARAMETER Experiment Name: At_Roots__P Parameter: Age (day) Value: 14 vs. 21
  misc_feature: MA Experiment 20000439 PARAMETER Experiment Name: At_Roots__P Parameter: Organism Value: A. thaliana
  misc_feature: MA Experiment 20000439 PARAMETER Experiment Name: At_Roots__P Parameter: Tissue Value: Roots vs. Whole Plant
  misc_feature: MA Experiment ID: 20001248 Result: Down-regulated in Transcription
  misc_feature: MA Experiment 20001248 PARAMETER Experiment Name: At_Far-red-induction_P Parameter: Age (day) Value: 7
  misc_feature: MA Experiment 20001248 PARAMETER Experiment Name: At_Far-red-induction_P Parameter: Light Value: Far-red vs. White
  misc_feature: MA Experiment 20001248 PARAMETER Experiment Name: At_Far-red-induction_P Parameter: Organism Value: A. thaliana
  misc_feature: MA Experiment 20001248 PARAMETER Experiment Name: At_Far-red-induction_P Parameter: Plant Line Value: Columbia
  misc_feature: MA Experiment 20001248 PARAMETER Experiment Name: At_Far-red-induction_P Parameter: Timepoint (hr) Value: 4
  misc_feature: MA Experiment 20001248 PARAMETER Experiment Name: At_Far-red-induction_P Parameter: Tissue Value: Whole Plant
  misc_feature: MA Experiment ID: 20001451 Result: Down-regulated in Transcription
  misc_feature: MA Experiment 20001451 PARAMETER Experiment Name: At_Far-red-induction_P Parameter: Age (day) Value: 7
  misc_feature: MA Experiment 20001451 PARAMETER Experiment Name: At_Far-red-induction_P Parameter: Light Value: Far-red vs. White
  misc_feature: MA Experiment 20001451 PARAMETER Experiment Name: At_Far-red-induction_P Parameter: Organism Value: A. thaliana
  misc_feature: MA Experiment 20001451 PARAMETER Experiment Name: At_Far-red-induction_P Parameter: Plant Line Value: Columbia
  misc_feature: MA Experiment 20001451 PARAMETER Experiment Name: At_Far-red-induction_P Parameter: Timepoint (hr) Value: 24
  misc_feature: MA Experiment 20001451 PARAMETER Experiment Name: At_Far-red-induction_P Parameter: Tissue Value: Whole Plant
  misc_feature: MA Experiment ID: 20001557 Result: Down-regulated in Transcription
  misc_feature: MA Experiment 20001557 PARAMETER Experiment Name: At_Drought_Soil_Dry_P Parameter: Age (day) Value: 27
  misc_feature: MA Experiment 20001557 PARAMETER Experiment Name: At_Drought_Soil_Dry_P Parameter: Organism Value: A. thaliana
  misc_feature: MA Experiment 20001557 PARAMETER Experiment Name: At_Drought_Soil_Dry_P Parameter: Plant Line Value: WS
  misc_feature: MA Experiment 20001557 PARAMETER Experiment Name: At_Drought_Soil_Dry_P Parameter: Post Timepoint (hr) Value: 3
  misc_feature: MA Experiment 20001557 PARAMETER Experiment Name: At_Drought_Soil_Dry_P Parameter: Post-Treatment Value: Re-Water vs. No Drought
  misc_feature: MA Experiment 20001557 PARAMETER Experiment Name: At_Drought_Soil_Dry_P Parameter: Timepoint (day) Value: 13
  misc_feature: MA Experiment 20001557 PARAMETER Experiment Name: At_Drought_Soil_Dry_P Parameter: Treatment Value: Drought vs. No Drought
  misc_feature: MA Experiment ID: 20001558 Result: Down-regulated in Transcription
  misc_feature: MA Experiment 20001558 PARAMETER Experiment Name: At_Drought_Soil_Dry_P Parameter: Age (day) Value: 27
  misc_feature: MA Experiment 20001558 PARAMETER Experiment Name: At_Drought_Soil_Dry_P Parameter: Organism Value: A. thaliana
  misc_feature: MA Experiment 20001558 PARAMETER Experiment Name: At_Drought_Soil_Dry_P Parameter: Plant Line Value: WS
  misc_feature: MA Experiment 20001558 PARAMETER Experiment Name: At_Drought_Soil_Dry_P Parameter: Post Timepoint (hr) Value: 6
  misc_feature: MA Experiment 20001558 PARAMETER Experiment Name: At_Drought_Soil_Dry_P Parameter: Post-Treatment Value: Re-Water vs. No Drought
  misc_feature: MA Experiment 20001558 PARAMETER Experiment Name: At_Drought_Soil_Dry_P Parameter: Timepoint (day) Value: 13
  misc_feature: MA Experiment 20001558 PARAMETER Experiment Name: At_Drought_Soil_Dry_P Parameter: Treatment Value: Drought vs. No Drought
  misc_feature: MA Experiment ID: 20001560 Result: Down-regulated in Transcription
  misc_feature: MA Experiment 20001560 PARAMETER Experiment Name: At_Drought_Soil_Dry_P Parameter: Age (day) Value: 28
  misc_feature: MA Experiment 20001560 PARAMETER Experiment Name: At_Drought_Soil_Dry_P Parameter: Organism Value: A. thaliana
  misc_feature: MA Experiment 20001560 PARAMETER Experiment Name: At_Drought_Soil_Dry_P Parameter: Plant Line Value: WS
  misc_feature: MA Experiment 20001560 PARAMETER Experiment Name: At_Drought_Soil_Dry_P Parameter: Post Timepoint (hr) Value: None
  misc_feature: MA Experiment 20001560 PARAMETER Experiment Name: At_Drought_Soil_Dry_P Parameter: Post-Treatment Value: None
  misc_feature: MA Experiment 20001560 PARAMETER Experiment Name: At_Drought_Soil_Dry_P Parameter: Timepoint (day) Value: 14
  misc_feature: MA Experiment 20001560 PARAMETER Experiment Name: At_Drought_Soil_Dry_P Parameter: Treatment Value: Drought vs. No Drought
acagaatcagatctttgtatcgtcaatggctccttcttttatgtaaggatctatgttcttatccggaatttagagtctttattgagtttgatcgattttgggattataagtttcgcaaaattcatgttttttacattaagtctattcgatttcagctgtattgggaatttaagtttttctgtggcttgattctattgagacagttttgtagaagatcgtccagctccgcttgatgctacttctgatccaccgtctctcttcgacggaaccacaaggttgtacacaagctacgtttgcccatttgctcaacgagtttggatcactcgaaacttcaagggtttgcaagaaaagattaaacttgttcctttggatcttgggaataggcctgcttggtacaaggagaaagtatatccagagaacaaggtgccagcgcttgagcacaatggaaaaatcattggggagagtctggatttgattaaatatcttgataacacttttgaagggccttctctttaccccgaggatcatgcaaaaagagagtttggcgacgagttgctcaagtatactgatactttcgttaaaactatgtatgtgtcactcaaaggagacccctctaaagaaaccgcacctgtgttagattatctggaaaacgctctgtataagttcgatgacgggccgttcttcctcggtcagttaagcttggttgatatcgcctatatcccgttcattgaaaggttccaaactgtactcaatgaattatttaagtgcgacattactgccgaacgtcccaaactatcagcatggattgaggaaattaacaagagcgatggctatgcacagacgaaaatggatcctaaggagattgtggaggttttcaagaaaaaattcatgtaactgtaagcaagcacgaagcagtaaagtgtatgagaccaaaccaccttgtacgaacaggtggtctttggatatgaagaaataagatgtgtacttgaacctgatgatgcaataagatttgtactttaagcagcaacagcttaatctgtattctagtgttgatcaaattatcaaccattgacattgttaatatattactgtatgatagtaatactatcaaaatctcacacattaagaaccagatgatgcaataaggataaggtgtatagt

SEQ ID NO: 72246 - protein, 102 aa, Arabidopsis thaliana
  peptide (1)..(102): Ceres Seq. ID no. 4926551
  misc_feature (11)..(81): Pfam Name: Glutathione S-transferase, C-terminal domain Pfam Description: Glutathione S-transferase, C-terminal domain
  misc_feature (1)..(102): Homolog of NCBI NO: 15241956 NR Description: In2-1 protein, putative; protein id: At5g02790.1, by cDNA: 13224. [Arabidopsis thaliana] >gi|11357904|pir||T48300
  misc_feature (1)..(102): Homolog of NCBI NO: 21537338 NR Description: In2-1 protein [Arabidopsis thaliana]
  misc_feature (1)..(102): Homolog of NCBI NO: 11357919 NR Description: hypothetical protein F9G14.90 - Arabidopsis >gi|7413553|emb|CAB86032.1| putative protein [Arabidopsis
  misc_feature (1)..(102): Homolog of NCBI NO: 30679765 NR Description: In2-1 protein, putative [Arabidopsis thaliana]
MYVSLKGDPSKETAPVLDYLENALYKFDDGPFFLGQLSLVDIAYIPFIERFQTVLNELFKCDITAERPKLSAWIEEINKSDGYAQTKMDPKEIVEVFKKKFM

SEQ ID NO: 72247 - protein, 80 aa, Arabidopsis thaliana
  peptide (1)..(80): Ceres Seq. ID no. 4926552
MLLLIHRLSSTEPQGCTQATFAHLLNEFGSLETSRVCKKRLNLFLWILGIGLLGTRRKYIQRTRCQRLSTMEKSLGRVWI

SEQ ID NO: 72248 - protein, 76 aa, Arabidopsis thaliana; identical to SEQ ID NO: 43135
  peptide (1)..(76): Ceres Seq. ID no. 4926553

SEQ ID NO: 72249 - DNA, 876 bp, Arabidopsis thaliana
  misc_feature (1)..(876): Ceres Seq. ID no. 4926979
  misc_feature: MA Experiment ID: 20000180 Result: Up-regulated in Transcription
  misc_feature: MA Experiment 20000180 PARAMETER Experiment Name: At_Germinating_Seeds_P Parameter: Age (hr) Value: 24 vs. 0
  misc_feature: MA Experiment 20000180 PARAMETER Experiment Name: At_Germinating_Seeds_P Parameter: Tissue Value: Germinating Seeds
  misc_feature: MA Experiment ID: 20000184 Result: Down-regulated in Transcription
  misc_feature: MA Experiment 20000184 PARAMETER Experiment Name: At_Shoots__P Parameter: Age (day) Value: 7
  misc_feature: MA Experiment 20000184 PARAMETER Experiment Name: At_Shoots__P Parameter: Tissue Value: Shoots vs. Whole Plant
  misc_feature: MA Experiment ID: 20000227 Result: Up-regulated in Transcription
  misc_feature: MA Experiment 20000227 PARAMETER Experiment Name: At_Root-Tips-vs-Tops_P Parameter: Tissue Value: Root Tips vs. Root Tops
  misc_feature: MA Experiment ID: 20000234 Result: Up-regulated in Transcription
  misc_feature: MA Experiment 20000234 PARAMETER Experiment Name: At_Siliques_P Parameter: Age (day) Value: 21
  misc_feature: MA Experiment 20000234 PARAMETER Experiment Name: At_Siliques_P Parameter: Organism Value: A. thaliana
  misc_feature: MA Experiment 20000234 PARAMETER Experiment Name: At_Siliques_P Parameter: Plant Line Value: WS
  misc_feature: MA Experiment 20000234 PARAMETER Experiment Name: At_Siliques_P Parameter: Tissue Value: Less Than 5mm Siliques vs. Whole Plant
  misc_feature: MA Experiment ID: 20000235 Result: Up-regulated in Transcription
  misc_feature: MA Experiment 20000235 PARAMETER Experiment Name: At_Siliques_P Parameter: Age (day) Value: 21
  misc_feature: MA Experiment 20000235 PARAMETER Experiment Name: At_Siliques_P Parameter: Organism Value: A. thaliana
  misc_feature: MA Experiment 20000235 PARAMETER Experiment Name: At_Siliques_P Parameter: Plant Line Value: WS
  misc_feature: MA Experiment 20000235 PARAMETER Experiment Name: At_Siliques_P Parameter: Tissue Value: 5-10mm Siliques vs. Whole Plant
  misc_feature: MA Experiment ID: 20000286 Result: Up-regulated in Transcription
  misc_feature: MA Experiment 20000286 PARAMETER Experiment Name: At_Open_Flower_P Parameter: Age (day) Value: 21
  misc_feature: MA Experiment 20000286 PARAMETER Experiment Name: At_Open_Flower_P Parameter: Plant Line Value: WS
  misc_feature: MA Experiment 20000286 PARAMETER Experiment Name: At_Open_Flower_P Parameter: Tissue Value: Half Open vs. Whole Plant
  misc_feature: MA Experiment ID: 20000438 Result: Down-regulated in Transcription
  misc_feature: MA Experiment 20000438 PARAMETER Experiment Name: At_Shoots__P Parameter: Age (day) Value: 14
  misc_feature: MA Experiment 20000438 PARAMETER Experiment Name: At_Shoots__P Parameter: Tissue Value: Shoots vs. Whole Plant
  misc_feature: MA Experiment ID: 20000794 Result: Up-regulated in Transcription
  misc_feature: MA Experiment 20000794 PARAMETER Experiment Name: At_Petals_P Parameter: Age (day) Value: 23-25 days
  misc_feature: MA Experiment 20000794 PARAMETER Experiment Name: At_Petals_P Parameter: Plant Line Value: WS
  misc_feature: MA Experiment 20000794 PARAMETER Experiment Name: At_Petals_P Parameter: Tissue Value: Petals vs. Whole plant
  misc_feature: MA Experiment ID: 20001248 Result: Up-regulated in Transcription
  misc_feature: MA Experiment 20001248 PARAMETER Experiment Name: At_Far-red-induction_P Parameter: Age (day) Value: 7
  misc_feature: MA Experiment 20001248 PARAMETER Experiment Name: At_Far-red-induction_P Parameter: Light Value: Far-red vs. White
  misc_feature: MA Experiment 20001248 PARAMETER Experiment Name: At_Far-red-induction_P Parameter: Organism Value: A. thaliana
  misc_feature: MA Experiment 20001248 PARAMETER Experiment Name: At_Far-red-induction_P Parameter: Plant Line Value: Columbia
  misc_feature: MA Experiment 20001248 PARAMETER Experiment Name: At_Far-red-induction_P Parameter: Timepoint (hr) Value: 4
  misc_feature: MA Experiment 20001248 PARAMETER Experiment Name: At_Far-red-induction_P Parameter: Tissue Value: Whole Plant
  misc_feature: MA Experiment ID: 20001757 Result: Down-regulated in Transcription
  misc_feature: MA Experiment 20001757 PARAMETER Experiment Name: At_50mM_NH4NO3_L-to-H_P Parameter: Timepoint (hr) Value: 6
  misc_feature: MA Experiment 20001757 PARAMETER Experiment Name: At_50mM_NH4NO3_L-to-H_P Parameter: Tissue Value: Leaf
  misc_feature: MA Experiment 20001757 PARAMETER Experiment Name: At_50mM_NH4NO3_L-to-H_P Parameter: Treatment Value: 50mM NH4NO3 vs 100mM Mannitol
  misc_feature: MA Experiment ID: 20001906 Result: Down-regulated in Transcription
  misc_feature: MA Experiment 20001906 PARAMETER Experiment Name: At_Drought_Reproduction_P Parameter: Age (day) Value: 35
  misc_feature: MA Experiment 20001906 PARAMETER Experiment Name: At_Drought_Reproduction_P Parameter: Organism Value: A. thaliana
  misc_feature: MA Experiment 20001906 PARAMETER Experiment Name: At_Drought_Reproduction_P Parameter: Plant Line Value: WS
  misc_feature: MA Experiment 20001906 PARAMETER Experiment Name: At_Drought_Reproduction_P Parameter: Timepoint (day) Value: 5
  misc_feature: MA Experiment 20001906 PARAMETER Experiment Name: At_Drought_Reproduction_P Parameter: Tissue Value: Siliques
  misc_feature: MA Experiment 20001906 PARAMETER Experiment Name: At_Drought_Reproduction_P Parameter: Treatment Value: Drought vs. No Drought
  misc_feature: MA Experiment ID: 20001911 Result: Down-regulated in Transcription
  misc_feature: MA Experiment 20001911 PARAMETER Experiment Name: At_Drought_Reproduction_P Parameter: Age (day) Value: 40
  misc_feature: MA Experiment 20001911 PARAMETER Experiment Name: At_Drought_Reproduction_P Parameter: Organism Value: A. thaliana
  misc_feature: MA Experiment 20001911 PARAMETER Experiment Name: At_Drought_Reproduction_P Parameter: Plant Line Value: WS
  misc_feature: MA Experiment 20001911 PARAMETER Experiment Name: At_Drought_Reproduction_P Parameter: Timepoint (day) Value: 10
  misc_feature: MA Experiment 20001911 PARAMETER Experiment Name: At_Drought_Reproduction_P Parameter: Tissue Value: Flowers
  misc_feature: MA Experiment 20001911 PARAMETER Experiment Name: At_Drought_Reproduction_P Parameter: Treatment Value: Drought vs. No Drought
atgtcaccagcaacatatctagagacatcaaactggttgtttcaagaaaacagaggaaccaaatggacagctgaagaaaacaagaaattcgaaaacgctttagccttttacgacaaagatactcccgacagatggtccagagtcgctgccatgcttcccggtaaaacagtcggagatgtgatcaaacaatacagagagcttgaggaagacgttagcgacatcgaagctggtcttataccaatccctggttacgcctctgattcattcacacttgattggggtggctacgacggagcaagcggtaacaatgggtttaacatgaacggttactacttttccgccgccggaggaaagagaggatccgccgcacgaacggcggagcatgagaggaagaaaggtgttccatggacagaagaagaacacagacaatttctgatgggtttgaagaaatatggaaaaggagattggagaaacatagctcgtaactttgtgaccacaagaacgccaacgcaagtcgcaagtcacgctcaaaagtatttcatacggcaagtcaatggtggcaaagacaaacgccgttcaagcatccatgatatcacaaccgtcaacatccccgactctcctgacgctgcagccgcggataacgcaaccgcaaacgcaccttgctcgccaccttccgtaggaggaaaccagcgggagacatcggagtgggaaggtcaaacactatacgatgaaacagcagctgcgttttataatcaaaacgcgttttcagaaacgctacttggaatgtcttcgacgccctacatggcaaaacttcaggagcagagttttctgaacgcatcgcaattcgaatcgtacaatgcgtatctccaaatgtag

SEQ ID NO: 72250 - protein, 291 aa, Arabidopsis thaliana
  peptide (1)..(291): Ceres Seq. ID no. 4926980
  misc_feature (19)..(68): Pfam Name: Myb-like DNA-binding domain Pfam Description: Myb-like DNA-binding domain
  misc_feature (1)..(291): Homolog of NCBI NO: 7446171 NR Description: probable MYB family transcription factor - Arabidopsis thaliana >gi|3335378|gb|AAC27179.1| putative MYB
  misc_feature (1)..(291): Homolog of NCBI NO: 30687381 NR Description: MYB family transcription factor -related thaliana] >gi|26451319|dbj|BAC42760.1| putative MYB family factor [Arabidopsis thaliana] >gi|29824293|gb|AAP04107.1|
  misc_feature (1)..(291): Homolog of NCBI NO: 12005328 NR Description: unknown [Hevea brasiliensis]
  misc_feature (1)..(285): Homolog of NCBI NO: 18874263 NR Description: MYB-like transcription factor DIVARICATA
  misc_feature (1)..(255): Homolog of NCBI NO: 18874265 NR Description: MYB-like transcription factor DVL1 [Antirrhinum
  misc_feature (1)..(205): Homolog of NCBI NO: 15237776 NR Description: I-box binding factor - like protein; protein id:
  misc_feature (10)..(223): Homolog of NCBI NO: 15240915 NR Description: myb family transcription factor; protein id:
  misc_feature (12)..(226): Homolog of NCBI NO: 34908386 NR Description: P0529E05.19 [Oryza sativa (japonica
  misc_feature (95)..(271): Homolog of NCBI NO: 21618234 NR Description: MYB-family transcription factor, putative
  misc_feature (14)..(97): Homolog of NCBI NO: 21618234 NR Description: MYB-family transcription factor, putative
MSPATYLETSNWLFQENRGTKWTAEENKKFENALAFYDKDTPDRWSRVAAMLPGKTVGDVIKQYRELEEDVSDIEAGLIPIPGYASDSFTLDWGGYDGASGNNGFNMNGYYFSAAGGKRGSAARTAEHERKKGVPWTEEEHRQFLMGLKKYGKGDWRNIARNFVTTRTPTQVASHAQKYFIRQVNGGKDKRRSSIHDITTVNIPDSPDAAAADNATANAPCSPPSVGGNQRETSEWEGQTLYDETAAAFYNQNAFSETLLGMSSTPYMAKLQEQSFLNASQFESYNAYLQM

SEQ ID NO: 72251 - protein, 241 aa, Arabidopsis thaliana
  peptide (1)..(241): Ceres Seq. ID no. 4926981
  misc_feature (1)..(241): Homolog of NCBI NO: 7446171 NR Description: probable MYB family transcription factor - Arabidopsis thaliana >gi|3335378|gb|AAC27179.1| putative MYB
  misc_feature (1)..(241): Homolog of NCBI NO: 30687381 NR Description: MYB family transcription factor -related thaliana] >gi|26451319|dbj|BAC42760.1| putative MYB family factor [Arabidopsis thaliana] >gi|29824293|gb|AAP04107.1|
  misc_feature (1)..(241): Homolog of NCBI NO: 12005328 NR Description: unknown [Hevea brasiliensis]
  misc_feature (1)..(235): Homolog of NCBI NO: 18874263 NR Description: MYB-like transcription factor DIVARICATA
  misc_feature (1)..(205): Homolog of NCBI NO: 18874265 NR Description: MYB-like transcription factor DVL1 [Antirrhinum
  misc_feature (1)..(155): Homolog of NCBI NO: 15237776 NR Description: I-box binding factor - like protein; protein id:
  misc_feature (1)..(173): Homolog of NCBI NO: 15240915 NR Description: myb family transcription factor; protein id:
  misc_feature (1)..(176): Homolog of NCBI NO: 34908386 NR Description: P0529E05.19 [Oryza sativa (japonica
  misc_feature (45)..(221): Homolog of NCBI NO: 21618234 NR Description: MYB-family transcription factor, putative
  misc_feature (1)..(47): Homolog of NCBI NO: 21618234 NR Description: MYB-family transcription factor, putative
MLPGKTVGDVIKQYRELEEDVSDIEAGLIPIPGYASDSFTLDWGGYDGASGNNGFNMNGYYFSAAGGKRGSAARTAEHERKKGVPWTEEEHRQFLMGLKKYGKGDWRNIARNFVTTRTPTQVASHAQKYFIRQVNGGKDKRRSSIHDITTVNIPDSPDAAAADNATANAPCSPPSVGGNQRETSEWEGQTLYDETAAAFYNQNAFSETLLGMSSTPYMAKLQEQSFLNASQFESYNAYLQM

SEQ ID NO: 72252 - protein, 185 aa, Arabidopsis thaliana
  peptide (1)..(185): Ceres Seq. ID no. 4926982
  misc_feature (1)..(185): Homolog of NCBI NO: 7446171 NR Description: probable MYB family transcription factor - Arabidopsis thaliana >gi|3335378|gb|AAC27179.1| putative MYB
  misc_feature (1)..(185): Homolog of NCBI NO: 30687381 NR Description: MYB family transcription factor -related thaliana] >gi|26451319|dbj|BAC42760.1| putative MYB family factor [Arabidopsis thaliana] >gi|29824293|gb|AAP04107.1|
  misc_feature (1)..(185): Homolog of NCBI NO: 12005328 NR Description: unknown [Hevea brasiliensis]
  misc_feature (1)..(179): Homolog of NCBI NO: 18874263 NR Description: MYB-like transcription factor DIVARICATA
  misc_feature (1)..(149): Homolog of NCBI NO: 18874265 NR Description: MYB-like transcription factor DVL1 [Antirrhinum
  misc_feature (1)..(99): Homolog of NCBI NO: 15237776 NR Description: I-box binding factor - like protein; protein id:
  misc_feature (1)..(117): Homolog of NCBI NO: 15240915 NR Description: myb family transcription factor; protein id:
  misc_feature (1)..(120): Homolog of NCBI NO: 34908386 NR Description: P0529E05.19 [Oryza sativa (japonica
  misc_feature (1)..(165): Homolog of NCBI NO: 21618234 NR Description: MYB-family transcription factor, putative
  misc_feature (1)..(165): Homolog of NCBI NO: 15229712 NR Description: MYB-family transcription factor, putative; id: At3g11280.1, supported by cDNA: 109398., supported by cDNA: supported by cDNA: gi_20258976 [Arabidopsis thaliana]
MNGYYFSAAGGKRGSAARTAEHERKKGVPWTEEEHRQFLMGLKKYGKGDWRNIARNFVTTRTPTQVASHAQKYFIRQVNGGKDKRRSSIHDITTVNIPDSPDAAAADNATANAPCSPPSVGGNQRETSEWEGQTLYDETAAAFYNQNAFSETLLGMSSTPYMAKLQEQSFLNASQFESYNAYLQM

SEQ ID NO: 72253 - DNA, 1164 bp, Arabidopsis thaliana
  misc_feature (1)..(1164): Ceres Seq. ID no. 4927118
  misc_feature: MA Experiment ID: 20000180 Result: Down-regulated in Transcription
  misc_feature: MA Experiment 20000180 PARAMETER Experiment Name: At_Germinating_Seeds_P Parameter: Age (hr) Value: 24 vs. 0
  misc_feature: MA Experiment 20000180 PARAMETER Experiment Name: At_Germinating_Seeds_P Parameter: Tissue Value: Germinating Seeds
  misc_feature: MA Experiment ID: 20000495 Result: Up-regulated in Transcription
  misc_feature: MA Experiment 20000495 PARAMETER Experiment Name: At_Guard_Cells_P Parameter: Harvest Date Value: 8/2/2002
  misc_feature: MA Experiment 20000495 PARAMETER Experiment Name: At_Guard_Cells_P Parameter: Organism Value: A. thaliana
  misc_feature: MA Experiment 20000495 PARAMETER Experiment Name: At_Guard_Cells_P Parameter: Tissue Value: Guard Cells vs. Leaves
  misc_feature: MA Experiment ID: 20000496 Result: Up-regulated in Transcription
  misc_feature: MA Experiment 20000496 PARAMETER Experiment Name: At_Guard_Cells_P Parameter: Harvest Date Value: 7/19/2002
  misc_feature: MA Experiment 20000496 PARAMETER Experiment Name: At_Guard_Cells_P Parameter: Organism Value: Canola
  misc_feature: MA Experiment 20000496 PARAMETER Experiment Name: At_Guard_Cells_P Parameter: Tissue Value: Guard Cells vs. Leaves
atgctctctattcgccgccatgccaaaaccgtagcttcctcctgcaccaaccttactcagaaacgaacctacgtcgacgtttacatgaaatggaagagagatccttatttcgacaacatcgaacacatcctccgatcatctcagctcaaatccgtcgtctctcttaagaactgtatcgtccaggaacctaatcgctgcattccgatctctgccatctccaagaagactcgtcaattcgatgtatcaaccaaaatcgctcacttcttaaggaagtttccttcaatctttgaagagttcgttggtccagagtataatctcccatggtttagattgacaccagaagcaacagaactagataggcaagagagagtcgtataccaaacttctgcagatgatttgcgtgataggttgaagaaattgattctgatgagtaaagataatgttttgccactaagtatagttcaaggaatgaaatggtatttaggtttacctgatgattacttgcagtttccagatatgaatttagattcttcgtttaggtttgtggatatggaagatggagttaaaggtttagcagtagattataatggaggagataaggttttgtctgtgttgcagaagaatgcaatgaagaagagaagaggagaagtgagtttagaagagattgagtttcctctgtttccatcaaaaggttgtagattgagagtcaagattgaagattggttaatggagtttcaaaagcttccttatgtatcaccatatgatgattattcatgtttggatccaagtagtgatatagcagagaagagagttgttggttttcttcatgaattgctttgtcttttcgttgagcattctgctgagaggaagaagttgttatgtctcaagaagcattttggattgccgcaaaaggttcataaggcgtttgagagacatccgcagattttctacttgtctatgaagaataaaacttgtacagctattcttagagagccttatagagataaagctagtgttgaaacacatcctgtgttgggggtaaggaagaaatacatccagttgatgaagaattcagagttgattctgaagagtcgaaggaatagtttcgggtttagggacgaaggggttgtagataaagatttggatttggattttgaaggctaa

SEQ ID NO: 72254 - protein, 387 aa, Arabidopsis thaliana
  peptide (1)..(387): Ceres Seq. ID no. 4927119
  misc_feature (31)..(364): Pfam Name: Plant specific of unknown function (DUF860) Pfam Description: Plant specific of unknown function (DUF860)
  misc_feature (1)..(387): Homolog of NCBI NO: 15225035 NR Description: hypothetical protein; protein id: At2g39120.1
  misc_feature (27)..(387): Homolog of NCBI NO: 11282335 NR Description: hypothetical protein F14P22.110 - Arabidopsis >gi|6735369|emb|CAB68190.1| putative protein [Arabidopsis
  misc_feature (27)..(387): Homolog of NCBI NO: 18410975 NR Description: putative protein; protein id: At3g58520.1, by cDNA: 112338., supported by cDNA: gi_15810015 [Arabidopsis >gi|15810016|gb|AAL06935.1| AT3g58520/F14P22_110 [Arabidopsis
  misc_feature (27)..(387): Homolog of NCBI NO: 21536812 NR Description: unknown [Arabidopsis thaliana]
  misc_feature (2)..(384): Homolog of NCBI NO: 15217597 NR Description: hypothetical protein; protein id: At1g71850.1
  misc_feature (20)..(365): Homolog of NCBI NO: 15238875 NR Description: putative protein; protein id: At5g48040.1 thaliana] >gi|10177755|dbj|BAB11068.1|
  misc_feature (2)..(384): Homolog of NCBI NO: 3413424 NR Description: hypothetical protein [Arabidopsis thaliana]
  misc_feature (18)..(358): Homolog of NCBI NO: 15233788 NR Description: putative protein; protein id: At4g24320.1
  misc_feature (32)..(366): Homolog of NCBI NO: 15224649 NR Description: hypothetical protein; protein id: At2g31290.1, by cDNA: gi_18377711, supported by cDNA: gi_20465406 [Arabidopsis >gi|25352258|pir||H84718 hypothetical protein At2g31290
  misc_feature (31)..(383): Homolog of NCBI NO: 21593983 NR Description: unknown [Arabidopsis thaliana]
MLSIRRHAKTVASSCTNLTQKRTYVDVYMKWKRDPYFDNIEHILRSSQLKSVVSLKNCIVQEPNRCIPISAISKKTRQFDVSTKIAHFLRKFPSIFEEFVGPEYNLPWFRLTPEATELDRQERVVYQTSADDLRDRLKKLILMSKDNVLPLSIVQGMKWYLGLPDDYLQFPDMNLDSSFRFVDMEDGVKGLAVDYNGGDKVLSVLQKNAMKKRRGEVSLEEIEFPLFPSKGCRLRVKIEDWLMEFQKLPYVSPYDDYSCLDPSSDIAEKRVVGFLHELLCLFVEHSAERKKLLCLKKHFGLPQKVHKAFERHPQIFYLSMKNKTCTAILREPYRDKASVETHPVLGVRKKYIQLMKNSELILKSRRNSFGFRDEGVVDKDLDLDFEG

SEQ ID NO: 72255 - protein, 359 aa, Arabidopsis thaliana
  peptide (1)..(359): Ceres Seq. ID no. 4927120
  misc_feature (3)..(336): Pfam Name: Plant specific of unknown function (DUF860) Pfam Description: Plant specific of unknown function (DUF860)
  misc_feature (1)..(359): Homolog of NCBI NO: 15225035 NR Description: hypothetical protein; protein id: At2g39120.1
  misc_feature (1)..(359): Homolog of NCBI NO: 11282335 NR Description: hypothetical protein F14P22.110 - Arabidopsis >gi|6735369|emb|CAB68190.1| putative protein [Arabidopsis
  misc_feature (1)..(359): Homolog of NCBI NO: 21536812 NR Description: unknown [Arabidopsis thaliana]
  misc_feature (1)..(359): Homolog of NCBI NO: 18410975 NR Description: putative protein; protein id: At3g58520.1, by cDNA: 112338., supported by cDNA: gi_15810015 [Arabidopsis >gi|15810016|gb|AAL06935.1| AT3g58520/F14P22_110 [Arabidopsis
  misc_feature (1)..(356): Homolog of NCBI NO: 15217597 NR Description: hypothetical protein; protein id: At1g71850.1
  misc_feature (1)..(337): Homolog of NCBI NO: 15238875 NR Description: putative protein; protein id: At5g48040.1 thaliana] >gi|10177755|dbj|BAB11068.1|
  misc_feature (1)..(356): Homolog of NCBI NO: 3413424 NR Description: hypothetical protein [Arabidopsis thaliana]
  misc_feature (1)..(330): Homolog of NCBI NO: 15233788 NR Description: putative protein; protein id: At4g24320.1
  misc_feature (4)..(338): Homolog of NCBI NO: 15224649 NR Description: hypothetical protein; protein id: At2g31290.1, by cDNA: gi_18377711, supported by cDNA: gi_20465406 [Arabidopsis >gi|25352258|pir||H84718 hypothetical protein At2g31290
  misc_feature (3)..(355): Homolog of NCBI NO: 21593983 NR Description: unknown [Arabidopsis thaliana]
MKWKRDPYFDNIEHILRSSQLKSVVSLKNCIVQEPNRCIPISAISKKTRQFDVSTKIAHFLRKFPSIFEEFVGPEYNLPWFRLTPEATELDRQERVVYQTSADDLRDRLKKLILMSKDNVLPLSIVQGMKWYLGLPDDYLQFPDMNLDSSFRFVDMEDGVKGLAVDYNGGDKVLSVLQKNAMKKRRGEVSLEEIEFPLFPSKGCRLRVKIEDWLMEFQKLPYVSPYDDYSCLDPSSDIAEKRVVGFLHELLCLFVEHSAERKKLLCLKKHFGLPQKVHKAFERHPQIFYLSMKNKTCTAILREPYRDKASVETHPVLGVRKKYIQLMKNSELILKSRRNSFGFRDEGVVDKDLDLDFEG

SEQ ID NO: 72256 - protein, 245 aa, Arabidopsis thaliana
  peptide (1)..(245): Ceres Seq. ID no. 4927121
  misc_feature (1)..(222): Pfam Name: Plant specific of unknown function (DUF860) Pfam Description: Plant specific of unknown function (DUF860)
  misc_feature (1)..(245): Homolog of NCBI NO: 15225035 NR Description: hypothetical protein; protein id: At2g39120.1
  misc_feature (1)..(245): Homolog of NCBI NO: 11282335 NR Description: hypothetical protein F14P22.110 - Arabidopsis >gi|6735369|emb|CAB68190.1| putative protein [Arabidopsis
  misc_feature (1)..(245): Homolog of NCBI NO: 18410975 NR Description: putative protein; protein id: At3g58520.1, by cDNA: 112338., supported by cDNA: gi_15810015 [Arabidopsis >gi|15810016|gb|AAL06935.1| AT3g58520/F14P22_110 [Arabidopsis
  misc_feature (1)..(245): Homolog of NCBI NO: 21536812 NR Description: unknown [Arabidopsis thaliana]
  misc_feature (1)..(242): Homolog of NCBI NO: 15217597 NR Description: hypothetical protein; protein id: At1g71850.1
  misc_feature (1)..(223): Homolog of NCBI NO: 15238875 NR Description: putative protein; protein id: At5g48040.1 thaliana] >gi|10177755|dbj|BAB11068.1|
  misc_feature (1)..(242): Homolog of NCBI NO: 3413424 NR Description: hypothetical protein [Arabidopsis thaliana]
  misc_feature (1)..(216): Homolog of NCBI NO: 15233788 NR Description: putative protein; protein id: At4g24320.1
  misc_feature (1)..(224): Homolog of NCBI NO: 15224649 NR Description: hypothetical protein; protein id: At2g31290.1, by cDNA: gi_18377711, supported by cDNA: gi_20465406 [Arabidopsis >gi|25352258|pir||H84718 hypothetical protein At2g31290
  misc_feature (1)..(241): Homolog of NCBI NO: 21593983 NR Description: unknown [Arabidopsis thaliana]
MSKDNVLPLSIVQGMKWYLGLPDDYLQFPDMNLDSSFRFVDMEDGVKGLAVDYNGGDKVLSVLQKNAMKKRRGEVSLEEIEFPLFPSKGCRLRVKIEDWLMEFQKLPYVSPYDDYSCLDPSSDIAEKRVVGFLHELLCLFVEHSAERKKLLCLKKHFGLPQKVHKAFERHPQIFYLSMKNKTCTAILREPYRDKASVETHPVLGVRKKYIQLMKNSELILKSRRNSFGFRDEGVVDKDLDLDFEG

SEQ ID NO: 72257 - DNA, 1681 bp, Arabidopsis thaliana
  misc_feature (1)..(1681): Ceres Seq. ID no. 4927134
  misc_feature: MA Experiment ID: 108434 Result: Down-regulated in Transcription
  misc_feature: MA Experiment 108434 PARAMETER Experiment Name: At_Root_Tips_cDNA_P Parameter: Tissue Value: Root Tips
  misc_feature: MA Experiment ID: 108461 Result: Down-regulated in Transcription
  misc_feature: MA Experiment 108461 PARAMETER Experiment Name: At_Germinating_Seeds_cDNA_P Parameter: Age (day) Value: 1 vs. 0
  misc_feature: MA Experiment 108461 PARAMETER Experiment Name: At_Germinating_Seeds_cDNA_P Parameter: Tissue Value: Germinating Seeds
  misc_feature: MA Experiment ID: 108462 Result: Down-regulated in Transcription
  misc_feature: MA Experiment 108462 PARAMETER Experiment Name: At_Germinating_Seeds_cDNA_P Parameter: Age (day) Value: 2 vs. 0
  misc_feature: MA Experiment 108462 PARAMETER Experiment Name: At_Germinating_Seeds_cDNA_P Parameter: Tissue Value: Germinating Seeds
  misc_feature: MA Experiment ID: 108463 Result: Down-regulated in Transcription
  misc_feature: MA Experiment 108463 PARAMETER Experiment Name: At_Germinating_Seeds_cDNA_P Parameter: Age (day) Value: 3 vs. 0
  misc_feature: MA Experiment 108463 PARAMETER Experiment Name: At_Germinating_Seeds_cDNA_P Parameter: Tissue Value: Germinating Seeds
  misc_feature: MA Experiment ID: 108464 Result: Down-regulated in Transcription
  misc_feature: MA Experiment 108464 PARAMETER Experiment Name: At_Germinating_Seeds_cDNA_P Parameter: Age (day) Value: 4 vs. 0
  misc_feature: MA Experiment 108464 PARAMETER Experiment Name: At_Germinating_Seeds_cDNA_P Parameter: Tissue Value: Germinating Seeds
  misc_feature: MA Experiment ID: 108488 Result: Down-regulated in Transcription
  misc_feature: MA Experiment ID: 108573 Result: Up-regulated in Transcription
  misc_feature: MA Experiment 108573 PARAMETER Experiment Name: At_Drought_cDNA_P Parameter: Timepoint (hr) Value: 6
  misc_feature: MA Experiment 108573 PARAMETER Experiment Name: At_Drought_cDNA_P Parameter: Tissue Value: Aerial
  misc_feature: MA Experiment 108573 PARAMETER Experiment Name: At_Drought_cDNA_P Parameter: Treatment Value: Drought vs. No Drought
  misc_feature: MA Experiment ID: 108594 Result: Down-regulated in Transcription
  misc_feature: MA Experiment 108594 PARAMETER Experiment Name: At_Ler-rhl_Root_cDNA_P Parameter: Plant Line Value: null
  misc_feature: MA Experiment ID: 20000794 Result: Up-regulated in Transcription
  misc_feature: MA Experiment 20000794 PARAMETER Experiment Name: At_Petals_P Parameter: Age (day) Value: 23-25 days
  misc_feature: MA Experiment 20000794 PARAMETER Experiment Name: At_Petals_P Parameter: Plant Line Value: WS
  misc_feature: MA Experiment 20000794 PARAMETER Experiment Name: At_Petals_P Parameter: Tissue Value: Petals vs. Whole plant
  misc_feature: MA Experiment ID: 20001757 Result: Down-regulated in Transcription
  misc_feature: MA Experiment 20001757 PARAMETER Experiment Name: At_50mM_NH4NO3_L-to-H_P Parameter: Timepoint (hr) Value: 6
  misc_feature: MA Experiment 20001757 PARAMETER Experiment Name: At_50mM_NH4NO3_L-to-H_P Parameter: Tissue Value: Leaf
  misc_feature: MA Experiment 20001757 PARAMETER Experiment Name: At_50mM_NH4NO3_L-to-H_P Parameter: Treatment Value: 50mM NH4NO3 vs 100mM Mannitol
  misc_feature: MA Experiment ID: 20001905 Result: Up-regulated in Transcription
  misc_feature: MA Experiment 20001905 PARAMETER Experiment Name: At_Drought_Reproduction_P Parameter: Age (day) Value: 40
  misc_feature: MA Experiment 20001905 PARAMETER Experiment Name: At_Drought_Reproduction_P Parameter: Organism Value: A. thaliana
  misc_feature: MA Experiment 20001905 PARAMETER Experiment Name: At_Drought_Reproduction_P Parameter: Plant Line Value: WS
  misc_feature: MA Experiment 20001905 PARAMETER Experiment Name: At_Drought_Reproduction_P Parameter: Timepoint (day) Value: 10
  misc_feature: MA Experiment 20001905 PARAMETER Experiment Name: At_Drought_Reproduction_P Parameter: Tissue Value: Rosettes
  misc_feature: MA Experiment 20001905 PARAMETER Experiment Name: At_Drought_Reproduction_P Parameter: Treatment Value: Drought vs. No Drought
  misc_feature: Pfam Name: Aa_trans Pfam Description: Transmembrane amino acid transporter protein
aattagattgtttttgttttgtttaacatcagttgcgaatcgagctggattcttgggctcgctttttctttcaatcaaaagtttcgatattagtgaaggataaaattcgctaaaaaaagagaattttttttgttaaaaaaattataaaagctggctttctcaaaatttctccatgtggtcgacgaagaagacgaagaagacgaagaagaaagagaaagtctcttagcaaacatgaccgccaccgaagctaagaatcgcaaaatcaatgtcggagatggagatgacgttgttgatatcgaaatccctgacactgctcatcaaattagcagcgattcatggtttcaggtggcgttcgttttgaccaccggtataaacagcgcgtatgtgttgggatattcaggaacaattatggttcctttaggttggattggtggtgtggttggtcttcttattgctactgcaatctctctttatgcaaacactctaatagctaagcttcatgagtttggtggcagaagacacattcgctatagagaccttgctggattcatttacggtaggaaggcttatcatcttacatggggattgcaatatgttaatcttttcatgattaattgtggattcattatcctagctggttccgccttaaaggctgtttatgtgcttttcagggatgatcataccatgaaactacctcattttatagccattgctggtttgatttgtgcgattttcgctattgggattcctcatttatcggctcttggggtctggcttggagtttcgaccttcctcagtctcatctatattgttgtggcaatcgtgctatcggttagagatggagtaaaaacaccttcaagagattacgagatacaaggatcatcattgagcaaactttttaccatcacaggagcagccgcaaatctggttttcgcattcaacaccgggatgcttccagaaattcaggcaacagtgaggcaaccagttgttaaaaacatgatgaaggctctatactttcaattcacagcgggtgttttaccgatgtacgcagttacattcatcggatattgggcttatggatcctcaacctcgacctatctactaaacagtgttaatggcccactctgggtcaaagcccttgctaacgtctctgctatccttcaatctgttatctctttgcacatatttgcgagtccaacatatgagtacatggacacaaagtatgggatcaaaggaaacccatttgcgataaagaacctgctgtttaggatcatggcgagaggcgggtacatagcggtaagcacgcttatctcagcgctgttgccgttcctcggtgacttcatgagcctaactggtgcagtgagcacattccctctcacattcattctagccaaccacatgtactataaggcaaagaacaataagctgaatgctatgcaaaagctatggcattggcttaacgttgtcttctttagtttgatgtctgttgctgcagccattgcagctgtcagactcatcgccgttgattccaaaaatttccatgtttttgcagatttgtaattcattatattatatagtcaattgtgtatcctttattcttaggcaggtttatttctcctgtaagcttgtattctctctctatttgtcttaccattagagcctaaataaataaatcaagttc

SEQ ID NO: 72258 - protein, 442 aa, Arabidopsis thaliana; identical to SEQ ID NO: 40259
  peptide (1)..(442): Ceres Seq. ID no. 4927135
  misc_feature: Pfam Name: Aa_trans Pfam Description: Transmembrane amino acid transporter protein
  misc_feature (1)..(442): Homolog of NCBI NO: 15225591 NR Description: proline transporter 1; protein id: At2g39890.1, by cDNA: 39048. [Arabidopsis thaliana] >gi|11358707|pir||T50692
  misc_feature (1)..(442): Homolog of NCBI NO: 21593453 NR Description: proline transporter 1 [Arabidopsis thaliana]
  misc_feature (6)..(442): Homolog of NCBI NO: 15228000 NR Description: putative proline transporter; protein id: supported by cDNA: 20959. [Arabidopsis thaliana]
  misc_feature (6)..(442): Homolog of NCBI NO: 21554196 NR Description: putative proline transporter [Arabidopsis
  misc_feature (1)..(442): Homolog of NCBI NO: 15228183 NR Description: proline transporter 2; protein id: At3g55740.1, by cDNA: gi_19698890 [Arabidopsis thaliana]
  misc_feature (17)..(442): Homolog of NCBI NO: 21069018 NR Description: betaine/proline transporter [Avicennia marina]
  misc_feature (17)..(442): Homolog of NCBI NO: 21069020 NR Description: betaine/proline transporter [Avicennia marina]
  misc_feature (22)..(442): Homolog of NCBI NO: 8571474 NR Description: proline/glycine betaine transporter [Atriplex
  misc_feature (17)..(442): Homolog of NCBI NO: 11358950 NR Description: proline transport protein 3 [imported] - tomato
  misc_feature (15)..(442): Homolog of NCBI NO: 11358960 NR Description: proline transport protein [imported] - rice

SEQ ID NO: 72259 - protein, 383 aa, Arabidopsis thaliana; identical to SEQ ID NO: 40260
  peptide (1)..(383): Ceres Seq. ID no. 4927136
  misc_feature: Pfam Name: Aa_trans Pfam Description: Transmembrane amino acid transporter protein
  misc_feature (1)..(383): Homolog of NCBI NO: 15225591 NR Description: proline transporter 1; protein id: At2g39890.1, by cDNA: 39048. [Arabidopsis thaliana] >gi|11358707|pir||T50692
  misc_feature (1)..(383): Homolog of NCBI NO: 21593453 NR Description: proline transporter 1 [Arabidopsis thaliana]
  misc_feature (1)..(383): Homolog of NCBI NO: 15228000 NR Description: putative proline transporter; protein id: supported by cDNA: 20959. [Arabidopsis thaliana]
  misc_feature (1)..(383): Homolog of NCBI NO: 21554196 NR Description: putative proline transporter [Arabidopsis
  misc_feature (1)..(383): Homolog of NCBI NO: 15228183 NR Description: proline transporter 2; protein id: At3g55740.1, by cDNA: gi_19698890 [Arabidopsis thaliana]
  misc_feature (1)..(383): Homolog of NCBI NO: 21069018 NR Description: betaine/proline transporter [Avicennia marina]
  misc_feature (1)..(383): Homolog of NCBI NO: 21069020 NR Description: betaine/proline transporter [Avicennia marina]
  misc_feature (1)..(383): Homolog of NCBI NO: 8571474 NR Description: proline/glycine betaine transporter [Atriplex
  misc_feature (1)..(383): Homolog of NCBI NO: 11358950 NR Description: proline transport protein 3 [imported] - tomato
  misc_feature (1)..(383): Homolog of NCBI NO: 11358960 NR Description: proline transport protein [imported] - rice

SEQ ID NO: 72260 - protein, 317 aa, Arabidopsis thaliana; identical to SEQ ID NO: 24809
  peptide (1)..(317): Ceres Seq. ID no. 4927137
  misc_feature: Pfam Name: Aa_trans Pfam Description: Transmembrane amino acid transporter protein
  misc_feature (1)..(317): Homolog of NCBI NO: 15225591 NR Description: proline transporter 1; protein id: At2g39890.1, by cDNA: 39048. [Arabidopsis thaliana] >gi|11358707|pir||T50692
  misc_feature (1)..(317): Homolog of NCBI NO: 21593453 NR Description: proline transporter 1 [Arabidopsis thaliana]
  misc_feature (1)..(317): Homolog of NCBI NO: 15228000 NR Description: putative proline transporter; protein id: supported by cDNA: 20959. [Arabidopsis thaliana]
  misc_feature (1)..(317): Homolog of NCBI NO: 21554196 NR Description: putative proline transporter [Arabidopsis
  misc_feature (1)..(317): Homolog of NCBI NO: 15228183 NR Description: proline transporter 2; protein id: At3g55740.1, by cDNA: gi_19698890 [Arabidopsis thaliana]
  misc_feature (1)..(317): Homolog of NCBI NO: 21069018 NR Description: betaine/proline transporter [Avicennia marina]
  misc_feature (1)..(317): Homolog of NCBI NO: 21069020 NR Description: betaine/proline transporter [Avicennia marina]
  misc_feature (1)..(317): Homolog of NCBI NO: 8571474 NR Description: proline/glycine betaine transporter [Atriplex
  misc_feature (1)..(317): Homolog of NCBI NO: 11358950 NR Description: proline transport protein 3 [imported] - tomato
  misc_feature (1)..(317): Homolog of NCBI NO: 11358960 NR Description: proline transport protein [imported] - rice

SEQ ID NO: 72261 - DNA, 1551 bp, Arabidopsis thaliana
  misc_feature (1)..(1551): Ceres Seq. ID no. 4927185
  misc_feature: MA Experiment ID: 108464 Result: Down-regulated in Transcription
  misc_feature: MA Experiment 108464 PARAMETER Experiment Name: At_Germinating_Seeds_cDNA_P Parameter: Age (day) Value: 4 vs. 0
  misc_feature: MA Experiment 108464 PARAMETER Experiment Name: At_Germinating_Seeds_cDNA_P Parameter: Tissue Value: Germinating Seeds
  misc_feature: MA Experiment ID: 20000265 Result: Up-regulated in Transcription
  misc_feature: MA Experiment 20000265 PARAMETER Experiment Name: At_Open_Flower_P Parameter: Age (day) Value: 21
  misc_feature: MA Experiment 20000265 PARAMETER Experiment Name: At_Open_Flower_P Parameter: Plant Line Value: WS
  misc_feature: MA Experiment 20000265 PARAMETER Experiment Name: At_Open_Flower_P Parameter: Tissue Value: Closed Flower vs. Whole Plant
  misc_feature: MA Experiment ID: 20000495 Result: Up-regulated in Transcription
  misc_feature: MA Experiment 20000495 PARAMETER Experiment Name: At_Guard_Cells_P Parameter: Harvest Date Value: 8/2/2002
  misc_feature: MA Experiment 20000495 PARAMETER Experiment Name: At_Guard_Cells_P Parameter: Organism Value: A. thaliana
  misc_feature: MA Experiment 20000495 PARAMETER Experiment Name: At_Guard_Cells_P Parameter: Tissue Value: Guard Cells vs. Leaves
  misc_feature: MA Experiment ID: 20000794 Result: Up-regulated in Transcription
  misc_feature: MA Experiment 20000794 PARAMETER Experiment Name: At_Petals_P Parameter: Age (day) Value: 23-25 days
  misc_feature: MA Experiment 20000794 PARAMETER Experiment Name: At_Petals_P Parameter: Plant Line Value: WS
  misc_feature: MA Experiment 20000794 PARAMETER Experiment Name: At_Petals_P Parameter: Tissue Value: Petals vs. Whole plant
acaaaagaaaattgtcaatttcgaaaaatgttgagcacaagctctgatcttcatggccgtcttctccggtgagtgacatctctctctggcctctgtttttttggcctttaagtgcttttttcttgaagaaccctaattttgatttgttttgaggattcagattatcagaaccaatagcagagattcttagacgtacacagtacacaccgcaagagagcagcaaagtatccaccaaagatatactcttgtccttgttaccaaacacttcgtcttctcgtctcgccaatgaagaatcgatcaaaagtctcgcgcttgcttgtgcccttctcgcttcttcacgttcatccactcacgaacttctctcatggattccagaaaacctctctgtcatgggggaatctacattttgggagatttcaagggattgtttcagtgatttttctagcaacagtaatgctgagaagcttgtggaattggtagaggatagtgagaagatcgaaatgttgccgatagttttgccggagttaaaagatggaatcgaaaagagttcacttggtaaaggcagtgatgcagaggatgtttcagctgcaatggctagaacacctgttggttatgctatacttgctgctcaccagctcaggtggtttgttactcaggttaaaaaaccgaatttggtgaaattttgtaacttggtggttccttgtgctttgacagcacttgatcattggtctcctgaagtcaaagggcagggtatgataacctttgttcatcttgctaaaaatgtgagttccggtgatcttggtttgtatggagatgtggttcttgatgcgtgttgccagaatatagcttccgatgatgagatttggatacatgtggtagagttatctgtgcttcttgttactaaaatccacccaaataatcctcgaagcccgtggtatgagaagatcatgaatgagatgctcgggcatttggaacgccaaccaagaaataaggagcgacgtatcacttggctaagatttgttgagccactcttgaactctctagggcttttcttacttgctcattttcgacgtatcttccctcttttctttcagtggatgcattcagacgacgccgaaacagttctgttggttcttgagagactggagacagttgtgaggttgacgtggattagacactcacctgtgttcccaagattggtggatgagcttgtttccttgtacaaagagtcatcgatgcgtaaggatcgcgatgatattagacctcttatcctccgtatcttgatgctactccgccagtgcaaaggtctacggtttgagtcagcgtggagtcaataccaggaggatccaaatctgagtactgttagtcaacatatatggactagttcaagttgatctcaagagcgtatgtttgactaaaacagccatttttttttctaattttcgatattagtttggtctaggcctagtgatgcaagtaattactggcgaatcctcgaatttttgtaagcatttggctcttgactcttcttaagctaatctgatttgatac

SEQ ID NO: 72262 - protein, 334 aa, Arabidopsis thaliana; identical to SEQ ID NO: 72042
  peptide (1)..(334): Ceres Seq. ID no. 4927186
  misc_feature (1)..(334): Homolog of NCBI NO: 30688076 NR Description: expressed protein [Arabidopsis thaliana]
  misc_feature (1)..(334): Homolog of NCBI NO: 26451294 NR Description: unknown protein [Arabidopsis thaliana]
  misc_feature (1)..(334): Homolog of NCBI NO: 20198306 NR Description: expressed protein [Arabidopsis thaliana]
  misc_feature (1)..(182): Homolog of NCBI NO: 25370807 NR Description: hypothetical protein At2g39910 [imported] -

SEQ ID NO: 72263 - protein, 297 aa, Arabidopsis thaliana
  peptide (1)..(297): Ceres Seq. ID no. 4927187
  misc_feature (1)..(297): Homolog of NCBI NO: 30688076 NR Description: expressed protein [Arabidopsis thaliana]
  misc_feature (1)..(297): Homolog of NCBI NO: 26451294 NR Description: unknown protein [Arabidopsis thaliana]
  misc_feature (1)..(297): Homolog of NCBI NO: 20198306 NR Description: expressed protein [Arabidopsis thaliana]
  misc_feature (1)..(145): Homolog of NCBI NO: 25370807 NR Description: hypothetical protein At2g39910 [imported] -
MLPIVLPELKDGIEKSSLGKGSDAEDVSAAMARTPVGYAILAAHQLRWFVTQVKKPNLVKFCNLVVPCALTALDHWSPEVKGQGMITFVHLAKNVSSGDLGLYGDVVLDACCQNIASDDEIWIHVVELSVLLVTKIHPNNPRSPWYEKIMNEMLGHLERQPRNKERRITWLRFVEPLLNSLGLFLLAHFRRIFPLFFQWMHSDDAETVLLVLERLETVVRLTWIRHSPVFPRLVDELVSLYKESSMRKDRDDIRPLILRILMLLRQCKGLRFESAWSQYQEDPNLSTVSQHIWTSSS

SEQ ID NO: 72264 - protein, 267 aa, Arabidopsis thaliana
  peptide (1)..(267): Ceres Seq. ID no. 4927188
  misc_feature (1)..(267): Homolog of NCBI NO: 30688076 NR Description: expressed protein [Arabidopsis thaliana]
  misc_feature (1)..(267): Homolog of NCBI NO: 26451294 NR Description: unknown protein [Arabidopsis thaliana]
  misc_feature (1)..(267): Homolog of NCBI NO: 20198306 NR Description: expressed protein [Arabidopsis thaliana]
  misc_feature (1)..(115): Homolog of NCBI NO: 25370807 NR Description: hypothetical protein At2g39910 [imported] -
MARTPVGYAILAAHQLRWFVTQVKKPNLVKFCNLVVPCALTALDHWSPEVKGQGMITFVHLAKNVSSGDLGLYGDVVLDACCQNIASDDEIWIHVVELSVLLVTKIHPNNPRSPWYEKIMNEMLGHLERQPRNKERRITWLRFVEPLLNSLGLFLLAHFRRIFPLFFQWMHSDDAETVLLVLERLETVVRLTWIRHSPVFPRLVDELVSLYKESSMRKDRDDIRPLILRILMLLRQCKGLRFESAWSQYQEDPNLSTVSQHIWTSSS

SEQ ID NO: 72265 - DNA, 978 bp, Arabidopsis thaliana
  misc_feature (1)..(978): Ceres Seq. ID no. 4927536
  misc_feature: MA Experiment ID: 20000227 Result: Up-regulated in Transcription
  misc_feature: MA Experiment 20000227 PARAMETER Experiment Name: At_Root-Tips-vs-Tops_P Parameter: Tissue Value: Root Tips vs. Root Tops
atggtggttggaggcgtcagtctcttcccggagacggcagaagcgatcgtgatgggaccgtcgatgcagaagctgacgtggcattactataaagtttacaacacttgcgagaatgcagagaattttgtgaggcaccaagttgagatattttacaagaacgataaaagtattgctcctaagctccttcgtctcctctactcagactgctttgtttccggatgcgatgcatcagttcttctagaaggtccaaactcagagaaaatggcgccacaaaacagaggacttggaggattcgttctcatagacaaaatcaaaatagtcttggaacagagatgtcctggtgttgtctcttgcgccgacattcttaatcttgcaactcgtgatgctgttcatttggcgggtgcaccatcttatcctgtgttcacaggcaggagagatggtttgacgtctgataagcaaaccgtggacctaccatcgccatccatctcatgggaccaagccatgtcttatttcaaatccagaggcttgaatgttcttgacatggctacacttctaggatcacattcaatggggagaacacattgcagctatgttgttgatcgactctacaattacaacaagaccggtaaaccaagccctactatgaacaagtatttcctatctgaaatggcaaagcaatgtcctccaagaacgaggaaaggccagaccgatccgctcgtgtacctaaacccggactcaggctcaaaccacagcttcacaagctcattttactcaagaattctatcaaacaaatctgtacttgaagtagatcaacaactgctttacaatgatgacaccaagcaaatatctaaggaattctcagagggtttcgaggattttcggaaatcatttgctctttcgatgagcaagatgggagcgataaatgtgttaactaaaacggaaggtgagatacgaaaagattgcaggcatataaactaa

SEQ ID NO: 72266 - protein, 325 aa, Arabidopsis thaliana
  peptide (1)..(325): Ceres Seq. ID no. 4927537
  misc_feature (1)..(325): Homolog of NCBI NO: 25285613 NR Description: probable peroxidase [imported] - Arabidopsis >gi|2288998|gb|AAB64327.1| putative peroxidase [Arabidopsis
  misc_feature (1)..(325): Homolog of NCBI NO: 30689391 NR Description: peroxidase, putative [Arabidopsis thaliana]
  misc_feature (1)..(325): Homolog of NCBI NO: 19310389 NR Description: At2g43480/T1O24.22 [Arabidopsis thaliana]
  misc_feature (12)..(325): Homolog of NCBI NO: 15237884 NR Description: cationic peroxidase family; protein id: [Arabidopsis thaliana] >gi|26397805|sp|Q9FLV5|PE61_ARATH Probable
  misc_feature (36)..(322): Homolog of NCBI NO: 1546690 NR Description: peroxidase; peroxidase ATP14a [Arabidopsis
  misc_feature (36)..(322): Homolog of NCBI NO: 15242232 NR Description: peroxidase, putative; protein id: At5g22410.1 thaliana] >gi|26397811|sp|Q9FMR0|PE60_ARATH Peroxidase 60 (Atperox P60) (ATP14a) >gi|9757822|dbj|BAB08340.1| peroxidase
  misc_feature (38)..(325): Homolog of NCBI NO: 37536958 NR Description: putative peroxidase [Oryza sativa (japonica >gi|18855005|gb|AAL79697.1| putative peroxidase [Oryza sativa]
  misc_feature (34)..(325): Homolog of NCBI NO: 1232069 NR Description: cationic peroxidase [Stylosanthes humilis]
  misc_feature (25)..(321): Homolog of NCBI NO: 26397587 NR Description: Putative Peroxidase 48 (Atperox P48)
  misc_feature (35)..(325): Homolog of NCBI NO: 15238030 NR Description: peroxidase, putative; protein id: At5g17820.1, by cDNA: 39195. [Arabidopsis thaliana] Peroxidase 57 precursor (Atperox P57) (PRXR10) (ATP13a)
MVVGGVSLFPETAEAIVMGPSMQKLTWHYYKVYNTCENAENFVRHQVEIFYKNDKSIAPKLLRLLYSDCFVSGCDASVLLEGPNSEKMAPQNRGLGGFVLIDKIKIVLEQRCPGVVSCADILNLATRDAVHLAGAPSYPVFTGRRDGLTSDKQTVDLPSPSISWDQAMSYFKSRGLNVLDMATLLGSHSMGRTHCSYVVDRLYNYNKTGKPSPTMNKYFLSEMAKQCPPRTRKGQTDPLVYLNPDSGSNHSFTSSFYSRILSNKSVLEVDQQLLYNDDTKQISKEFSEGFEDFRKSFALSMSKMGAINVLTKTEGEIRKDCRHIN

SEQ ID NO: 72267 - protein, 308 aa, Arabidopsis thaliana
  peptide (1)..(308): Ceres Seq. ID no. 4927538
  misc_feature (1)..(308): Homolog of NCBI NO: 25285613 NR Description: probable peroxidase [imported] - Arabidopsis >gi|2288998|gb|AAB64327.1| putative peroxidase [Arabidopsis
  misc_feature (1)..(308): Homolog of NCBI NO: 30689391 NR Description: peroxidase, putative [Arabidopsis thaliana]
  misc_feature (1)..(308): Homolog of NCBI NO: 19310389 NR Description: At2g43480/T1O24.22 [Arabidopsis thaliana]
  misc_feature (1)..(308): Homolog of NCBI NO: 15237884 NR Description: cationic peroxidase family; protein id: [Arabidopsis thaliana] >gi|26397805|sp|Q9FLV5|PE61_ARATH Probable
  misc_feature (19)..(305): Homolog of NCBI NO: 1546690 NR Description: peroxidase; peroxidase ATP14a [Arabidopsis
  misc_feature (19)..(305): Homolog of NCBI NO: 15242232 NR Description: peroxidase, putative; protein id: At5g22410.1 thaliana] >gi|26397811|sp|Q9FMR0|PE60_ARATH Peroxidase 60 (Atperox P60) (ATP14a) >gi|9757822|dbj|BAB08340.1| peroxidase
  misc_feature (21)..(308): Homolog of NCBI NO: 37536958 NR Description: putative peroxidase [Oryza sativa (japonica >gi|18855005|gb|AAL79697.1| putative peroxidase [Oryza sativa]
  misc_feature (17)..(308): Homolog of NCBI NO: 1232069 NR Description: cationic peroxidase [Stylosanthes humilis]
  misc_feature (8)..(304): Homolog of NCBI NO: 26397587 NR Description: Putative Peroxidase 48 (Atperox P48)
  misc_feature (18)..(308): Homolog of NCBI NO: 15238030 NR Description: peroxidase, putative; protein id: At5g17820.1, by cDNA: 39195. [Arabidopsis thaliana] Peroxidase 57 precursor (Atperox P57) (PRXR10) (ATP13a)
MGPSMQKLTWHYYKVYNTCENAENFVRHQVEIFYKNDKSIAPKLLRLLYSDCFVSGCDASVLLEGPNSEKMAPQNRGLGGFVLIDKIKIVLEQRCPGVVSCADILNLATRDAVHLAGAPSYPVFTGRRDGLTSDKQTVDLPSPSISWDQAMSYFKSRGLNVLDMATLLGSHSMGRTHCSYVVDRLYNYNKTGKPSPTMNKYFLSEMAKQCPPRTRKGQTDPLVYLNPDSGSNHSFTSSFYSRILSNKSVLEVDQQLLYNDDTKQISKEFSEGFEDFRKSFALSMSKMGAINVLTKTEGEIRKDCRHIN

SEQ ID NO: 72268 - protein, 304 aa, Arabidopsis thaliana
  peptide (1)..(304): Ceres Seq. ID no. 4927539
  misc_feature (1)..(304): Homolog of NCBI NO: 25285613 NR Description: probable peroxidase [imported] - Arabidopsis >gi|2288998|gb|AAB64327.1| putative peroxidase [Arabidopsis
  misc_feature (1)..(304): Homolog of NCBI NO: 30689391 NR Description: peroxidase, putative [Arabidopsis thaliana]
  misc_feature (1)..(304): Homolog of NCBI NO: 19310389 NR Description: At2g43480/T1O24.22 [Arabidopsis thaliana]
  misc_feature (1)..(304): Homolog of NCBI NO: 15237884 NR Description: cationic peroxidase family; protein id: [Arabidopsis thaliana] >gi|26397805|sp|Q9FLV5|PE61_ARATH Probable
  misc_feature (15)..(301): Homolog of NCBI NO: 1546690 NR Description: peroxidase; peroxidase ATP14a [Arabidopsis
  misc_feature (15)..(301): Homolog of NCBI NO: 15242232 NR Description: peroxidase, putative; protein id: At5g22410.1 thaliana] >gi|26397811|sp|Q9FMR0|PE60_ARATH Peroxidase 60 (Atperox P60) (ATP14a) >gi|9757822|dbj|BAB08340.1| peroxidase
  misc_feature (17)..(304): Homolog of NCBI NO: 37536958 NR Description: putative peroxidase [Oryza sativa (japonica >gi|18855005|gb|AAL79697.1| putative peroxidase [Oryza sativa]
  misc_feature (13)..(304): Homolog of NCBI NO: 1232069 NR Description: cationic peroxidase [Stylosanthes humilis]
  misc_feature (4)..(300): Homolog of NCBI NO: 26397587 NR Description: Putative Peroxidase 48 (Atperox P48)
  misc_feature (14)..(304): Homolog of NCBI NO: 15238030 NR Description: peroxidase, putative; protein id: At5g17820.1, by cDNA: 39195. [Arabidopsis thaliana] Peroxidase 57 precursor (Atperox P57) (PRXR10) (ATP13a)
MQKLTWHYYKVYNTCENAENFVRHQVEIFYKNDKSIAPKLLRLLYSDCFVSGCDASVLLEGPNSEKMAPQNRGLGGFVLIDKIKIVLEQRCPGVVSCADILNLATRDAVHLAGAPSYPVFTGRRDGLTSDKQTVDLPSPSISWDQAMSYFKSRGLNVLDMATLLGSHSMGRTHCSYVVDRLYNYNKTGKPSPTMNKYFLSEMAKQCPPRTRKGQTDPLVYLNPDSGSNHSFTSSFYSRILSNKSVLEVDQQLLYNDDTKQISKEFSEGFEDFRKSFALSMSKMGAINVLTKTEGEIRKDCRHIN

SEQ ID NO: 72269 - DNA, 1689 bp, Arabidopsis thaliana
  misc_feature (1)..(1689): Ceres Seq. ID no. 4927632
  misc_feature: MA Experiment ID: 108434 Result: Up-regulated in Transcription
  misc_feature: MA Experiment 108434 PARAMETER Experiment Name: At_Root_Tips_cDNA_P Parameter: Tissue Value: Root Tips
  misc_feature: MA Experiment ID: 108473 Result: Down-regulated in Transcription
  misc_feature: MA Experiment 108473 PARAMETER Experiment Name: At_Drought_Flowers_cDNA_P Parameter: Timepoint (hr) Value: 7 d
  misc_feature: MA Experiment 108473 PARAMETER Experiment Name: At_Drought_Flowers_cDNA_P Parameter: Tissue Value: Flower
  misc_feature: MA Experiment 108473 PARAMETER Experiment Name: At_Drought_Flowers_cDNA_P Parameter: Treatment Value: Drought vs. No Drought
  misc_feature: MA Experiment ID: 108569 Result: Up-regulated in Transcription
  misc_feature: MA Experiment 108569 PARAMETER Experiment Name: At_0.001%_MeJA__cDNA_P Parameter: Timepoint (hr) Value: 6
  misc_feature: MA Experiment 108569 PARAMETER Experiment Name: At_0.001%_MeJA__cDNA_P Parameter: Tissue Value: Aerial
  misc_feature: MA Experiment 108569 PARAMETER Experiment Name: At_0.001%_MeJA__cDNA_P Parameter: Treatment Value: 0.001% MeJA vs. No Treatment
  misc_feature: MA Experiment ID: 108577 Result: Up-regulated in Transcription
  misc_feature: MA Experiment 108577 PARAMETER Experiment Name: At_42deg_Heat_cDNA_P Parameter: Temperature (deg C) Value: 42 vs. 22
  misc_feature: MA Experiment 108577 PARAMETER Experiment Name: At_42deg_Heat_cDNA_P Parameter: Timepoint (hr) Value: 6
  misc_feature: MA Experiment 108577 PARAMETER Experiment Name: At_42deg_Heat_cDNA_P Parameter: Tissue Value: Aerial
  misc_feature: MA Experiment ID: 108579 Result: Up-regulated in Transcription
  misc_feature: MA Experiment 108579 PARAMETER Experiment Name: At_4deg_Cold_cDNA_P Parameter: Temperature (deg C) Value: 4 vs. 22
  misc_feature: MA Experiment 108579 PARAMETER Experiment Name: At_4deg_Cold_cDNA_P Parameter: Timepoint (hr) Value: 6
  misc_feature: MA Experiment 108579 PARAMETER Experiment Name: At_4deg_Cold_cDNA_P Parameter: Tissue Value: Aerial
  misc_feature: MA Experiment ID: 108595 Result: Down-regulated in Transcription
  misc_feature: MA Experiment 108595 PARAMETER Experiment Name: At_Ler-pi_Ovule_cDNA_P Parameter: Plant Line Value: null
  misc_feature: MA Experiment ID: 20000069 Result: Down-regulated in Transcription
  misc_feature: MA Experiment 20000069 PARAMETER Experiment Name: At_100uM_ABA_Mutants_cDNA_P Parameter: Plant Line Value: CS23
  misc_feature: MA Experiment 20000069 PARAMETER Experiment Name: At_100uM_ABA_Mutants_cDNA_P Parameter: Timepoint (hr) Value: 6
  misc_feature: MA Experiment 20000069 PARAMETER Experiment Name: At_100uM_ABA_Mutants_cDNA_P Parameter: Tissue Value: Aerial
  misc_feature: MA Experiment 20000069 PARAMETER Experiment Name: At_100uM_ABA_Mutants_cDNA_P Parameter: Treatment Value: 100uM ABA vs. No Treatment
  misc_feature: MA Experiment ID: 20000072 Result: Down-regulated in Transcription
  misc_feature: MA Experiment 20000072 PARAMETER Experiment Name: At_100uM_ABA_Mutants_cDNA_P Parameter: Plant Line Value: CS8105
  misc_feature: MA Experiment 20000072 PARAMETER Experiment Name: At_100uM_ABA_Mutants_cDNA_P Parameter: Timepoint (hr) Value: 6
  misc_feature: MA Experiment 20000072 PARAMETER Experiment Name: At_100uM_ABA_Mutants_cDNA_P Parameter: Tissue Value: Aerial
  misc_feature: MA Experiment 20000072 PARAMETER Experiment Name: At_100uM_ABA_Mutants_cDNA_P Parameter: Treatment Value: 100uM ABA vs. No Treatment
  misc_feature: MA Experiment ID: 20000086 Result: Down-regulated in Transcription
  misc_feature: MA Experiment 20000086 PARAMETER Experiment Name: At_100uM_ABA_Mutants_cDNA_P Parameter: Plant Line Value: CS22
  misc_feature: MA Experiment 20000086 PARAMETER Experiment Name: At_100uM_ABA_Mutants_cDNA_P Parameter: Timepoint (hr) Value: 6
  misc_feature: MA Experiment 20000086 PARAMETER Experiment Name: At_100uM_ABA_Mutants_cDNA_P Parameter: Tissue Value: Aerial
  misc_feature: MA Experiment 20000086 PARAMETER Experiment Name: At_100uM_ABA_Mutants_cDNA_P Parameter: Treatment Value: 100uM ABA vs. No Treatment
  misc_feature: MA Experiment ID: 20000087 Result: Down-regulated in Transcription
  misc_feature: MA Experiment 20000087 PARAMETER Experiment Name: At_100uM_ABA_Mutants_cDNA_P Parameter: Plant Line Value: WS
  misc_feature: MA Experiment 20000087 PARAMETER Experiment Name: At_100uM_ABA_Mutants_cDNA_P Parameter: Timepoint (hr) Value: 6
  misc_feature: MA Experiment 20000087 PARAMETER Experiment Name: At_100uM_ABA_Mutants_cDNA_P Parameter: Tissue Value: Aerial
  misc_feature: MA Experiment 20000087 PARAMETER Experiment Name: At_100uM_ABA_Mutants_cDNA_P Parameter: Treatment Value: 100uM ABA vs. No Treatment
  misc_feature: MA Experiment ID: 20000089 Result: Down-regulated in Transcription
  misc_feature: MA Experiment ID: 20000090 Result: Down-regulated in Transcription
  misc_feature: MA Experiment ID: 20000117 Result: Down-regulated in Transcription
  misc_feature: MA Experiment 20000117 PARAMETER Experiment Name: At_100uM_ABA_Mutants_cDNA_P Parameter: Plant Line Value: Columbia
  misc_feature: MA Experiment 20000117 PARAMETER Experiment Name: At_100uM_ABA_Mutants_cDNA_P Parameter: Timepoint (hr) Value: 6
  misc_feature: MA Experiment 20000117 PARAMETER Experiment Name: At_100uM_ABA_Mutants_cDNA_P Parameter: Tissue Value: Aerial
  misc_feature: MA Experiment 20000117 PARAMETER Experiment Name: At_100uM_ABA_Mutants_cDNA_P Parameter: Treatment Value: 100uM ABA vs. No Treatment
  misc_feature: MA Experiment ID: 20000180 Result: Up-regulated in Transcription
  misc_feature: MA Experiment 20000180 PARAMETER Experiment Name: At_Germinating_Seeds_P Parameter: Age (hr) Value: 24 vs. 0
  misc_feature: MA Experiment 20000180 PARAMETER Experiment Name: At_Germinating_Seeds_P Parameter: Tissue Value: Germinating Seeds
  misc_feature: MA Experiment ID: 20000184 Result: Up-regulated in Transcription
  misc_feature: MA Experiment 20000184 PARAMETER Experiment Name: At_Shoots__P Parameter: Age (day) Value: 7
  misc_feature: MA Experiment 20000184 PARAMETER Experiment Name: At_Shoots__P Parameter: Tissue Value: Shoots vs. Whole Plant
  misc_feature: Pfam Name: FA_desaturase_2 Pfam Description: Fatty acid desaturase
atttggctctttatcttgtctttgtctgatcagtagtcactacatttgtttctttcacaatctttcttttttgcttcatattgaactgcaagaccaatccatgaatgcaaatataaaatattgtcttacggttaaccatctctaagtgtttgctagtcatgaattgtgaaattgtttcgcttcaaacatagaattagttgatttggaaatgtagacatgaatgcttatctaaatacaataaactgtgttcttgtttcagttgtgtatcagagatgagaccttgactggtaatttcaatggagcataattaaatgctaatgatacttattttctggttaatgcagggaggttgagagtttgaagaaaccatttacgccacccagggaagtgcatgttcaagtcttgcactccatgccacctcaaaagatcgagatcttcaaatctatggaaaactgggccgaggagaaccttctgattcacctcaaggatgtggagaagtcttggcaaccccaggatttcttgcctgaccctgcatcagatgggtttgaagatcaggtaagagagttaagagagagggctagagagctccctgatgattactttgttgttttggtgggggacatgatcacagaagaagcacttccgacctatcaaactatgttgaacactttggatggagttagggatgaaacaggtgctagtcctacttcatgggctatttggaccagagcttggactgcagaagaaaaccgacatggcgatcttctgaataaatacctttacttgtctggtcgtgttgacatgaggcagatcgaaaagaccattcagtacttgattggatctggaatggatccgcggacagagaataacccctaccttggcttcatctatacgtcattccaagaaagagcgacattcatctctcacggaaacacagcccgccaagccaaagagcacggggacatcaaactagcccaaatatgtggcacaatagctgcagacgagaagcgtcatgaaacagcatacaccaagatagttgaaaagctctttgagattgatcctgatggtactgtcatggcttttgcagacatgatgagaaagaaaatctcaatgcctgctcacttgatgtatgatgggcgcaacgacaacctctttgacaacttctcttccgtggctcagaggctcggtgtttacaccgccaaagactatgcagacattcttgagtttctggttggtaggtggaaaatccaggacttaaccgggctttcaggtgaaggaaacaaagcacaagactatttatgcgggttggctccaaggatcaagagattggatgagagagctcaagcaagagccaagaaaggacccaagattcctttcagttggatacacgacagagaagtgcagctctaaaaggacaaagacaaaaacaaaaacctatcctcccggttcctcatttcatctgtctgctcttaaaattggtgtagattactatggttttctgataatgttggtgggtctagttacaaagttgagatgcagtgatttagtagctttgtttttcccagtcactatatgtttggtctttggtccgttagcacacttgtagtagttaaaacagtttaagtatggtctgtactcagtcttcctcttctctgtggagttttgtttaagttcaggttagttttgttt

SEQ ID NO: 72270 - protein, 332 aa, Arabidopsis thaliana; identical to SEQ ID NO: 43128
  peptide (1)..(332): Ceres Seq. ID no. 4927633
  misc_feature: Pfam Name: FA_desaturase_2 Pfam Description: Fatty acid desaturase
  misc_feature (1)..(332): Homolog of NCBI NO: 15224342 NR Description: stearoyl-ACP desaturase; protein id: At2g43710.1, by cDNA: gi_15081681, supported by cDNA: gi_15149309, supported cDNA: gi_20334827 [Arabidopsis thaliana] >gi|25285784|pir||E84869
  misc_feature (1)..(332): Homolog of NCBI NO: 15081682 NR Description: At2g43710/F18O19.18 [Arabidopsis thaliana]
  misc_feature (1)..(332): Homolog of NCBI NO: 30689469 NR Description: acyl-[acyl-carrier-protein] desaturase
  misc_feature (1)..(319): Homolog of NCBI NO: 2129532 NR Description: acyl-[acyl-carrier-protein] desaturase (EC
  misc_feature (1)..(332): Homolog of NCBI NO: 134943 NR Description: Acyl-[acyl-carrier protein] desaturase,
  misc_feature (1)..(332): Homolog of NCBI NO: 512398 NR Description: Stearoyl-acyl carrier protein desaturase
  misc_feature (1)..(332): Homolog of NCBI NO: 5114269 NR Description: delta-9-stearoyl-acyl-acyl carrier protein
  misc_feature (1)..(332): Homolog of NCBI NO: 267037 NR Description: Acyl-[acyl-carrier protein] desaturase, seed
  misc_feature (1)..(332): Homolog of NCBI NO: 134945 NR Description: Acyl-[acyl-carrier protein] desaturase,
  misc_feature (1)..(332): Homolog of NCBI NO: 951427 NR Description: stearoyl-acyl-carrier protein desaturase

SEQ ID NO: 72271 - protein, 321 aa, Arabidopsis thaliana; identical to SEQ ID NO: 43129
  peptide (1)..(321): Ceres Seq. ID no. 4927634
  misc_feature: Pfam Name: FA_desaturase_2 Pfam Description: Fatty acid desaturase
  misc_feature (1)..(321): Homolog of NCBI NO: 15224342 NR Description: stearoyl-ACP desaturase; protein id: At2g43710.1, by cDNA: gi_15081681, supported by cDNA: gi_15149309, supported cDNA: gi_20334827 [Arabidopsis thaliana] >gi|25285784|pir||E84869
  misc_feature (1)..(321): Homolog of NCBI NO: 15081682 NR Description: At2g43710/F18O19.18 [Arabidopsis thaliana]
  misc_feature (1)..(321): Homolog of NCBI NO: 30689469 NR Description: acyl-[acyl-carrier-protein] desaturase
  misc_feature (1)..(308): Homolog of NCBI NO: 2129532 NR Description: acyl-[acyl-carrier-protein] desaturase (EC
  misc_feature (1)..(321): Homolog of NCBI NO: 134943 NR Description: Acyl-[acyl-carrier protein] desaturase,
  misc_feature (1)..(321): Homolog of NCBI NO: 512398 NR Description: Stearoyl-acyl carrier protein desaturase
  misc_feature (1)..(321): Homolog of NCBI NO: 5114269 NR Description: delta-9-stearoyl-acyl-acyl carrier protein
  misc_feature (1)..(321): Homolog of NCBI NO: 267037 NR Description: Acyl-[acyl-carrier protein] desaturase, seed
  misc_feature (1)..(321): Homolog of NCBI NO: 134945 NR Description: Acyl-[acyl-carrier protein] desaturase,
  misc_feature (1)..(321): Homolog of NCBI NO: 951427 NR Description: stearoyl-acyl-carrier protein desaturase

SEQ ID NO: 72272 - protein, 262 aa, Arabidopsis thaliana
  peptide (1)..(262): Ceres Seq. ID no. 4927635
  misc_feature: Pfam Name: FA_desaturase_2 Pfam Description: Fatty acid desaturase
  misc_feature (1)..(262): Homolog of NCBI NO: 15224342 NR Description: stearoyl-ACP desaturase; protein id: At2g43710.1, by cDNA: gi_15081681, supported by cDNA: gi_15149309, supported cDNA: gi_20334827 [Arabidopsis thaliana] >gi|25285784|pir||E84869
  misc_feature (1)..(262): Homolog of NCBI NO: 15081682 NR Description: At2g43710/F18O19.18 [Arabidopsis thaliana]
  misc_feature (1)..(262): Homolog of NCBI NO: 30689469 NR Description: acyl-[acyl-carrier-protein] desaturase
  misc_feature (1)..(249): Homolog of NCBI NO: 2129532 NR Description: acyl-[acyl-carrier-protein] desaturase (EC
  misc_feature (1)..(262): Homolog of NCBI NO: 134943 NR Description: Acyl-[acyl-carrier protein] desaturase,
  misc_feature (1)..(262): Homolog of NCBI NO: 512398 NR Description: Stearoyl-acyl carrier protein desaturase
  misc_feature (1)..(262): Homolog of NCBI NO: 5114269 NR Description: delta-9-stearoyl-acyl-acyl carrier protein
  misc_feature (1)..(262): Homolog of NCBI NO: 267037 NR Description: Acyl-[acyl-carrier protein] desaturase, seed
  misc_feature (1)..(262): Homolog of NCBI NO: 134945 NR Description: Acyl-[acyl-carrier protein] desaturase,
  misc_feature (1)..(262): Homolog of NCBI NO: 951427 NR Description: stearoyl-acyl-carrier protein desaturase
MITEEALPTYQTMLNTLDGVRDETGASPTSWAIWTRAWTAEENRHGDLLNKYLYLSGRVDMRQIEKTIQYLIGSGMDPRTENNPYLGFIYTSFQERATFISHGNTARQAKEHGDIKLAQICGTIAADEKRHETAYTKIVEKLFEIDPDGTVMAFADMMRKKISMPAHLMYDGRNDNLFDNFSSVAQRLGVYTAKDYADILEFLVGRWKIQDLTGLSGEGNKAQDYLCGLAPRIKRLDERAQARAKKGPKIPFSWIHDREVQL

SEQ ID NO: 72273 - DNA, 921 bp, Arabidopsis thaliana
  misc_feature (1)..(921): Ceres Seq. ID no. 4927666
  misc_feature: MA Experiment ID: 20000180 Result: Up-regulated in Transcription
  misc_feature: MA Experiment 20000180 PARAMETER Experiment Name: At_Germinating_Seeds_P Parameter: Age (hr) Value: 24 vs. 0
  misc_feature: MA Experiment 20000180 PARAMETER Experiment Name: At_Germinating_Seeds_P Parameter: Tissue Value: Germinating Seeds
  misc_feature: MA Experiment ID: 20000184 Result: Up-regulated in Transcription
  misc_feature: MA Experiment 20000184 PARAMETER Experiment Name: At_Shoots__P Parameter: Age (day) Value: 7
  misc_feature: MA Experiment 20000184 PARAMETER Experiment Name: At_Shoots__P Parameter: Tissue Value: Shoots vs. Whole Plant
  misc_feature: MA Experiment ID: 20000495 Result: Down-regulated in Transcription
  misc_feature: MA Experiment 20000495 PARAMETER Experiment Name: At_Guard_Cells_P Parameter: Harvest Date Value: 8/2/2002
  misc_feature: MA Experiment 20000495 PARAMETER Experiment Name: At_Guard_Cells_P Parameter: Organism Value: A. thaliana
  misc_feature: MA Experiment 20000495 PARAMETER Experiment Name: At_Guard_Cells_P Parameter: Tissue Value: Guard Cells vs. Leaves
atggctgtgttaggcgacggattcgtcgcctccaccaagttcgagatcctcaaagccttcgagtctccgcttcctcttcctgaattcttggcctatcactctgactccatctccgccattatagcccctgtagctgctccggtcacagccgatctgattcgcatcctccctaatcttcgcttggttgttactaccagcgccggcgttgaccatgttgacttagttgagtgtcgtcgtcgaggcatctccgtcgccaacgctggctcaagcttctcggaagatgtcgcagatactgccgtcggtttactcatcgacgtcttccgccgcatctccgccgccaatcggttcgttaagcaacggttttggccactcaaaggcgattatcctctcggttccaagttggggagaaagcgaatcggaatcgtgggactaggaagcattggctcgaaagtagcgacaaggctcgacgcctttggttgccaaatttcatatagctcaagaaacagaaaaccatatgatgttccatatcactattacatggatatagaggagatggcagctaatagtgatgcactcataatctgttgtgaattgaatgagaagacattgcgtttgattaataaagatgttctttctgctctgggaaagcgaggagtgatcgttaacgtggctcgtggggctataatcgatgaggaagaaatggtgagatgtttgagagaaggtgagattggtggtgctggtttggatgtttttgaagatgagcctaatgttccgaaggagctttttgaattggataatgttgttttctctccacatagtgcttttatgacattggaaggtcttgaagaacttgggaaagttgtagtagggaatattgaagctttcttctccaataaacctcttttaactcctgttctttga

SEQ ID NO: 72274 - protein, 306 aa, Arabidopsis thaliana
  peptide (1)..(306): Ceres Seq. ID no. 4927667
  misc_feature (1)..(89): Pfam Name: D-isomer specific 2-hydroxyacid dehydrogenase, Pfam Description: D-isomer specific 2-hydroxyacid dehydrogenase,
  misc_feature (1)..(306): Homolog of NCBI NO: 7485630 NR Description: probable glycerate dehydrogenase [imported] -
  misc_feature (26)..(305): Homolog of NCBI NO: 15222015 NR Description: hypothetical protein; protein id: At1g12550.1 thaliana] >gi|8778636|gb|AAF79644.1|AC025416_18 F5O11.29 thaliana] >gi|9502370|gb|AAF88077.1|AC025417_5 T12C24.9
  misc_feature (12)..(306): Homolog of NCBI NO: 32488421 NR Description: OSJNBb0085F13.11 [Oryza sativa (japonica
  misc_feature (13)..(306): Homolog of NCBI NO: 38345306 NR Description: OSJNBb0085F13.6 [Oryza sativa (japonica
  misc_feature (13)..(305): Homolog of NCBI NO: 32488422 NR Description: OSJNBb0085F13.12 [Oryza sativa (japonica
  misc_feature (39)..(305): Homolog of NCBI NO: 38345308 NR Description: OSJNBb0085F13.13 [Oryza sativa (japonica
  misc_feature (9)..(306): Homolog of NCBI NO: 21636166 NR Description: unknown [Aegilops tauschii]
  misc_feature (13)..(306): Homolog of NCBI NO: 15220005 NR Description: putative D-isomer specific 2-hydroxyacid protein id: At1g79870.1, supported by cDNA: 42333., supported by gi_17978982 [Arabidopsis thaliana] >gi|25283867|pir||G96829
  misc_feature (1)..(134): Homolog of NCBI NO: 18406843 NR Description: putative glycerate dehydrogenase; protein id: supported by cDNA: gi_15724345, supported by cDNA: gi_18700247 thaliana] >gi|15724346|gb|AAL06566.1|AF412113_1
  misc_feature (16)..(306): Homolog of NCBI NO: 34904262 NR Description: putative Caulobacter crescentus D-isomer specific
MAVLGDGFVASTKFEILKAFESPLPLPEFLAYHSDSISAIIAPVAAPVTADLIRILPNLRLVVTTSAGVDHVDLVECRRRGISVANAGSSFSEDVADTAVGLLIDVFRRISAANRFVKQRFWPLKGDYPLGSKLGRKRIGIVGLGSIGSKVATRLDAFGCQISYSSRNRKPYDVPYHYYMDIEEMAANSDALIICCELNEKTLRLINKDVLSALGKRGVIVNVARGAIIDEEEMVRCLREGEIGGAGLDVFEDEPNVPKELFELDNVVFSPHSAFMTLEGLEELGKVVVGNIEAFFSNKPLLTPVL

SEQ ID NO: 72275 - DNA, 942 bp, Arabidopsis thaliana
  misc_feature (1)..(942): Ceres Seq. ID no. 4927736
  misc_feature: MA Experiment ID: 108434 Result: Down-regulated in Transcription
  misc_feature: MA Experiment 108434 PARAMETER Experiment Name: At_Root_Tips_cDNA_P Parameter: Tissue Value: Root Tips
  misc_feature: MA Experiment ID: 108435 Result: Down-regulated in Transcription
  misc_feature: MA Experiment 108435 PARAMETER Experiment Name: At_stm_Mutants_cDNA_P Parameter: Plant Line Value: wt Landsburg vs stm
  misc_feature: MA Experiment 108435 PARAMETER Experiment Name: At_stm_Mutants_cDNA_P Parameter: Tissue Value: Shoot Apical Meristem Region
  misc_feature: MA Experiment ID: 108579 Result: Down-regulated in Transcription
  misc_feature: MA Experiment 108579 PARAMETER Experiment Name: At_4deg_Cold_cDNA_P Parameter: Temperature (deg C) Value: 4 vs. 22
  misc_feature: MA Experiment 108579 PARAMETER Experiment Name: At_4deg_Cold_cDNA_P Parameter: Timepoint (hr) Value: 6
  misc_feature: MA Experiment 108579 PARAMETER Experiment Name: At_4deg_Cold_cDNA_P Parameter: Tissue Value: Aerial
  misc_feature: MA Experiment ID: 108585 Result: Down-regulated in Transcription
  misc_feature: MA Experiment 108585 PARAMETER Experiment Name: At_5mM_NaNP_cDNA_P Parameter: Timepoint (hr) Value: 6
  misc_feature: MA Experiment 108585 PARAMETER Experiment Name: At_5mM_NaNP_cDNA_P Parameter: Tissue Value: Aerial
  misc_feature: MA Experiment 108585 PARAMETER Experiment Name: At_5mM_NaNP_cDNA_P Parameter: Treatment Value: null
  misc_feature: MA Experiment ID: 108595 Result: Down-regulated in Transcription
  misc_feature: MA Experiment 108595 PARAMETER Experiment Name: At_Ler-pi_Ovule_cDNA_P Parameter: Plant Line Value: null
  misc_feature: MA Experiment ID: 20000030 Result: Up-regulated in Transcription
  misc_feature: MA Experiment 20000030 PARAMETER Experiment Name: At_CS6630_Roots_cDNA_P Parameter: Plant Line Value: CS6630 vs. WS
  misc_feature: MA Experiment 20000030 PARAMETER Experiment Name: At_CS6630_Roots_cDNA_P Parameter: Tissue Value: Roots
  misc_feature: MA Experiment ID: 20000111 Result: Down-regulated in Transcription
  misc_feature: MA Experiment 20000111 PARAMETER Experiment Name: At_42deg_Heat_cDNA_P Parameter: Temperature (deg C) Value: 42 vs. 22
  misc_feature: MA Experiment 20000111 PARAMETER Experiment Name: At_42deg_Heat_cDNA_P Parameter: Timepoint (hr) Value: 6
  misc_feature: MA Experiment 20000111 PARAMETER Experiment Name: At_42deg_Heat_cDNA_P Parameter: Tissue Value: Aerial
  misc_feature: MA Experiment ID: 20000113 Result: Down-regulated in Transcription
  misc_feature: MA Experiment 20000113 PARAMETER Experiment Name: At_42deg_Heat_cDNA_P Parameter: Temperature (deg C) Value: 42 vs. 22
  misc_feature: MA Experiment 20000113 PARAMETER Experiment Name: At_42deg_Heat_cDNA_P Parameter: Timepoint (hr) Value: 8
  misc_feature: MA Experiment 20000113 PARAMETER Experiment Name: At_42deg_Heat_cDNA_P Parameter: Tissue Value: Aerial
  misc_feature: MA Experiment ID: 20000173 Result: Down-regulated in Transcription
  misc_feature: MA Experiment 20000173 PARAMETER Experiment Name: At_42deg_Heat_P Parameter: Age (day) Value: 14
  misc_feature: MA Experiment 20000173 PARAMETER Experiment Name: At_42deg_Heat_P Parameter: Organism Value: A. thaliana
  misc_feature: MA Experiment 20000173 PARAMETER Experiment Name: At_42deg_Heat_P Parameter: Plant Line Value: WS
  misc_feature: MA Experiment 20000173 PARAMETER Experiment Name: At_42deg_Heat_P Parameter: Temperature (deg C) Value: 42 vs. 22
  misc_feature: MA Experiment 20000173 PARAMETER Experiment Name: At_42deg_Heat_P Parameter: Timepoint (hr) Value: 6
  misc_feature: MA Experiment 20000173 PARAMETER Experiment Name: At_42deg_Heat_P Parameter: Tissue Value: Aerial
  misc_feature: MA Experiment ID: 20000179 Result: Up-regulated in Transcription
  misc_feature: MA Experiment 20000179 PARAMETER Experiment Name: At_Germinating_Seeds_P Parameter: Age (hr) Value: 6 vs. 0
  misc_feature: MA Experiment 20000179 PARAMETER Experiment Name: At_Germinating_Seeds_P Parameter: Tissue Value: Germinating Seeds
  misc_feature: MA Experiment ID: 20000184 Result: Down-regulated in Transcription
  misc_feature: MA Experiment 20000184 PARAMETER Experiment Name: At_Shoots__P Parameter: Age (day) Value: 7
  misc_feature: MA Experiment 20000184 PARAMETER Experiment Name: At_Shoots__P Parameter: Tissue Value: Shoots vs. Whole Plant
  misc_feature: MA Experiment ID: 20000185 Result: Down-regulated in Transcription
  misc_feature: MA Experiment 20000185 PARAMETER Experiment Name: At_Roots__P Parameter: Age (day) Value: 7 vs. 21
  misc_feature: MA Experiment 20000185 PARAMETER Experiment Name: At_Roots__P Parameter: Organism Value: A. thaliana
  misc_feature: MA Experiment 20000185 PARAMETER Experiment Name: At_Roots__P Parameter: Tissue Value: Roots vs. Whole Plant
  misc_feature: MA Experiment ID: 20000227 Result: Down-regulated in Transcription
  misc_feature: MA Experiment 20000227 PARAMETER Experiment Name: At_Root-Tips-vs-Tops_P Parameter: Tissue Value: Root Tips vs. Root Tops
  misc_feature: MA Experiment ID: 20000234 Result: Down-regulated in Transcription
  misc_feature: MA Experiment 20000234 PARAMETER Experiment Name: At_Siliques_P Parameter: Age (day) Value: 21
  misc_feature: MA Experiment 20000234 PARAMETER Experiment Name: At_Siliques_P Parameter: Organism Value: A. thaliana
  misc_feature: MA Experiment 20000234 PARAMETER Experiment Name: At_Siliques_P Parameter: Plant Line Value: WS
  misc_feature: MA Experiment 20000234 PARAMETER Experiment Name: At_Siliques_P Parameter: Tissue Value: Less Than 5mm Siliques vs. Whole Plant
  misc_feature: MA Experiment ID: 20000264 Result: Down-regulated in Transcription
  misc_feature: MA Experiment 20000264 PARAMETER Experiment Name: At_Open_Flower_P Parameter: Age (day) Value: 21
  misc_feature: MA Experiment 20000264 PARAMETER Experiment Name: At_Open_Flower_P Parameter: Plant Line Value: WS
  misc_feature: MA Experiment 20000264 PARAMETER Experiment Name: At_Open_Flower_P Parameter: Tissue Value: Open Flower vs. Whole Plant
  misc_feature: MA Experiment ID: 20000439 Result: Down-regulated in Transcription
  misc_feature: MA Experiment 20000439 PARAMETER Experiment Name: At_Roots__P Parameter: Age (day) Value: 14 vs. 21
  misc_feature: MA Experiment 20000439 PARAMETER Experiment Name: At_Roots__P Parameter: Organism Value: A. thaliana
  misc_feature: MA Experiment 20000439 PARAMETER Experiment Name: At_Roots__P Parameter: Tissue Value: Roots vs. Whole Plant
  misc_feature: MA Experiment ID: 20000495 Result: Down-regulated in Transcription
  misc_feature: MA Experiment 20000495 PARAMETER Experiment Name: At_Guard_Cells_P Parameter: Harvest Date Value: 8/2/2002
  misc_feature: MA Experiment 20000495 PARAMETER Experiment Name: At_Guard_Cells_P Parameter: Organism Value: A. thaliana
  misc_feature: MA Experiment 20000495 PARAMETER Experiment Name: At_Guard_Cells_P Parameter: Tissue Value: Guard Cells vs. Leaves
attgcgaattttaattgatcactctctctctctatctctgttcacacatctctcccaaagtaggtagaagaagatggggacgacgttagatgtatcaagagcagagctagcacttgtggtaatgtatttgaacaaagcagaggcaagagataagttatgcagagctatacagtatggttccaagttcttgagtggtggacaacctggtactgctcaaaatgttgacaaatctactagcttagcaagaaaagtcttccgtcttttcaagtttgtgaatgacttgcatggtcttatcagtcctgtgcctaaaggaactcctcttcctcttgttttacttggaaagtcgaagaacgcacttttatctacattcttgttcctggatcaaattgtctggcttgggagatcaggaatatataagaacaaagaacgagctgagttacttggacgtatatctctcttctgctggatgggatcttctgtctgcacaactttagtcgaggttggtgagatgggaaggctttcttcatcaatgaagaagatcgaaaagggactcaagaatggaaacaagtatcaggatgaggattatcgtgctaagctaaaaaaatcaaacgagaggtcacttgctttgatcaaatcagctatggacattgttgtagcagctggtcttcttcagttagctccaacgaagatcactcctcgtgtcaccggagcttttggattcatcacctccatcatttcttgttaccagttgcttccgacacgccccaagatcaaaacaccctgaagtcaatcgaggaagctggtgttaaggagaaagtcatttcagaaagtttctgttcttcttattattaaggaaattcactgctgttataaaacatcgtataaaatacttatttgcaggaattacggttattataaatttatgcctcagattcttgatac

SEQ ID NO: 72276 - protein, 236 aa, Arabidopsis thaliana; identical to SEQ ID NO: 28883
  peptide (1)..(236): Ceres Seq. ID no. 4927737
  misc_feature (12)..(227): Pfam Name: Peroxisomal biogenesis factor 11 (PEX11) Pfam Description: Peroxisomal biogenesis factor 11 (PEX11)
  misc_feature (1)..(236): Homolog of NCBI NO: 18406877 NR Description: expressed protein; protein id: At2g45740.1, by cDNA: 12250., supported by cDNA: gi_15450879 [Arabidopsis >gi|15450880|gb|AAK96711.1| Unknown protein [Arabidopsis
  misc_feature (1)..(231): Homolog of NCBI NO: 7486466 NR Description: hypothetical protein At2g45740 [imported] -
  misc_feature (3)..(236): Homolog of NCBI NO: 30695340 NR Description: expressed protein [Arabidopsis thaliana] unknown protein [Arabidopsis thaliana]
  misc_feature (3)..(234): Homolog of NCBI NO: 18378887 NR Description: expressed protein; protein id: At1g01820.1, by cDNA: 28475., supported by cDNA: gi_12083289, supported by gi_17381254, supported by cDNA: gi_20453366 [Arabidopsis
  misc_feature (3)..(236): Homolog of NCBI NO: 11358250 NR Description: hypothetical protein T27I15_160 - Arabidopsis >gi|8388623|emb|CAB94143.1| putative protein [Arabidopsis
  misc_feature (3)..(234): Homolog of NCBI NO: 8489788 NR Description: unknown [Lycopersicon esculentum]
  misc_feature (3)..(234): Homolog of NCBI NO: 25553559 NR Description: OSJNBa0038F22.7 [Oryza sativa (japonica
  misc_feature (3)..(225): Homolog of NCBI NO: 34898026 NR Description: ESTs AU064537(E31904),AU082147(E31904) correspond a region of the predicted gene.~Similar to Arabidopsis thaliana
  misc_feature (132)..(236): Homolog of NCBI NO: 14335058 NR Description: At2g45740/F4I18.28 [Arabidopsis thaliana]

SEQ ID NO: 72277 - protein, 220 aa, Arabidopsis thaliana; identical to SEQ ID NO: 28884
  peptide (1)..(220): Ceres Seq. ID no. 4927738
  misc_feature (1)..(211): Pfam Name: Peroxisomal biogenesis factor 11 (PEX11) Pfam Description: Peroxisomal biogenesis factor 11 (PEX11)
  misc_feature (1)..(220): Homolog of NCBI NO: 18406877 NR Description: expressed protein; protein id: At2g45740.1, by cDNA: 12250., supported by cDNA: gi_15450879 [Arabidopsis >gi|15450880|gb|AAK96711.1| Unknown protein [Arabidopsis
  misc_feature (1)..(215): Homolog of NCBI NO: 7486466 NR Description: hypothetical protein At2g45740 [imported] -
  misc_feature (1)..(220): Homolog of NCBI NO: 30695340 NR Description: expressed protein [Arabidopsis thaliana] unknown protein [Arabidopsis thaliana]
  misc_feature (1)..(218): Homolog of NCBI NO: 18378887 NR Description: expressed protein; protein id: At1g01820.1, by cDNA: 28475., supported by cDNA: gi_12083289, supported by gi_17381254, supported by cDNA: gi_20453366 [Arabidopsis
  misc_feature (1)..(220): Homolog of NCBI NO: 11358250 NR Description: hypothetical protein T27I15_160 - Arabidopsis >gi|8388623|emb|CAB94143.1| putative protein [Arabidopsis
  misc_feature (1)..(218): Homolog of NCBI NO: 8489788 NR Description: unknown [Lycopersicon esculentum]
  misc_feature (1)..(218): Homolog of NCBI NO: 25553559 NR Description: OSJNBa0038F22.7 [Oryza sativa (japonica
  misc_feature (1)..(209): Homolog of NCBI NO: 34898026 NR Description: ESTs AU064537(E31904),AU082147(E31904) correspond a region of the predicted gene.~Similar to Arabidopsis thaliana
  misc_feature (116)..(220): Homolog of NCBI NO: 14335058 NR Description: At2g45740/F4I18.28 [Arabidopsis thaliana]

SEQ ID NO: 72278 - DNA, 846 bp, Arabidopsis thaliana
  misc_feature (1)..(846): Ceres Seq. ID no. 4927827
  misc_feature: MA Experiment ID: 108435 Result: Down-regulated in Transcription
  misc_feature: MA Experiment 108435 PARAMETER Experiment Name: At_stm_Mutants_cDNA_P Parameter: Plant Line Value: wt Landsburg vs stm
  misc_feature: MA Experiment 108435 PARAMETER Experiment Name: At_stm_Mutants_cDNA_P Parameter: Tissue Value: Shoot Apical Meristem Region
  misc_feature: MA Experiment ID: 108462 Result: Up-regulated in Transcription
  misc_feature: MA Experiment 108462 PARAMETER Experiment Name: At_Germinating_Seeds_cDNA_P Parameter: Age (day) Value: 2 vs. 0
  misc_feature: MA Experiment 108462 PARAMETER Experiment Name: At_Germinating_Seeds_cDNA_P Parameter: Tissue Value: Germinating Seeds
  misc_feature: MA Experiment ID: 108464 Result: Up-regulated in Transcription
  misc_feature: MA Experiment 108464 PARAMETER Experiment Name: At_Germinating_Seeds_cDNA_P Parameter: Age (day) Value: 4 vs. 0
  misc_feature: MA Experiment 108464 PARAMETER Experiment Name: At_Germinating_Seeds_cDNA_P Parameter: Tissue Value: Germinating Seeds
  misc_feature: MA Experiment ID: 108488 Result: Up-regulated in Transcription
  misc_feature: MA Experiment ID: 108595 Result: Down-regulated in Transcription
  misc_feature: MA Experiment 108595 PARAMETER Experiment Name: At_Ler-pi_Ovule_cDNA_P Parameter: Plant Line Value: null
  misc_feature: MA Experiment ID: 20000069 Result: Down-regulated in Transcription
  misc_feature: MA Experiment 20000069 PARAMETER Experiment Name: At_100uM_ABA_Mutants_cDNA_P Parameter: Plant Line Value: CS23
  misc_feature: MA Experiment 20000069 PARAMETER Experiment Name: At_100uM_ABA_Mutants_cDNA_P Parameter: Timepoint (hr) Value: 6
  misc_feature: MA Experiment 20000069 PARAMETER Experiment Name: At_100uM_ABA_Mutants_cDNA_P Parameter: Tissue Value: Aerial
  misc_feature: MA Experiment 20000069 PARAMETER Experiment Name: At_100uM_ABA_Mutants_cDNA_P Parameter: Treatment Value: 100uM ABA vs. No Treatment
  misc_feature: MA Experiment ID: 20000070 Result: Down-regulated in Transcription
  misc_feature: MA Experiment 20000070 PARAMETER Experiment Name: At_100uM_ABA_Mutants_cDNA_P Parameter: Plant Line Value: CS24
  misc_feature: MA Experiment 20000070 PARAMETER Experiment Name: At_100uM_ABA_Mutants_cDNA_P Parameter: Timepoint (hr) Value: 6
  misc_feature: MA Experiment 20000070 PARAMETER Experiment Name: At_100uM_ABA_Mutants_cDNA_P Parameter: Tissue Value: Aerial
  misc_feature: MA Experiment 20000070 PARAMETER Experiment Name: At_100uM_ABA_Mutants_cDNA_P Parameter: Treatment Value: 100uM ABA vs. No Treatment
  misc_feature: MA Experiment ID: 20000086 Result: Down-regulated in Transcription
  misc_feature: MA Experiment 20000086 PARAMETER Experiment Name: At_100uM_ABA_Mutants_cDNA_P Parameter: Plant Line Value: CS22
  misc_feature: MA Experiment 20000086 PARAMETER Experiment Name: At_100uM_ABA_Mutants_cDNA_P Parameter: Timepoint (hr) Value: 6
  misc_feature: MA Experiment 20000086 PARAMETER Experiment Name: At_100uM_ABA_Mutants_cDNA_P Parameter: Tissue Value: Aerial
  misc_feature: MA Experiment 20000086 PARAMETER Experiment Name: At_100uM_ABA_Mutants_cDNA_P Parameter: Treatment Value: 100uM ABA vs. No Treatment
  misc_feature: MA Experiment ID: 20000087 Result: Down-regulated in Transcription
  misc_feature: MA Experiment 20000087 PARAMETER Experiment Name: At_100uM_ABA_Mutants_cDNA_P Parameter: Plant Line Value: WS
  misc_feature: MA Experiment 20000087 PARAMETER Experiment Name: At_100uM_ABA_Mutants_cDNA_P Parameter: Timepoint (hr) Value: 6
  misc_feature: MA Experiment 20000087 PARAMETER Experiment Name: At_100uM_ABA_Mutants_cDNA_P Parameter: Tissue Value: Aerial
  misc_feature: MA Experiment 20000087 PARAMETER Experiment Name: At_100uM_ABA_Mutants_cDNA_P Parameter: Treatment Value: 100uM ABA vs. No Treatment
  misc_feature: MA Experiment ID: 20000184 Result: Up-regulated in Transcription
  misc_feature: MA Experiment 20000184 PARAMETER Experiment Name: At_Shoots__P Parameter: Age (day) Value: 7
  misc_feature: MA Experiment 20000184 PARAMETER Experiment Name: At_Shoots__P Parameter: Tissue Value: Shoots vs. Whole Plant
  misc_feature: MA Experiment ID: 20000185 Result: Down-regulated in Transcription
  misc_feature: MA Experiment 20000185 PARAMETER Experiment Name: At_Roots__P Parameter: Age (day) Value: 7 vs. 21
  misc_feature: MA Experiment 20000185 PARAMETER Experiment Name: At_Roots__P Parameter: Organism Value: A. thaliana
  misc_feature: MA Experiment 20000185 PARAMETER Experiment Name: At_Roots__P Parameter: Tissue Value: Roots vs. Whole Plant
  misc_feature: MA Experiment ID: 20000224 Result: Down-regulated in Transcription
  misc_feature: MA Experiment ID: 20000286 Result: Down-regulated in Transcription
  misc_feature: MA Experiment 20000286 PARAMETER Experiment Name: At_Open_Flower_P Parameter: Age (day) Value: 21
  misc_feature: MA Experiment 20000286 PARAMETER Experiment Name: At_Open_Flower_P Parameter: Plant Line Value: WS
  misc_feature: MA Experiment 20000286 PARAMETER Experiment Name: At_Open_Flower_P Parameter: Tissue Value: Half Open vs. Whole Plant
  misc_feature: MA Experiment ID: 20000437 Result: Down-regulated in Transcription
  misc_feature: MA Experiment 20000437 PARAMETER Experiment Name: At_Drought_P Parameter: Age (day) Value: 8
  misc_feature: MA Experiment 20000437 PARAMETER Experiment Name: At_Drought_P Parameter: Organism Value: A. thaliana
  misc_feature: MA Experiment 20000437 PARAMETER Experiment Name: At_Drought_P Parameter: Plant Line Value: WS
  misc_feature: MA Experiment 20000437 PARAMETER Experiment Name: At_Drought_P Parameter: Timepoint (hr) Value: 24
  misc_feature: MA Experiment 20000437 PARAMETER Experiment Name: At_Drought_P Parameter: Tissue Value: Whole Plant
  misc_feature: MA Experiment 20000437 PARAMETER Experiment Name: At_Drought_P Parameter: Treatment Value: Drought vs. No Drought
  misc_feature: MA Experiment ID: 20000438 Result: Up-regulated in Transcription
  misc_feature: MA Experiment 20000438 PARAMETER Experiment Name: At_Shoots__P Parameter: Age (day) Value: 14
  misc_feature: MA Experiment 20000438 PARAMETER Experiment Name: At_Shoots__P Parameter: Tissue Value: Shoots vs. Whole Plant
  misc_feature: MA Experiment ID: 20000439 Result: Down-regulated in Transcription
  misc_feature: MA Experiment 20000439 PARAMETER Experiment Name: At_Roots__P Parameter: Age (day) Value: 14 vs. 21
  misc_feature: MA Experiment 20000439 PARAMETER Experiment Name: At_Roots__P Parameter: Organism Value: A. thaliana
  misc_feature: MA Experiment 20000439 PARAMETER Experiment Name: At_Roots__P Parameter: Tissue Value: Roots vs. Whole Plant
  misc_feature: MA Experiment ID: 20001248 Result: Down-regulated in Transcription
  misc_feature: MA Experiment 20001248 PARAMETER Experiment Name: At_Far-red-induction_P Parameter: Age (day) Value: 7
  misc_feature: MA Experiment 20001248 PARAMETER Experiment Name: At_Far-red-induction_P Parameter: Light Value: Far-red vs. White
  misc_feature: MA Experiment 20001248 PARAMETER Experiment Name: At_Far-red-induction_P Parameter: Organism Value: A. thaliana
  misc_feature: MA Experiment 20001248 PARAMETER Experiment Name: At_Far-red-induction_P Parameter: Plant Line Value: Columbia
  misc_feature: MA Experiment 20001248 PARAMETER Experiment Name: At_Far-red-induction_P Parameter: Timepoint (hr) Value: 4
  misc_feature: MA Experiment 20001248 PARAMETER Experiment Name: At_Far-red-induction_P Parameter: Tissue Value: Whole Plant
  misc_feature: MA Experiment ID: 20001451 Result: Down-regulated in Transcription
  misc_feature: MA Experiment 20001451 PARAMETER Experiment Name: At_Far-red-induction_P Parameter: Age (day) Value: 7
  misc_feature: MA Experiment 20001451 PARAMETER Experiment Name: At_Far-red-induction_P Parameter: Light Value: Far-red vs. White
  misc_feature: MA Experiment 20001451 PARAMETER Experiment Name: At_Far-red-induction_P Parameter: Organism Value: A. thaliana
  misc_feature: MA Experiment 20001451 PARAMETER Experiment Name: At_Far-red-induction_P Parameter: Plant Line Value: Columbia
  misc_feature: MA Experiment 20001451 PARAMETER Experiment Name: At_Far-red-induction_P Parameter: Timepoint (hr) Value: 24
  misc_feature: MA Experiment 20001451 PARAMETER Experiment Name: At_Far-red-induction_P Parameter: Tissue Value: Whole Plant
  misc_feature: MA Experiment ID: 20001557 Result: Down-regulated in Transcription
  misc_feature: MA Experiment 20001557 PARAMETER Experiment Name: At_Drought_Soil_Dry_P Parameter: Age (day) Value: 27
  misc_feature: MA Experiment 20001557 PARAMETER Experiment Name: At_Drought_Soil_Dry_P Parameter: Organism Value: A. thaliana
  misc_feature: MA Experiment 20001557 PARAMETER Experiment Name: At_Drought_Soil_Dry_P Parameter: Plant Line Value: WS
  misc_feature: MA Experiment 20001557 PARAMETER Experiment Name: At_Drought_Soil_Dry_P Parameter: Post Timepoint (hr) Value: 3
  misc_feature: MA Experiment 20001557 PARAMETER Experiment Name: At_Drought_Soil_Dry_P Parameter: Post-Treatment Value: Re-Water vs. No Drought
  misc_feature: MA Experiment 20001557 PARAMETER Experiment Name: At_Drought_Soil_Dry_P Parameter: Timepoint (day) Value: 13
  misc_feature: MA Experiment 20001557 PARAMETER Experiment Name: At_Drought_Soil_Dry_P Parameter: Treatment Value: Drought vs. No Drought
  misc_feature: MA Experiment ID: 20001904 Result: Down-regulated in Transcription
  misc_feature: MA Experiment 20001904 PARAMETER Experiment Name: At_Drought_Reproduction_P Parameter: Age (day) Value: 37
  misc_feature: MA Experiment 20001904 PARAMETER Experiment Name: At_Drought_Reproduction_P Parameter: Organism Value: A. thaliana
  misc_feature: MA Experiment 20001904 PARAMETER Experiment Name: At_Drought_Reproduction_P Parameter: Plant Line Value: WS
  misc_feature: MA Experiment 20001904 PARAMETER Experiment Name: At_Drought_Reproduction_P Parameter: Timepoint (day) Value: 7
  misc_feature: MA Experiment 20001904 PARAMETER Experiment Name: At_Drought_Reproduction_P Parameter: Tissue Value: Rosettes
  misc_feature: MA Experiment 20001904 PARAMETER Experiment Name: At_Drought_Reproduction_P Parameter: Treatment Value: Drought vs. No Drought
  misc_feature: MA Experiment ID: 20001908 Result: Down-regulated in Transcription
  misc_feature: MA Experiment 20001908 PARAMETER Experiment Name: At_Drought_Reproduction_P Parameter: Age (day) Value: 40
  misc_feature: MA Experiment 20001908 PARAMETER Experiment Name: At_Drought_Reproduction_P Parameter: Organism Value: A. thaliana
  misc_feature: MA Experiment 20001908 PARAMETER Experiment Name: At_Drought_Reproduction_P Parameter: Plant Line Value: WS
  misc_feature: MA Experiment 20001908 PARAMETER Experiment Name: At_Drought_Reproduction_P Parameter: Timepoint (day) Value: 10
  misc_feature: MA Experiment 20001908 PARAMETER Experiment Name: At_Drought_Reproduction_P Parameter: Tissue Value: Siliques
  misc_feature: MA Experiment 20001908 PARAMETER Experiment Name: At_Drought_Reproduction_P Parameter: Treatment Value: Drought vs. No Drought
atcctgatcgggaaacccaaaacgagtggtcgaatagtttccgactgattcttccgaggcttgaagctcaatagctatggcttctctttcagtctcttcctcttcaaccatcatcgattcaagagctcctccttctcgactagcctccgcctccgcctcttctccgtcgtgcatttcacttcccacacttccgattcagtctcatacccgtgccgctaaagccactgcttactgtcggaagattgtgaggaacgttgtgacgagagctactactgaagttggtgaagctcctgccactactaccgaagctgagactactgagttacctgaaatcgtcaagactgctcaagaagcttgggagaaagtggatgacaagtacgctattggttctcttgcctttgctggtgtagtggctctttggggttctgctggaatgatttcggcaatcgataggcttccattggttcctggtgttcttgaacttgtaggcatcggttacacaggatggttcacttacaagaacctggtcttcaaaccagacagggaggctttgtttgagaaggtcaagagcacatacaaagacatattagggagcagctgaatcaaaggaggaagaagaagaagaagagcctttttgaggccattcatgaattggaatgaaggatatcaaaagaatctaacacaaaggccacgtccttccttcaatctttccttcttgtaactaaataattttcatcctttctctctctctgtctctggtcttttttagctcaaagtatcatccatttatgtcaaagtgttgtaaattcctcaagactatatatgagatgttttgtttcattttcc

SEQ ID NO: 72279 - protein, 174 aa, Arabidopsis thaliana; identical to SEQ ID NO: 48157
  peptide (1)..(174): Ceres Seq. ID no. 4927828
  misc_feature (1)..(174): Homolog of NCBI NO: 18407178 NR Description: expressed protein; protein id: At2g46820.1, by cDNA: 26967., supported by cDNA: gi_17473793 [Arabidopsis
  misc_feature (1)..(174): Homolog of NCBI NO: 21555057 NR Description: unknown [Arabidopsis thaliana]
  misc_feature (27)..(174): Homolog of NCBI NO: 34393236 NR Description: unknown protein [Oryza sativa (japonica
  misc_feature (1)..(171): Homolog of NCBI NO: 37536446 NR Description: hypothetical protein [Oryza sativa (japonica group)] >gi|18057096|gb|AAL58119.1| hypothetical protein [Oryza
  misc_feature (80)..(172): Homolog of NCBI NO: 18403896 NR Description: expressed protein; protein id: At1g52220.1, by cDNA: 21305., supported by cDNA: gi_15294155, supported by
  misc_feature (3)..(173): Homolog of NCBI NO: 687677 NR Description: unknown
  misc_feature (80)..(172): Homolog of NCBI NO: 21554231 NR Description: unknown [Arabidopsis thaliana]
  misc_feature (3)..(173): Homolog of NCBI NO: 18411555 NR Description: expressed protein; protein id: At4g01150.1, by cDNA: gi_14488087, supported by cDNA: gi_20147122, supported cDNA: gi_687676 [Arabidopsis thaliana] >gi|7485223|pir||T01726
  misc_feature (17)..(172): Homolog of NCBI NO: 34909746 NR Description: contains ESTs
  misc_feature (22)..(173): Homolog of NCBI NO: 38175474 NR Description: unknown protein [Oryza sativa (japonica

SEQ ID NO: 72280 - DNA, 619 bp, Arabidopsis thaliana
  misc_feature (1)..(619): Ceres Seq. ID no. 4927995
  misc_feature: MA Experiment ID: 108434 Result: Up-regulated in Transcription
  misc_feature: MA Experiment 108434 PARAMETER Experiment Name: At_Root_Tips_cDNA_P Parameter: Tissue Value: Root Tips
  misc_feature: MA Experiment ID: 108461 Result: Down-regulated in Transcription
  misc_feature: MA Experiment 108461 PARAMETER Experiment Name: At_Germinating_Seeds_cDNA_P Parameter: Age (day) Value: 1 vs. 0
  misc_feature: MA Experiment 108461 PARAMETER Experiment Name: At_Germinating_Seeds_cDNA_P Parameter: Tissue Value: Germinating Seeds
  misc_feature: MA Experiment ID: 108462 Result: Down-regulated in Transcription
  misc_feature: MA Experiment 108462 PARAMETER Experiment Name: At_Germinating_Seeds_cDNA_P Parameter: Age (day) Value: 2 vs. 0
  misc_feature: MA Experiment 108462 PARAMETER Experiment Name: At_Germinating_Seeds_cDNA_P Parameter: Tissue Value: Germinating Seeds
  misc_feature: MA Experiment ID: 108463 Result: Down-regulated in Transcription
  misc_feature: MA Experiment 108463 PARAMETER Experiment Name: At_Germinating_Seeds_cDNA_P Parameter: Age (day) Value: 3 vs. 0
  misc_feature: MA Experiment 108463 PARAMETER Experiment Name: At_Germinating_Seeds_cDNA_P Parameter: Tissue Value: Germinating Seeds
  misc_feature: MA Experiment ID: 108464 Result: Down-regulated in Transcription
  misc_feature: MA Experiment 108464 PARAMETER Experiment Name: At_Germinating_Seeds_cDNA_P Parameter: Age (day) Value: 4 vs. 0
  misc_feature: MA Experiment 108464 PARAMETER Experiment Name: At_Germinating_Seeds_cDNA_P Parameter: Tissue Value: Germinating Seeds
  misc_feature: MA Experiment ID: 108569 Result: Down-regulated in Transcription
  misc_feature: MA Experiment 108569 PARAMETER Experiment Name: At_0.001%_MeJA__cDNA_P Parameter: Timepoint (hr) Value: 6
  misc_feature: MA Experiment 108569 PARAMETER Experiment Name: At_0.001%_MeJA__cDNA_P Parameter: Tissue Value: Aerial
  misc_feature: MA Experiment 108569 PARAMETER Experiment Name: At_0.001%_MeJA__cDNA_P Parameter: Treatment Value: 0.001% MeJA vs. No Treatment
  misc_feature: MA Experiment ID: 108573 Result: Down-regulated in Transcription
  misc_feature: MA Experiment 108573 PARAMETER Experiment Name: At_Drought_cDNA_P Parameter: Timepoint (hr) Value: 6
  misc_feature: MA Experiment 108573 PARAMETER Experiment Name: At_Drought_cDNA_P Parameter: Tissue Value: Aerial
  misc_feature: MA Experiment 108573 PARAMETER Experiment Name: At_Drought_cDNA_P Parameter: Treatment Value: Drought vs. No Drought
  misc_feature: MA Experiment ID: 20000090 Result: Up-regulated in Transcription
  misc_feature: MA Experiment ID: 20000224 Result: Down-regulated in Transcription
  misc_feature: MA Experiment ID: 20000794 Result: Down-regulated in Transcription
  misc_feature: MA Experiment 20000794 PARAMETER Experiment Name: At_Petals_P Parameter: Age (day) Value: 23-25 days
  misc_feature: MA Experiment 20000794 PARAMETER Experiment Name: At_Petals_P Parameter: Plant Line Value: WS
  misc_feature: MA Experiment 20000794 PARAMETER Experiment Name: At_Petals_P Parameter: Tissue Value: Petals vs. Whole plant
actttcgagtatcgagtcgtcgttcttcttcttcctctgagagagagatctgcggaaaacgaaagcgagatttatcaggttcggtgattctttgtggagaagaagctcgcgataagtcaacatgagcaagccaatggaagaggataccaatcagggcaagactgaggaagaggaattcaacaccgggccactctctgttcttatgatgagcgtcaagaataacactcaggttttaatcaattgccggaacaacaggaaacttcttgggcgagtgagggcgtttgacagacactgcaacatggttcttgaaaatgtcagagagatgtggactgaggttccgaaaactgggaaaggcaagaagaaagcacttccggtgaacagagatcggttcataagcaagatgtttctacgtggagactcggtcattatcgtcctcaggaatccaaaatgagaggaagagagacttagagacatgttccttgtttgttgtgctaaaactgataaattcttgtaggtagtagcatcttttaaagttattcgtctcattttcgtttatgtccgaattgacaagatcttttaaagatcttttaaagacatgttccttgtttgttgtttgttc

SEQ ID NO: 72281 - protein, 109 aa, Arabidopsis thaliana; identical to SEQ ID NO: 22047
  peptide (1)..(109): Ceres Seq. ID no. 4927996
  misc_feature (27)..(106): Pfam Name: LSM domain Pfam Description: LSM domain
  misc_feature (1)..(109): Homolog of NCBI NO: 18407411 NR Description: putative small nuclear ribonucleoprotein D2;
  misc_feature (1)..(109): Homolog of NCBI NO: 30690747 NR Description: small nuclear ribonucleo protein D2 -related
  misc_feature (5)..(109): Homolog of NCBI NO: 21554692 NR Description: small nuclear ribonucleoprotein-like protein
  misc_feature (1)..(108): Homolog of NCBI NO: 4759158 NR Description: small nuclear ribonucleoprotein polypeptide D2; core protein D2 [Homo sapiens] >gi|20821553|ref|XP_133225.1| nuclear ribonucleoprotein D2 [Mus musculus]
  misc_feature (1)..(109): Homolog of NCBI NO: 31230450 NR Description: ENSANGP00000002741 [Anopheles gambiae]
  misc_feature (1)..(108): Homolog of NCBI NO: 26337731 NR Description: unnamed protein product [Mus musculus]
  misc_feature (3)..(108): Homolog of NCBI NO: 21357623 NR Description: CG1249-PA [Drosophila melanogaster]
  misc_feature (1)..(108): Homolog of NCBI NO: 22203734 NR Description: small nuclear ribonucleoprotein D2-like protein
  misc_feature (1)..(108): Homolog of NCBI NO: 27677236 NR Description: similar to Small nuclear ribonucleoprotein Sm D2
  misc_feature (1)..(81): Homolog of NCBI NO: 14596019 NR Description: small nuclear ribonucleoprotein-like protein

SEQ ID NO: 72282 - protein, 105 aa, Arabidopsis thaliana; identical to SEQ ID NO: 22048
  peptide (1)..(105): Ceres Seq. ID no. 4927997
  misc_feature (23)..(102): Pfam Name: LSM domain Pfam Description: LSM domain
  misc_feature (1)..(105): Homolog of NCBI NO: 18407411 NR Description: putative small nuclear ribonucleoprotein D2;
  misc_feature (1)..(105): Homolog of NCBI NO: 30690747 NR Description: small nuclear ribonucleo protein D2 -related
  misc_feature (1)..(105): Homolog of NCBI NO: 21554692 NR Description: small nuclear ribonucleoprotein-like protein
  misc_feature (1)..(104): Homolog of NCBI NO: 4759158 NR Description: small nuclear ribonucleoprotein polypeptide D2; core protein D2 [Homo sapiens] >gi|20821553|ref|XP_133225.1| nuclear ribonucleoprotein D2 [Mus musculus]
  misc_feature (1)..(105): Homolog of NCBI NO: 31230450 NR Description: ENSANGP00000002741 [Anopheles gambiae]
  misc_feature (1)..(104): Homolog of NCBI NO: 26337731 NR Description: unnamed protein product [Mus musculus]
  misc_feature (1)..(104): Homolog of NCBI NO: 21357623 NR Description: CG1249-PA [Drosophila melanogaster]
  misc_feature (1)..(104): Homolog of NCBI NO: 22203734 NR Description: small nuclear ribonucleoprotein D2-like protein
  misc_feature (1)..(104): Homolog of NCBI NO: 27677236 NR Description: similar to Small nuclear ribonucleoprotein Sm D2
  misc_feature (1)..(77): Homolog of NCBI NO: 14596019 NR Description: small nuclear ribonucleoprotein-like protein

SEQ ID NO: 72283 - protein, 82 aa, Arabidopsis thaliana; identical to SEQ ID NO: 22049
  peptide (1)..(82): Ceres Seq. ID no. 4927998
  misc_feature (1)..(79): Pfam Name: LSM domain Pfam Description: LSM domain
  misc_feature (1)..(82): Homolog of NCBI NO: 18407411 NR Description: putative small nuclear ribonucleoprotein D2;
  misc_feature (1)..(82): Homolog of NCBI NO: 30690747 NR Description: small nuclear ribonucleo protein D2 -related
  misc_feature (1)..(82): Homolog of NCBI NO: 21554692 NR Description: small nuclear ribonucleoprotein-like protein
  misc_feature (1)..(81): Homolog of NCBI NO: 4759158 NR Description: small nuclear ribonucleoprotein polypeptide D2; core protein D2 [Homo sapiens] >gi|20821553|ref|XP_133225.1| nuclear ribonucleoprotein D2 [Mus musculus]
  misc_feature (1)..(82): Homolog of NCBI NO: 31230450 NR Description: ENSANGP00000002741 [Anopheles gambiae]
  misc_feature (1)..(81): Homolog of NCBI NO: 26337731 NR Description: unnamed protein product [Mus musculus]
  misc_feature (1)..(81): Homolog of NCBI NO: 21357623 NR Description: CG1249-PA [Drosophila melanogaster]
  misc_feature (1)..(81): Homolog of NCBI NO: 22203734 NR Description: small nuclear ribonucleoprotein D2-like protein
  misc_feature (1)..(81): Homolog of NCBI NO: 27677236 NR Description: similar to Small nuclear ribonucleoprotein Sm D2
  misc_feature (1)..(54): Homolog of NCBI NO: 14596019 NR Description: small nuclear ribonucleoprotein-like protein

SEQ ID NO: 72284 - DNA, 1283 bp, Arabidopsis thaliana
  misc_feature (1)..(1283): Ceres Seq. ID no. 4928186
  misc_feature: MA Experiment ID: 108461 Result: Down-regulated in Transcription
  misc_feature: MA Experiment 108461 PARAMETER Experiment Name: At_Germinating_Seeds_cDNA_P Parameter: Age (day) Value: 1 vs. 0
  misc_feature: MA Experiment 108461 PARAMETER Experiment Name: At_Germinating_Seeds_cDNA_P Parameter: Tissue Value: Germinating Seeds
  misc_feature: MA Experiment ID: 108462 Result: Down-regulated in Transcription
  misc_feature: MA Experiment 108462 PARAMETER Experiment Name: At_Germinating_Seeds_cDNA_P Parameter: Age (day) Value: 2 vs. 0
  misc_feature: MA Experiment 108462 PARAMETER Experiment Name: At_Germinating_Seeds_cDNA_P Parameter: Tissue Value: Germinating Seeds
  misc_feature: MA Experiment ID: 108463 Result: Down-regulated in Transcription
  misc_feature: MA Experiment 108463 PARAMETER Experiment Name: At_Germinating_Seeds_cDNA_P Parameter: Age (day) Value: 3 vs. 0
  misc_feature: MA Experiment 108463 PARAMETER Experiment Name: At_Germinating_Seeds_cDNA_P Parameter: Tissue Value: Germinating Seeds
  misc_feature: MA Experiment ID: 108464 Result: Down-regulated in Transcription
  misc_feature: MA Experiment 108464 PARAMETER Experiment Name: At_Germinating_Seeds_cDNA_P Parameter: Age (day) Value: 4 vs. 0
  misc_feature: MA Experiment 108464 PARAMETER Experiment Name: At_Germinating_Seeds_cDNA_P Parameter: Tissue Value: Germinating Seeds
  misc_feature: MA Experiment ID: 20000179 Result: Down-regulated in Transcription
  misc_feature: MA Experiment 20000179 PARAMETER Experiment Name: At_Germinating_Seeds_P Parameter: Age (hr) Value: 6 vs. 0
  misc_feature: MA Experiment 20000179 PARAMETER Experiment Name: At_Germinating_Seeds_P Parameter: Tissue Value: Germinating Seeds
  misc_feature: MA Experiment ID: 20000180 Result: Down-regulated in Transcription
  misc_feature: MA Experiment 20000180 PARAMETER Experiment Name: At_Germinating_Seeds_P Parameter: Age (hr) Value: 24 vs. 0
  misc_feature: MA Experiment 20000180 PARAMETER Experiment Name: At_Germinating_Seeds_P Parameter: Tissue Value: Germinating Seeds
  misc_feature: MA Experiment ID: 20000184 Result: Down-regulated in Transcription
  misc_feature: MA Experiment 20000184 PARAMETER Experiment Name: At_Shoots__P Parameter: Age (day) Value: 7
  misc_feature: MA Experiment 20000184 PARAMETER Experiment Name: At_Shoots__P Parameter: Tissue Value: Shoots vs. Whole Plant
  misc_feature: MA Experiment ID: 20000224 Result: Up-regulated in Transcription
  misc_feature: MA Experiment ID: 20000437 Result: Up-regulated in Transcription
  misc_feature: MA Experiment 20000437 PARAMETER Experiment Name: At_Drought_P Parameter: Age (day) Value: 8
  misc_feature: MA Experiment 20000437 PARAMETER Experiment Name: At_Drought_P Parameter: Organism Value: A. thaliana
  misc_feature: MA Experiment 20000437 PARAMETER Experiment Name: At_Drought_P Parameter: Plant Line Value: WS
  misc_feature: MA Experiment 20000437 PARAMETER Experiment Name: At_Drought_P Parameter: Timepoint (hr) Value: 24
  misc_feature: MA Experiment 20000437 PARAMETER Experiment Name: At_Drought_P Parameter: Tissue Value: Whole Plant
  misc_feature: MA Experiment 20000437 PARAMETER Experiment Name: At_Drought_P Parameter: Treatment Value: Drought vs. No Drought
  misc_feature: MA Experiment ID: 20000495 Result: Up-regulated in Transcription
  misc_feature: MA Experiment 20000495 PARAMETER Experiment Name: At_Guard_Cells_P Parameter: Harvest Date Value: 8/2/2002
  misc_feature: MA Experiment 20000495 PARAMETER Experiment Name: At_Guard_Cells_P Parameter: Organism Value: A. thaliana
  misc_feature: MA Experiment 20000495 PARAMETER Experiment Name: At_Guard_Cells_P Parameter: Tissue Value: Guard Cells vs. Leaves
  misc_feature: MA Experiment ID: 20000794 Result: Up-regulated in Transcription
  misc_feature: MA Experiment 20000794 PARAMETER Experiment Name: At_Petals_P Parameter: Age (day) Value: 23-25 days
  misc_feature: MA Experiment 20000794 PARAMETER Experiment Name: At_Petals_P Parameter: Plant Line Value: WS
  misc_feature: MA Experiment 20000794 PARAMETER Experiment Name: At_Petals_P Parameter: Tissue Value: Petals vs. Whole plant
  misc_feature: MA Experiment ID: 20001757 Result: Down-regulated in Transcription
  misc_feature: MA Experiment 20001757 PARAMETER Experiment Name: At_50mM_NH4NO3_L-to-H_P Parameter: Timepoint (hr) Value: 6
  misc_feature: MA Experiment 20001757 PARAMETER Experiment Name: At_50mM_NH4NO3_L-to-H_P Parameter: Tissue Value: Leaf
  misc_feature: MA Experiment 20001757 PARAMETER Experiment Name: At_50mM_NH4NO3_L-to-H_P Parameter: Treatment Value: 50mM NH4NO3 vs 100mM Mannitol
  misc_feature: MA Experiment ID: 20001905 Result: Up-regulated in Transcription
  misc_feature: MA Experiment 20001905 PARAMETER Experiment Name: At_Drought_Reproduction_P Parameter: Age (day) Value: 40
  misc_feature: MA Experiment 20001905 PARAMETER Experiment Name: At_Drought_Reproduction_P Parameter: Organism Value: A. thaliana
  misc_feature: MA Experiment 20001905 PARAMETER Experiment Name: At_Drought_Reproduction_P Parameter: Plant Line Value: WS
  misc_feature: MA Experiment 20001905 PARAMETER Experiment Name: At_Drought_Reproduction_P Parameter: Timepoint (day) Value: 10
  misc_feature: MA Experiment 20001905 PARAMETER Experiment Name: At_Drought_Reproduction_P Parameter: Tissue Value: Rosettes
  misc_feature: MA Experiment 20001905 PARAMETER Experiment Name: At_Drought_Reproduction_P Parameter: Treatment Value: Drought vs. No Drought
gaaaatggatatgggaccatgcccaaaggtgcactctttgcagcttcggaaagaataccgagaagcaagggcaaaaggtgttgataactacgacagggaattggaagatgccatagacaggcttatcgttgagtgtgataggaagattggtagggcccttaagcgtcttcaagaagaggacgccaaagctgccattgccatttctgtctctgaagtcactcagtcgcctgaaattctcgagttatcggagaaaatcaaagagaagatgaaggaagcagatatccacgatcttgaaggcaaaatggatcttaagattagagctcttgagttagtcgaagagatgaggaccaagagagctgaccaacaggcggtgttgctgttggaagccttcaacaaagatagagcatccttgccacagcccgttccagctcaaccaccatcttccgaattacctccaccggatcctcgcactcaagaaatgataaatgagaaactgaagaaggcagaagatcttggtgaacaaggaatggttgatgaagcccagaaagccctggaagaggctgaagctcttaagaagcttacagttagacgagaacctccagcagattcaacgaagtacaccgctgttgatgtgcgcatcacagaccaaaagttgcgtctatgtgacatatgtggagcattcttgagcgtctatgacagtgatcgccgtttagctgatcattttggggggaagcttcatctaggatacatgctagtccgggacaaattaacagagcttctggatgagaaggccaatatacgcaaggaaagatcaaaggaacggaacagtaaggagagagaatcaagtaaagaccgagagaaagaacaagaaactagtcgtgaacatcgaagagattatgatcgcaggagtagagatcgagataggcaccatgaccgtgatcgtgaacaagacagagactatgatcggtcacactcaagaagcagacgtaggtcacgctcacggtccaggtcaagagatagaccaagggactatgatcgccacaggcgtcacaaccgctactagatcgatcggtcttgctgtctaacagggtttacaagttacaaatggttttaggatctatcaccgaaacttttttctgtctacatgtatgttactcaagtatgttagatgagtttcagaaaatttcacatctttttcttttaccacaaactaaagacttggaagaaacaagatgtggtttatgtttttaccacatctgagaagcgtgtatgcactatcatcg

SEQ ID NO: 72285 - protein, 353 aa, Arabidopsis thaliana
  peptide (1)..(353): Ceres Seq. ID no. 4928187
  misc_feature (2)..(287): Pfam Name: LUC7 N_terminus Pfam Description: LUC7 N_terminus
  misc_feature (1)..(353): Homolog of NCBI NO: 30678827 NR Description: expressed protein [Arabidopsis thaliana]
  misc_feature (2)..(353): Homolog of NCBI NO: 21595481 NR Description: unknown [Arabidopsis thaliana]
  misc_feature (49)..(353): Homolog of NCBI NO: 6017114 NR Description: unknown protein [Arabidopsis thaliana]
  misc_feature (1)..(353): Homolog of NCBI NO: 18418301 NR Description: putative protein; protein id: At5g17440.1, by cDNA: gi_15450598, supported by cDNA: gi_17380623 [Arabidopsis >gi|15450599|gb|AAK96571.1| AT5g17440/K3M16_10 [Arabidopsis
  misc_feature (18)..(353): Homolog of NCBI NO: 11357938 NR Description: hypothetical protein K3M16_10 - Arabidopsis >gi|9755768|emb|CAC01888.1| putative protein [Arabidopsis
  misc_feature (1)..(353): Homolog of NCBI NO: 29367401 NR Description: sarcoplasmic reticulum protein-like protein
  misc_feature (94)..(353): Homolog of NCBI NO: 38614131 NR Description: Unknown (protein for MGC:73932) [Mus musculus]
  misc_feature (94)..(353): Homolog of NCBI NO: 33604140 NR Description: LUC7-like 2 [Mus musculus]
  misc_feature (94)..(353): Homolog of NCBI NO: 34855164 NR Description: similar to CGI-74-like SR-rich protein [Rattus
  misc_feature (94)..(353): Homolog of NCBI NO: 4929587 NR Description: CGI-59 protein [Homo sapiens]
KMDMGPCPKVHSLQLRKEYREARAKGVDNYDRELEDAIDRLIVECDRKIGRALKRLQEEDAKAAIAISVSEVTQSPEILELSEKIKEKMKEADIHDLEGKMDLKIRALELVEEMRTKRADQQAVLLLEAFNKDRASLPQPVPAQPPSSELPPPDPRTQEMINEKLKKAEDLGEQGMVDEAQKALEEAEALKKLTVRREPPADSTKYTAVDVRITDQKLRLCDICGAFLSVYDSDRRLADHFGGKLHLGYMLVRDKLTELLDEKANIRKERSKERNSKERESSKDREKEQETSREHRRDYDRRSRDRDRHHDRDREQDRDYDRSHSRSRRRSRSRSRSRDRPRDYDRHRRHNRY

SEQ ID NO: 72286 - protein, 352 aa, Arabidopsis thaliana; identical to SEQ ID NO: 25845
  peptide (1)..(352): Ceres Seq. ID no. 4928188
  misc_feature (1)..(286): Pfam Name: LUC7 N_terminus Pfam Description: LUC7 N_terminus
  misc_feature (1)..(352): Homolog of NCBI NO: 30678827 NR Description: expressed protein [Arabidopsis thaliana]
  misc_feature (1)..(352): Homolog of NCBI NO: 21595481 NR Description: unknown [Arabidopsis thaliana]
  misc_feature (48)..(352): Homolog of NCBI NO: 6017114 NR Description: unknown protein [Arabidopsis thaliana]
  misc_feature (1)..(352): Homolog of NCBI NO: 18418301 NR Description: putative protein; protein id: At5g17440.1, by cDNA: gi_15450598, supported by cDNA: gi_17380623 [Arabidopsis >gi|15450599|gb|AAK96571.1| AT5g17440/K3M16_10 [Arabidopsis
  misc_feature (17)..(352): Homolog of NCBI NO: 11357938 NR Description: hypothetical protein K3M16_10 - Arabidopsis >gi|9755768|emb|CAC01888.1| putative protein [Arabidopsis
  misc_feature (1)..(352): Homolog of NCBI NO: 29367401 NR Description: sarcoplasmic reticulum protein-like protein
  misc_feature (93)..(352): Homolog of NCBI NO: 38614131 NR Description: Unknown (protein for MGC:73932) [Mus musculus]
  misc_feature (93)..(352): Homolog of NCBI NO: 33604140 NR Description: LUC7-like 2 [Mus musculus]
  misc_feature (93)..(352): Homolog of NCBI NO: 34855164 NR Description: similar to CGI-74-like SR-rich protein [Rattus
  misc_feature (93)..(352): Homolog of NCBI NO: 4929587 NR Description: CGI-59 protein [Homo sapiens]

SEQ ID NO: 72287 - protein, 350 aa, Arabidopsis thaliana
  peptide (1)..(350): Ceres Seq. ID no. 4928189
  misc_feature (1)..(284): Pfam Name: LUC7 N_terminus Pfam Description: LUC7 N_terminus
  misc_feature (1)..(350): Homolog of NCBI NO: 30678827 NR Description: expressed protein [Arabidopsis thaliana]
  misc_feature (1)..(350): Homolog of NCBI NO: 21595481 NR Description: unknown [Arabidopsis thaliana]
  misc_feature (46)..(350): Homolog of NCBI NO: 6017114 NR Description: unknown protein [Arabidopsis thaliana]
  misc_feature (1)..(350): Homolog of NCBI NO: 18418301 NR Description: putative protein; protein id: At5g17440.1, by cDNA: gi_15450598, supported by cDNA: gi_17380623 [Arabidopsis >gi|15450599|gb|AAK96571.1| AT5g17440/K3M16_10 [Arabidopsis
  misc_feature (15)..(350): Homolog of NCBI NO: 11357938 NR Description: hypothetical protein K3M16_10 - Arabidopsis >gi|9755768|emb|CAC01888.1| putative protein [Arabidopsis
  misc_feature (1)..(350): Homolog of NCBI NO: 29367401 NR Description: sarcoplasmic reticulum protein-like protein
  misc_feature (91)..(350): Homolog of NCBI NO: 38614131 NR Description: Unknown (protein for MGC:73932) [Mus musculus]
  misc_feature (91)..(350): Homolog of NCBI NO: 33604140 NR Description: LUC7-like 2 [Mus musculus]
  misc_feature (91)..(350): Homolog of NCBI NO: 34855164 NR Description: similar to CGI-74-like SR-rich protein [Rattus
  misc_feature (91)..(350): Homolog of NCBI NO: 4929587 NR Description: CGI-59 protein [Homo sapiens]
MGPCPKVHSLQLRKEYREARAKGVDNYDRELEDAIDRLIVECDRKIGRALKRLQEEDAKAAIAISVSEVTQSPEILELSEKIKEKMKEADIHDLEGKMDLKIRALELVEEMRTKRADQQAVLLLEAFNKDRASLPQPVPAQPPSSELPPPDPRTQEMINEKLKKAEDLGEQGMVDEAQKALEEAEALKKLTVRREPPADSTKYTAVDVRITDQKLRLCDICGAFLSVYDSDRRLADHFGGKLHLGYMLVRDKLTELLDEKANIRKERSKERNSKERESSKDREKEQETSREHRRDYDRRSRDRDRHHDRDREQDRDYDRSHSRSRRRSRSRSRSRDRPRDYDRHRRHNRY

SEQ ID NO: 72288 - DNA, 1329 bp, Arabidopsis thaliana
  misc_feature (1)..(1329): Ceres Seq. ID no. 4928399
  misc_feature: MA Experiment ID: 20001451 Result: Down-regulated in Transcription
  misc_feature: MA Experiment 20001451 PARAMETER Experiment Name: At_Far-red-induction_P Parameter: Age (day) Value: 7
  misc_feature: MA Experiment 20001451 PARAMETER Experiment Name: At_Far-red-induction_P Parameter: Light Value: Far-red vs. White
  misc_feature: MA Experiment 20001451 PARAMETER Experiment Name: At_Far-red-induction_P Parameter: Organism Value: A. thaliana
  misc_feature: MA Experiment 20001451 PARAMETER Experiment Name: At_Far-red-induction_P Parameter: Plant Line Value: Columbia
  misc_feature: MA Experiment 20001451 PARAMETER Experiment Name: At_Far-red-induction_P Parameter: Timepoint (hr) Value: 24
  misc_feature: MA Experiment 20001451 PARAMETER Experiment Name: At_Far-red-induction_P Parameter: Tissue Value: Whole Plant
atgacacttgctagcgattttggttttccatccgctatatcttcatcttttacaattctagaagagagataccacaataactttcctaacactttgtgtgtttcatcaggacaggaatcgatgaataacaaccccgtcccctgtcaggtgtttcctctggtctctggtggtagttctggtgggaatttgttttcatcttcttccggattctgcaatggtgtctatgtttcatcttcctcccaggcacggccatctgtttctaccgtgccaagagacagaattactgttgctcacgtctctggtgaagggcagaggcaggaatgccctgtggaaacacattccttgcaattgatcaatcaacctcaagaacagaaaattatgacttggtcttcagaccagattcggggcttcttcgattttcctgttccagatccacaagcagcgagcagcagaactatggtttcatccaaggaagtgctttcaaaatgcgaatggccagactgggcggatcagttgatctctgatgatagtcttgaaccaaattggtcggagcttctaggtgatcctaatgtactcaatctatattcaaagatagaaacacagtcttctgatatagcaaggcaagagatcgtctttagaaatcagcatcaggtggatccatcaatggagccgtttaatgccaaaagcccaccagctagttcaatgacatctaagcaaagaatgcgttggacaccagaacttcatgaagcatttgtcgaagctatcaatcagctcggtggtagtgaacgagccacccctaaggctgttttgaagctcatcaatagccctgggttgaccgtttatcatgtcaaaagccatttgcagaaatacagaactgcaaggtataaaccagagctttccaaagatacagaagaacctctagtaaagaatttgaaaaccattgaagatatcaaatctcttgacttgaagacgagcattgaaatcactgaagctctccggttacagatgaaagttcaaaaacaactccacgagcaacttgagatccaaagatcactgcagttacaaatcgaagaacaaggtcggtatcttcagatgatgattgagaaacaacagaagatgcaagagaacaaaaaagactctacttcctcatcatcaatgccagaagctgacccttcagctccatcaccaaacctttcacaacctttcctccataaagcaaccaattcagaaccatcaataactcagaaactgcagaatggttctagcacaatggatcaaagtgaatctacttctgggactagtaatagaaaacgggttagagaagattag

SEQ ID NO: 72289 - protein, 442 aa, Arabidopsis thaliana
  peptide (1)..(442): Ceres Seq. ID no. 4928400
  misc_feature (240)..(291): Pfam Name: Myb-like DNA-binding domain Pfam Description: Myb-like DNA-binding domain
  misc_feature (1)..(442): Homolog of NCBI NO: 15229298 NR Description: transfactor, putative; protein id: At3g04450.1 thaliana] >gi|7547104|gb|AAF63776.1| transfactor, putative
  misc_feature (41)..(442): Homolog of NCBI NO: 26452281 NR Description: putative transfactor [Arabidopsis thaliana]
  misc_feature (1)..(384): Homolog of NCBI NO: 30692110 NR Description: expressed protein [Arabidopsis thaliana]
  misc_feature (1)..(384): Homolog of NCBI NO: 21537366 NR Description: transfactor, putative [Arabidopsis thaliana]
  misc_feature (36)..(384): Homolog of NCBI NO: 21954075 NR Description: unknown protein [Arabidopsis thaliana]
  misc_feature (43)..(384): Homolog of NCBI NO: 30692105 NR Description: expressed protein [Arabidopsis thaliana]
  misc_feature (29)..(442): Homolog of NCBI NO: 6942190 NR Description: CDPK substrate protein 1; CSP1 [Mesembryanthemum
  misc_feature (62)..(385): Homolog of NCBI NO: 22329004 NR Description: putative protein; protein id: At4g28610.1, by cDNA: gi_19698886 [Arabidopsis thaliana]
  misc_feature (62)..(385): Homolog of NCBI NO: 7487685 NR Description: hypothetical protein T5F17.60 - Arabidopsis >gi|7269716|emb|CAB81449.1| putative protein [Arabidopsis
  misc_feature (175)..(442): Homolog of NCBI NO: 4519671 NR Description: transfactor [Nicotiana tabacum]
MTLASDFGFPSAISSSFTILEERYHNNFPNTLCVSSGQESMNNNPVPCQVFPLVSGGSSGGNLFSSSSGFCNGVYVSSSSQARPSVSTVPRDRITVAHVSGEGQRQECPVETHSLQLINQPQEQKIMTWSSDQIRGFFDFPVPDPQAASSRTMVSSKEVLSKCEWPDWADQLISDDSLEPNWSELLGDPNVLNLYSKIETQSSDIARQEIVFRNQHQVDPSMEPFNAKSPPASSMTSKQRMRWTPELHEAFVEAINQLGGSERATPKAVLKLINSPGLTVYHVKSHLQKYRTARYKPELSKDTEEPLVKNLKTIEDIKSLDLKTSIEITEALRLQMKVQKQLHEQLEIQRSLQLQIEEQGRYLQMMIEKQQKMQENKKDSTSSSSMPEADPSAPSPNLSQPFLHKATNSEPSITQKLQNGSSTMDQSESTSGTSNRKRVRED

SEQ ID NO: 72290 - protein, 402 aa, Arabidopsis thaliana
  peptide (1)..(402): Ceres Seq. ID no. 4928401
  misc_feature (200)..(251): Pfam Name: Myb-like DNA-binding domain Pfam Description: Myb-like DNA-binding domain
  misc_feature (1)..(402): Homolog of NCBI NO: 15229298 NR Description: transfactor, putative; protein id: At3g04450.1 thaliana] >gi|7547104|gb|AAF63776.1| transfactor, putative
  misc_feature (1)..(402): Homolog of NCBI NO: 26452281 NR Description: putative transfactor [Arabidopsis thaliana]
  misc_feature (1)..(344): Homolog of NCBI NO: 30692110 NR Description: expressed protein [Arabidopsis thaliana]
  misc_feature (1)..(344): Homolog of NCBI NO: 21537366 NR Description: transfactor, putative [Arabidopsis thaliana]
  misc_feature (1)..(344): Homolog of NCBI NO: 21954075 NR Description: unknown protein [Arabidopsis thaliana]
  misc_feature (3)..(344): Homolog of NCBI NO: 30692105 NR Description: expressed protein [Arabidopsis thaliana]
  misc_feature (1)..(402): Homolog of NCBI NO: 6942190 NR Description: CDPK substrate protein 1; CSP1 [Mesembryanthemum
  misc_feature (22)..(345): Homolog of NCBI NO: 22329004 NR Description: putative protein; protein id: At4g28610.1, by cDNA: gi_19698886 [Arabidopsis thaliana]
  misc_feature (22)..(345): Homolog of NCBI NO: 7487685 NR Description: hypothetical protein T5F17.60 - Arabidopsis >gi|7269716|emb|CAB81449.1| putative protein [Arabidopsis
  misc_feature (135)..(402): Homolog of NCBI NO: 4519671 NR Description: transfactor [Nicotiana tabacum]
MNNNPVPCQVFPLVSGGSSGGNLFSSSSGFCNGVYVSSSSQARPSVSTVPRDRITVAHVSGEGQRQECPVETHSLQLINQPQEQKIMTWSSDQIRGFFDFPVPDPQAASSRTMVSSKEVLSKCEWPDWADQLISDDSLEPNWSELLGDPNVLNLYSKIETQSSDIARQEIVFRNQHQVDPSMEPFNAKSPPASSMTSKQRMRWTPELHEAFVEAINQLGGSERATPKAVLKLINSPGLTVYHVKSHLQKYRTARYKPELSKDTEEPLVKNLKTIEDIKSLDLKTSIEITEALRLQMKVQKQLHEQLEIQRSLQLQIEEQGRYLQMMIEKQQKMQENKKDSTSSSSMPEADPSAPSPNLSQPFLHKATNSEPSITQKLQNGSSTMDQSESTSGTSNRKRVRED

SEQ ID NO: 72291 - protein, 316 aa, Arabidopsis thaliana
  peptide (1)..(316): Ceres Seq. ID no. 4928402
  misc_feature (114)..(165): Pfam Name: Myb-like DNA-binding domain Pfam Description: Myb-like DNA-binding domain
  misc_feature (1)..(316): Homolog of NCBI NO: 15229298 NR Description: transfactor, putative; protein id: At3g04450.1 thaliana] >gi|7547104|gb|AAF63776.1| transfactor, putative
  misc_feature (1)..(316): Homolog of NCBI NO: 26452281 NR Description: putative transfactor [Arabidopsis thaliana]
  misc_feature (1)..(258): Homolog of NCBI NO: 30692110 NR Description: expressed protein [Arabidopsis thaliana]
  misc_feature (1)..(258): Homolog of NCBI NO: 21537366 NR Description: transfactor, putative [Arabidopsis thaliana]
  misc_feature (1)..(258): Homolog of NCBI NO: 21954075 NR Description: unknown protein [Arabidopsis thaliana]
  misc_feature (1)..(258): Homolog of NCBI NO: 30692105 NR Description: expressed protein [Arabidopsis thaliana]
  misc_feature (1)..(316): Homolog of NCBI NO: 6942190 NR Description: CDPK substrate protein 1; CSP1 [Mesembryanthemum
  misc_feature (1)..(259): Homolog of NCBI NO: 22329004 NR Description: putative protein; protein id: At4g28610.1, by cDNA: gi_19698886 [Arabidopsis thaliana]
  misc_feature (1)..(259): Homolog of NCBI NO: 7487685 NR Description: hypothetical protein T5F17.60 - Arabidopsis >gi|7269716|emb|CAB81449.1| putative protein [Arabidopsis
  misc_feature (49)..(316): Homolog of NCBI NO: 4519671 NR Description: transfactor [Nicotiana tabacum]
MTWSSDQIRGFFDFPVPDPQAASSRTMVSSKEVLSKCEWPDWADQLISDDSLEPNWSELLGDPNVLNLYSKIETQSSDIARQEIVFRNQHQVDPSMEPFNAKSPPASSMTSKQRMRWTPELHEAFVEAINQLGGSERATPKAVLKLINSPGLTVYHVKSHLQKYRTARYKPELSKDTEEPLVKNLKTIEDIKSLDLKTSIEITEALRLQMKVQKQLHEQLEIQRSLQLQIEEQGRYLQMMIEKQQKMQENKKDSTSSSSMPEADPSAPSPNLSQPFLHKATNSEPSITQKLQNGSSTMDQSESTSGTSNRKRVRED

SEQ ID NO: 72292 - DNA, 811 bp, Arabidopsis thaliana
  misc_feature (1)..(811): Ceres Seq. ID no. 4928448
  misc_feature: MA Experiment ID: 108577 Result: Down-regulated in Transcription
  misc_feature: MA Experiment 108577 PARAMETER Experiment Name: At_42deg_Heat_cDNA_P Parameter: Temperature (deg C) Value: 42 vs. 22
  misc_feature: MA Experiment 108577 PARAMETER Experiment Name: At_42deg_Heat_cDNA_P Parameter: Timepoint (hr) Value: 6
  misc_feature: MA Experiment 108577 PARAMETER Experiment Name: At_42deg_Heat_cDNA_P Parameter: Tissue Value: Aerial
  misc_feature: MA Experiment ID: 20000179 Result: Up-regulated in Transcription
  misc_feature: MA Experiment 20000179 PARAMETER Experiment Name: At_Germinating_Seeds_P Parameter: Age (hr) Value: 6 vs. 0
  misc_feature: MA Experiment 20000179 PARAMETER Experiment Name: At_Germinating_Seeds_P Parameter: Tissue Value: Germinating Seeds
  misc_feature: MA Experiment ID: 20000180 Result: Up-regulated in Transcription
  misc_feature: MA Experiment 20000180 PARAMETER Experiment Name: At_Germinating_Seeds_P Parameter: Age (hr) Value: 24 vs. 0
  misc_feature: MA Experiment 20000180 PARAMETER Experiment Name: At_Germinating_Seeds_P Parameter: Tissue Value: Germinating Seeds
  misc_feature: MA Experiment ID: 20000184 Result: Down-regulated in Transcription
  misc_feature: MA Experiment 20000184 PARAMETER Experiment Name: At_Shoots__P Parameter: Age (day) Value: 7
  misc_feature: MA Experiment 20000184 PARAMETER Experiment Name: At_Shoots__P Parameter: Tissue Value: Shoots vs. Whole Plant
  misc_feature: MA Experiment ID: 20000234 Result: Up-regulated in Transcription
  misc_feature: MA Experiment 20000234 PARAMETER Experiment Name: At_Siliques_P Parameter: Age (day) Value: 21
  misc_feature: MA Experiment 20000234 PARAMETER Experiment Name: At_Siliques_P Parameter: Organism Value: A. thaliana
  misc_feature: MA Experiment 20000234 PARAMETER Experiment Name: At_Siliques_P Parameter: Plant Line Value: WS
  misc_feature: MA Experiment 20000234 PARAMETER Experiment Name: At_Siliques_P Parameter: Tissue Value: Less Than 5mm Siliques vs. Whole Plant
  misc_feature: MA Experiment ID: 20000265 Result: Up-regulated in Transcription
  misc_feature: MA Experiment 20000265 PARAMETER Experiment Name: At_Open_Flower_P Parameter: Age (day) Value: 21
  misc_feature: MA Experiment 20000265 PARAMETER Experiment Name: At_Open_Flower_P Parameter: Plant Line Value: WS
  misc_feature: MA Experiment 20000265 PARAMETER Experiment Name: At_Open_Flower_P Parameter: Tissue Value: Closed Flower vs. Whole Plant
  misc_feature: MA Experiment ID: 20000495 Result: Up-regulated in Transcription
  misc_feature: MA Experiment 20000495 PARAMETER Experiment Name: At_Guard_Cells_P Parameter: Harvest Date Value: 8/2/2002
  misc_feature: MA Experiment 20000495 PARAMETER Experiment Name: At_Guard_Cells_P Parameter: Organism Value: A. thaliana
  misc_feature: MA Experiment 20000495 PARAMETER Experiment Name: At_Guard_Cells_P Parameter: Tissue Value: Guard Cells vs. Leaves
  misc_feature: MA Experiment ID: 20001911 Result: Down-regulated in Transcription
  misc_feature: MA Experiment 20001911 PARAMETER Experiment Name: At_Drought_Reproduction_P Parameter: Age (day) Value: 40
  misc_feature: MA Experiment 20001911 PARAMETER Experiment Name: At_Drought_Reproduction_P Parameter: Organism Value: A. thaliana
  misc_feature: MA Experiment 20001911 PARAMETER Experiment Name: At_Drought_Reproduction_P Parameter: Plant Line Value: WS
  misc_feature: MA Experiment 20001911 PARAMETER Experiment Name: At_Drought_Reproduction_P Parameter: Timepoint (day) Value: 10
  misc_feature: MA Experiment 20001911 PARAMETER Experiment Name: At_Drought_Reproduction_P Parameter: Tissue Value: Flowers
  misc_feature: MA Experiment 20001911 PARAMETER Experiment Name: At_Drought_Reproduction_P Parameter: Treatment Value: Drought vs. No Drought
aaaaagaaaaaaaaacgctcgtcttcttcttcttcttcttcttatattacttcttcctcccacacagacaaattttgtaacgaagacgggatcgcgataagatcacggtgatcgaaaagccctaagaagtattttcaagggaaagggacttaaagatgcatacttttggttacagagcaaatgctctgctcactttcgcagtcacggctcttgctttcatttgcgcaatcgcgtccttctcagacaaattcagcaaccaaaatccttctgctgagatccagatacttaatatcaatcggtttaagaagcaatctcatggtaacgatgaggtcagcttgacactggacatatcagcagacttgcaatcactttttacttggaacaccaaacaggtttttgttttcgtagcagcagagtatgaaaccccaaagaattccctgaatcaggtttctctatgggatgccattattcctgccaaggaacatgccaaattccggattcaagtctcaaacaagtaccgtttcatcgatcagggacagaatcttcggggcaaagacttcaacttgacattacactggcatgtcatgcccaagaccgggaagatgtttgctgacaagatagtcttgcctggttacagtttaccagatgcatacagatgatgaagattgaataaaacatcaaacctagtccaagactttttgtatttcagttttctgaaaagttttagactttcttttattccaaagaaaactaattcaaaagtactattgttctcttagaatcaaacaaaactattctttttagtgatctt

SEQ ID NO: 72293 - protein, 167 aa, Arabidopsis thaliana; identical to SEQ ID NO: 29722
  peptide (1)..(167): Ceres Seq. ID no. 4928449
  misc_feature (1)..(167): Pfam Name: Signal peptidase subunit Pfam Description: Signal peptidase subunit
  misc_feature (1)..(167): Homolog of NCBI NO: 18397160 NR Description: expressed protein; protein id: At3g05230.1, by cDNA: 15144. [Arabidopsis thaliana] Probable microsomal signal peptidase 22 kDa subunit (SPase 22 kDa
  misc_feature (1)..(167): Homolog of NCBI NO: 15240934 NR Description: signal peptidase; protein id: At5g27430.1, by cDNA: gi_3044217 [Arabidopsis thaliana]
  misc_feature (1)..(167): Homolog of NCBI NO: 28558783 NR Description: signal peptidase protein-like protein [Cucumis
  misc_feature (1)..(166): Homolog of NCBI NO: 34895578 NR Description: unnamed protein product [Oryza sativa (japonica group)] >gi|17369173|sp|Q9LGB4|SP22_ORYSA Probable microsomal peptidase 22 kDa subunit (SPase 22 kDa subunit) (SPC22)
  misc_feature (1)..(166): Homolog of NCBI NO: 31200695 NR Description: ENSANGP00000018480 [Anopheles gambiae]
  misc_feature (1)..(148): Homolog of NCBI NO: 134791 NR Description: Microsomal signal peptidase 23 kDa subunit (SPase
  misc_feature (1)..(148): Homolog of NCBI NO: 11345462 NR Description: hypothetical protein FLJ22649 similar to signal SPC22/23 [Homo sapiens] >gi|20863506|ref|XP_134164.1| RIKEN cDNA
  misc_feature (1)..(148): Homolog of NCBI NO: 26390287 NR Description: unnamed protein product [Mus musculus]
  misc_feature (1)..(148): Homolog of NCBI NO: 27708196 NR Description: similar to RIKEN cDNA 6530401D17 [Mus musculus]
  misc_feature (1)..(157): Homolog of NCBI NO: 32412966 NR Description: hypothetical protein [Neurospora crassa]

SEQ ID NO: 72294 - DNA, 639 bp, Arabidopsis thaliana
  misc_feature (1)..(639): Ceres Seq. ID no. 4928465
  misc_feature: MA Experiment ID: 20000495 Result: Up-regulated in Transcription
  misc_feature: MA Experiment 20000495 PARAMETER Experiment Name: At_Guard_Cells_P Parameter: Harvest Date Value: 8/2/2002
  misc_feature: MA Experiment 20000495 PARAMETER Experiment Name: At_Guard_Cells_P Parameter: Organism Value: A. thaliana
  misc_feature: MA Experiment 20000495 PARAMETER Experiment Name: At_Guard_Cells_P Parameter: Tissue Value: Guard Cells vs. Leaves
atggaaacttctagaaactccaccaactcatcactcttccaatggttaggtcttctagaagattctgatcagcctcctgattctacccctcctcgagtcataacccttctcgcttctaccctcgagaagatgattcagaagaacaaaaaaaaattccacacaagacacaacaaggctgatgagatcactatgttccatggctcaaaagcaccatcgttaagcatttatcgttacacagaaagaatccataggtatgctcagtgtagccctgtgtgtttcgttgcagcttttgcctacatccttagatatctacagagaccagaggctaccagtacggctcgtcgtctcacatcactcaacgttcatcgccttctcatcaccagtctcttggtcgcagcaaaattcttggaacgccagtgttataacaacgcatattatgcaaaaatcggaggagtgagcactgaagagatgaataggctggagagaacgttcttggttgatgttgatttcaggctatatattacaacggagactttcgagaaacactgtctcatgttgcagaaagaaacggtgccttgtgattcaagaaaacttagaacagttcttggagagatagcttgtagctgccaagcgatttga

SEQ ID NO: 72295 - protein, 212 aa, Arabidopsis thaliana
  peptide (1)..(212): Ceres Seq. ID no. 4928466
  misc_feature (58)..(173): Pfam Name: Cyclin, N-terminal domain Pfam Description: Cyclin, N-terminal domain
  misc_feature (58)..(212): Homolog of NCBI NO: 6729043 NR Description: hypothetical protein [Arabidopsis thaliana]
  misc_feature (20)..(189): Homolog of NCBI NO: 25493992 NR Description: PREG-like protein [imported] - Picea mariana
  misc_feature (28)..(189): Homolog of NCBI NO: 15224950 NR Description: putative PREG1-like negative regulator; protein
  misc_feature (23)..(191): Homolog of NCBI NO: 15240794 NR Description: putative protein; protein id: At5g07450.1
  misc_feature (27)..(189): Homolog of NCBI NO: 15233185 NR Description: PREG-like protein, putative; protein id:
  misc_feature (9)..(189): Homolog of NCBI NO: 15229382 NR Description: putative protein; protein id: At3g63120.1, by cDNA: 35075. [Arabidopsis thaliana] >gi|11358166|pir||T48101
  misc_feature (9)..(189): Homolog of NCBI NO: 21593009 NR Description: unknown [Arabidopsis thaliana]
  misc_feature (31)..(189): Homolog of NCBI NO: 37536902 NR Description: hypothetical protein [Oryza sativa (japonica group)] >gi|12597875|gb|AAG60183.1| hypothetical protein [Oryza >gi|31433542|gb|AAP55040.1| hypothetical protein [Oryza sativa
  misc_feature (31)..(189): Homolog of NCBI NO: 14140116 NR Description: PREG-like protein [Oryza sativa]
  misc_feature (31)..(189): Homolog of NCBI NO: 32488963 NR Description: OSJNBb0038F03.8 [Oryza sativa (japonica
METSRNSTNSSLFQWLGLLEDSDQPPDSTPPRVITLLASTLEKMIQKNKKKFHTRHNKADEITMFHGSKAPSLSIYRYTERIHRYAQCSPVCFVAAFAYILRYLQRPEATSTARRLTSLNVHRLLITSLLVAAKFLERQCYNNAYYAKIGGVSTEEMNRLERTFLVDVDFRLYITTETFEKHCLMLQKETVPCDSRKLRTVLGEIACSCQAI

SEQ ID NO: 72296 - protein, 169 aa, Arabidopsis thaliana
  peptide (1)..(169): Ceres Seq. ID no. 4928467
  misc_feature (15)..(130): Pfam Name: Cyclin, N-terminal domain Pfam Description: Cyclin, N-terminal domain
  misc_feature (15)..(169): Homolog of NCBI NO: 6729043 NR Description: hypothetical protein [Arabidopsis thaliana]
  misc_feature (1)..(146): Homolog of NCBI NO: 25493992 NR Description: PREG-like protein [imported] - Picea mariana
  misc_feature (1)..(146): Homolog of NCBI NO: 15224950 NR Description: putative PREG1-like negative regulator; protein
  misc_feature (1)..(148): Homolog of NCBI NO: 15240794 NR Description: putative protein; protein id: At5g07450.1
  misc_feature (1)..(146): Homolog of NCBI NO: 15233185 NR Description: PREG-like protein, putative; protein id:
  misc_feature (1)..(146): Homolog of NCBI NO: 15229382 NR Description: putative protein; protein id: At3g63120.1, by cDNA: 35075. [Arabidopsis thaliana] >gi|11358166|pir||T48101
  misc_feature (1)..(146): Homolog of NCBI NO: 21593009 NR Description: unknown [Arabidopsis thaliana]
  misc_feature (1)..(146): Homolog of NCBI NO: 37536902 NR Description: hypothetical protein [Oryza sativa (japonica group)] >gi|12597875|gb|AAG60183.1| hypothetical protein [Oryza >gi|31433542|gb|AAP55040.1| hypothetical protein [Oryza sativa
  misc_feature (1)..(146): Homolog of NCBI NO: 14140116 NR Description: PREG-like protein [Oryza sativa]
  misc_feature (1)..(146): Homolog of NCBI NO: 32488963 NR Description: OSJNBb0038F03.8 [Oryza sativa (japonica
MIQKNKKKFHTRHNKADEITMFHGSKAPSLSIYRYTERIHRYAQCSPVCFVAAFAYILRYLQRPEATSTARRLTSLNVHRLLITSLLVAAKFLERQCYNNAYYAKIGGVSTEEMNRLERTFLVDVDFRLYITTETFEKHCLMLQKETVPCDSRKLRTVLGEIACSCQAI

SEQ ID NO: 72297 - protein, 149 aa, Arabidopsis thaliana
  peptide (1)..(149): Ceres Seq. ID no. 4928468
  misc_feature (1)..(110): Pfam Name: Cyclin, N-terminal domain Pfam Description: Cyclin, N-terminal domain
  misc_feature (1)..(149): Homolog of NCBI NO: 6729043 NR Description: hypothetical protein [Arabidopsis thaliana]
  misc_feature (1)..(126): Homolog of NCBI NO: 25493992 NR Description: PREG-like protein [imported] - Picea mariana
  misc_feature (1)..(126): Homolog of NCBI NO: 15224950 NR Description: putative PREG1-like negative regulator; protein
  misc_feature (1)..(128): Homolog of NCBI NO: 15240794 NR Description: putative protein; protein id: At5g07450.1
  misc_feature (1)..(126): Homolog of NCBI NO: 15233185 NR Description: PREG-like protein, putative; protein id:
  misc_feature (1)..(126): Homolog of NCBI NO: 15229382 NR Description: putative protein; protein id: At3g63120.1, by cDNA: 35075. [Arabidopsis thaliana] >gi|11358166|pir||T48101
  misc_feature (1)..(126): Homolog of NCBI NO: 21593009 NR Description: unknown [Arabidopsis thaliana]
  misc_feature (1)..(126): Homolog of NCBI NO: 37536902 NR Description: hypothetical protein [Oryza sativa (japonica group)] >gi|12597875|gb|AAG60183.1| hypothetical protein [Oryza >gi|31433542|gb|AAP55040.1| hypothetical protein [Oryza sativa
  misc_feature (1)..(126): Homolog of NCBI NO: 14140116 NR Description: PREG-like protein [Oryza sativa]
  misc_feature (1)..(126): Homolog of NCBI NO: 32488963 NR Description: OSJNBb0038F03.8 [Oryza sativa (japonica
MFHGSKAPSLSIYRYTERIHRYAQCSPVCFVAAFAYILRYLQRPEATSTARRLTSLNVHRLLITSLLVAAKFLERQCYNNAYYAKIGGVSTEEMNRLERTFLVDVDFRLYITTETFEKHCLMLQKETVPCDSRKLRTVLGEIACSCQAI

SEQ ID NO: 72298 - DNA, 1407 bp, Arabidopsis thaliana
  misc_feature (1)..(1407): Ceres Seq. ID no. 4928798
  misc_feature: MA Experiment ID: 20000436 Result: Up-regulated in Transcription
  misc_feature: MA Experiment 20000436 PARAMETER Experiment Name: At_Drought_P Parameter: Age (day) Value: 7
  misc_feature: MA Experiment 20000436 PARAMETER Experiment Name: At_Drought_P Parameter: Organism Value: A. thaliana
  misc_feature: MA Experiment 20000436 PARAMETER Experiment Name: At_Drought_P Parameter: Plant Line Value: WS
  misc_feature: MA Experiment 20000436 PARAMETER Experiment Name: At_Drought_P Parameter: Timepoint (hr) Value: 12
  misc_feature: MA Experiment 20000436 PARAMETER Experiment Name: At_Drought_P Parameter: Tissue Value: Whole Plant
  misc_feature: MA Experiment 20000436 PARAMETER Experiment Name: At_Drought_P Parameter: Treatment Value: Drought vs. No Drought
  misc_feature: MA Experiment ID: 20000437 Result: Up-regulated in Transcription
  misc_feature: MA Experiment 20000437 PARAMETER Experiment Name: At_Drought_P Parameter: Age (day) Value: 8
  misc_feature: MA Experiment 20000437 PARAMETER Experiment Name: At_Drought_P Parameter: Organism Value: A. thaliana
  misc_feature: MA Experiment 20000437 PARAMETER Experiment Name: At_Drought_P Parameter: Plant Line Value: WS
  misc_feature: MA Experiment 20000437 PARAMETER Experiment Name: At_Drought_P Parameter: Timepoint (hr) Value: 24
  misc_feature: MA Experiment 20000437 PARAMETER Experiment Name: At_Drought_P Parameter: Tissue Value: Whole Plant
  misc_feature: MA Experiment 20000437 PARAMETER Experiment Name: At_Drought_P Parameter: Treatment Value: Drought vs. No Drought
  misc_feature: MA Experiment ID: 20000453 Result: Up-regulated in Transcription
  misc_feature: MA Experiment 20000453 PARAMETER Experiment Name: At_100uM_ABA_P Parameter: Age (day) Value: 15
  misc_feature: MA Experiment 20000453 PARAMETER Experiment Name: At_100uM_ABA_P Parameter: Organism Value: A. thaliana
  misc_feature: MA Experiment 20000453 PARAMETER Experiment Name: At_100uM_ABA_P Parameter: Plant Line Value: WS
  misc_feature: MA Experiment 20000453 PARAMETER Experiment Name: At_100uM_ABA_P Parameter: Timepoint (hr) Value: 24
  misc_feature: MA Experiment 20000453 PARAMETER Experiment Name: At_100uM_ABA_P Parameter: Tissue Value: Aerial
  misc_feature: MA Experiment 20000453 PARAMETER Experiment Name: At_100uM_ABA_P Parameter: Treatment Value: 100uM ABA vs. No Treatment
  misc_feature: MA Experiment ID: 20000455 Result: Up-regulated in Transcription
  misc_feature: MA Experiment 20000455 PARAMETER Experiment Name: At_100uM_ABA_P Parameter: Age (day) Value: 16
  misc_feature: MA Experiment 20000455 PARAMETER Experiment Name: At_100uM_ABA_P Parameter: Organism Value: A. thaliana
  misc_feature: MA Experiment 20000455 PARAMETER Experiment Name: At_100uM_ABA_P Parameter: Plant Line Value: WS
  misc_feature: MA Experiment 20000455 PARAMETER Experiment Name: At_100uM_ABA_P Parameter: Timepoint (hr) Value: 48
  misc_feature: MA Experiment 20000455 PARAMETER Experiment Name: At_100uM_ABA_P Parameter: Tissue Value: Aerial
  misc_feature: MA Experiment 20000455 PARAMETER Experiment Name: At_100uM_ABA_P Parameter: Treatment Value: 100uM ABA vs. No Treatment
  misc_feature: MA Experiment ID: 20000527 Result: Down-regulated in Transcription
  misc_feature: MA Experiment 20000527 PARAMETER Experiment Name: At_10percent_PEG_P Parameter: Age (day) Value: 20
  misc_feature: MA Experiment 20000527 PARAMETER Experiment Name: At_10percent_PEG_P Parameter: Organism Value: A. thaliana
  misc_feature: MA Experiment 20000527 PARAMETER Experiment Name: At_10percent_PEG_P Parameter: Plant Line Value: WS
  misc_feature: MA Experiment 20000527 PARAMETER Experiment Name: At_10percent_PEG_P Parameter: Timepoint (day) Value: 20
  misc_feature: MA Experiment 20000527 PARAMETER Experiment Name: At_10percent_PEG_P Parameter: Tissue Value: Whole Plant
  misc_feature: MA Experiment 20000527 PARAMETER Experiment Name: At_10percent_PEG_P Parameter: Treatment Value: 10percent PEG vs. No Treatment
  misc_feature: MA Experiment ID: 20001554 Result: Up-regulated in Transcription
  misc_feature: MA Experiment 20001554 PARAMETER Experiment Name: At_Drought_Soil_Dry_P Parameter: Age (day) Value: 21
  misc_feature: MA Experiment 20001554 PARAMETER Experiment Name: At_Drought_Soil_Dry_P Parameter: Organism Value: A. thaliana
  misc_feature: MA Experiment 20001554 PARAMETER Experiment Name: At_Drought_Soil_Dry_P Parameter: Plant Line Value: WS
  misc_feature: MA Experiment 20001554 PARAMETER Experiment Name: At_Drought_Soil_Dry_P Parameter: Post Timepoint (hr) Value: None
  misc_feature: MA Experiment 20001554 PARAMETER Experiment Name: At_Drought_Soil_Dry_P Parameter: Post-Treatment Value: None
  misc_feature: MA Experiment 20001554 PARAMETER Experiment Name: At_Drought_Soil_Dry_P Parameter: Timepoint (day) Value: 7
  misc_feature: MA Experiment 20001554 PARAMETER Experiment Name: At_Drought_Soil_Dry_P Parameter: Treatment Value: Drought vs. No Drought
  misc_feature: MA Experiment ID: 20001555 Result: Up-regulated in Transcription
  misc_feature: MA Experiment 20001555 PARAMETER Experiment Name: At_Drought_Soil_Dry_P Parameter: Age (day) Value: 24
  misc_feature: MA Experiment 20001555 PARAMETER Experiment Name: At_Drought_Soil_Dry_P Parameter: Organism Value: A. thaliana
  misc_feature: MA Experiment 20001555 PARAMETER Experiment Name: At_Drought_Soil_Dry_P Parameter: Plant Line Value: WS
  misc_feature: MA Experiment 20001555 PARAMETER Experiment Name: At_Drought_Soil_Dry_P Parameter: Post Timepoint (hr) Value: None
  misc_feature: MA Experiment 20001555 PARAMETER Experiment Name: At_Drought_Soil_Dry_P Parameter: Post-Treatment Value: None
  misc_feature: MA Experiment 20001555 PARAMETER Experiment Name: At_Drought_Soil_Dry_P Parameter: Timepoint (day) Value: 10
  misc_feature: MA Experiment 20001555 PARAMETER Experiment Name: At_Drought_Soil_Dry_P Parameter: Treatment Value: Drought vs. No Drought
  misc_feature: MA Experiment ID: 20001774 Result: Up-regulated in Transcription
  misc_feature: MA Experiment 20001774 PARAMETER Experiment Name: At_Far-red-enriched-adult_P Parameter: Age (day) Value: 31
  misc_feature: MA Experiment 20001774 PARAMETER Experiment Name: At_Far-red-enriched-adult_P Parameter: Light Value: Far-red enriched vs. White
  misc_feature: MA Experiment 20001774 PARAMETER Experiment Name: At_Far-red-enriched-adult_P Parameter: Organism Value: A. thaliana
  misc_feature: MA Experiment 20001774 PARAMETER Experiment Name: At_Far-red-enriched-adult_P Parameter: Plant Line Value: Columbia
  misc_feature: MA Experiment 20001774 PARAMETER Experiment Name: At_Far-red-enriched-adult_P Parameter: Timepoint (hr) Value: 72
  misc_feature: MA Experiment 20001774 PARAMETER Experiment Name: At_Far-red-enriched-adult_P Parameter: Tissue Value: Aerial
  misc_feature: MA Experiment ID: 20001906 Result: Up-regulated in Transcription
  misc_feature: MA Experiment 20001906 PARAMETER Experiment Name: At_Drought_Reproduction_P Parameter: Age (day) Value: 35
  misc_feature: MA Experiment 20001906 PARAMETER Experiment Name: At_Drought_Reproduction_P Parameter: Organism Value: A. thaliana
  misc_feature: MA Experiment 20001906 PARAMETER Experiment Name: At_Drought_Reproduction_P Parameter: Plant Line Value: WS
  misc_feature: MA Experiment 20001906 PARAMETER Experiment Name: At_Drought_Reproduction_P Parameter: Timepoint (day) Value: 5
  misc_feature: MA Experiment 20001906 PARAMETER Experiment Name: At_Drought_Reproduction_P Parameter: Tissue Value: Siliques
  misc_feature: MA Experiment 20001906 PARAMETER Experiment Name: At_Drought_Reproduction_P Parameter: Treatment Value: Drought vs. No Drought
  misc_feature: MA Experiment ID: 20001908 Result: Up-regulated in Transcription
  misc_feature: MA Experiment 20001908 PARAMETER Experiment Name: At_Drought_Reproduction_P Parameter: Age (day) Value: 40
  misc_feature: MA Experiment 20001908 PARAMETER Experiment Name: At_Drought_Reproduction_P Parameter: Organism Value: A. thaliana
  misc_feature: MA Experiment 20001908 PARAMETER Experiment Name: At_Drought_Reproduction_P Parameter: Plant Line Value: WS
  misc_feature: MA Experiment 20001908 PARAMETER Experiment Name: At_Drought_Reproduction_P Parameter: Timepoint (day) Value: 10
  misc_feature: MA Experiment 20001908 PARAMETER Experiment Name: At_Drought_Reproduction_P Parameter: Tissue Value: Siliques
  misc_feature: MA Experiment 20001908 PARAMETER Experiment Name: At_Drought_Reproduction_P Parameter: Treatment Value: Drought vs. No Drought
atgcggaagttaacggcggttaattcactactgaaacggaacaattatcttcttccgcgccatggctcctcacaaacagcagctcagagaacatcctccgtccgcgagaccgagaccgaaacaaaacttccgaaaatgcccccgttcaattattctccgccgccttacgacggtccatctacggcagagatcatcgcaaagcggcgagagttcctcagccccgctctttttcacttctacaacacacccttaaacattgtggaggcaaagatgcagtatgtgttcgacgagaatggacgtcgatatttagatgcctttggaggaatagcgacggtttcgtgcggccattgccacccggaagtagttaactccgtcgtcaaacagttgaaacttattaaccactccaccatcctttaccttaaccacaccatctccgatttcgctgaagcccttgtctccactcttccgggagatctcaaggtggtgtttttcacgaattcgggtacggaggcgaatgaacttgcgatgatgatggctagactgtatacaggatgtaacgacatcgtttcgcttaggaactcttatcatggaaacgcagctgctactatgggtgccactgctcagtccaactggaaattcaacgtcgttcagagtggagttcatcacgccataaatccagatccttacagaggaatatttggatccgacggtgaaaagtacgcgagtgatgtacacgatcttatccaattcggaacgtccggtcaagtcgccggtttcattggcgaatcaatccagggtgttggaggaatcgtagagcttgctcccggatacttaccggcggcttacgacatcgtgaggaaagccggaggagtttgcatcgccgatgaagtccaatccggttttgctcgtaccggaacccatttctgggggtttcaatcccatggtgttatccctgacatcgtcaccatggccaaggggatcggtaacggtataccacttggagcggttgtgacgacaccggagattgccggcgttttaagccgtcggagttactttaatactttcggcggaaatccaatgtgcacggccgcaggacacgcagtacttagagtccttcacgaagagaagctccaagagaatgctaacctcgttggctcacatcttaaacgtagacttacgctactcaaaaacaaatacgaactcattggagacgtgagagggagaggattgatgctaggagttgagtttgtcaaagaccgcgacttaaaaactcctgcaaaagcagagacccttcatttaatggatcaaatgaaagaaatgggagtgttggtggggaaaggtggattctatgggaatgtcttcagaatcactcctcctctctgcttcaccctctccgacgctggttag

SEQ ID NO: 72299 - protein, 468 aa, Arabidopsis thaliana
  peptide (1)..(468): Ceres Seq. ID no. 4928799
  misc_feature (74)..(467): Pfam Name: Aminotransferase class-III Pfam Description: Aminotransferase class-III
  misc_feature (1)..(467): Homolog of NCBI NO: 15231974 NR Description: putative aminotransferase; protein id: supported by cDNA: gi_20466699 [Arabidopsis thaliana] putative aminotransferase [Arabidopsis thaliana]
  misc_feature (1)..(467): Homolog of NCBI NO: 15028237 NR Description: putative beta-alanine-pyruvate aminotransferase
  misc_feature (1)..(467): Homolog of NCBI NO: 15224499 NR Description: putative beta-alanine-pyruvate aminotransferase; id: At2g38400.1, supported by cDNA: 147543., supported by cDNA: supported by cDNA: gi_5731260 [Arabidopsis thaliana]
  misc_feature (44)..(467): Homolog of NCBI NO: 18420498 NR Description: putative protein; protein id: At4g39660.1, by cDNA: gi_15809991, supported by cDNA: gi_5731258 [Arabidopsis >gi|15809992|gb|AAL06923.1| AT4g39660/T19P19_50 [Arabidopsis
  misc_feature (44)..(467): Homolog of NCBI NO: 5731259 NR Description: alanine:glyoxylate aminotransferase 2 homolog
  misc_feature (237)..(467): Homolog of NCBI NO: 16198011 NR Description: LD24726p [Drosophila melanogaster]
  misc_feature (237)..(467): Homolog of NCBI NO: 28574759 NR Description: CG11241-PA [Drosophila melanogaster]
  misc_feature (10)..(234): Homolog of NCBI NO: 16198011 NR Description: LD24726p [Drosophila melanogaster]
  misc_feature (10)..(234): Homolog of NCBI NO: 28574759 NR Description: CG11241-PA [Drosophila melanogaster]
  misc_feature (238)..(463): Homolog of NCBI NO: 13994255 NR Description: alanine-glyoxylate aminotransferase 2 [Homo
MRKLTAVNSLLKRNNYLLPRHGSSQTAAQRTSSVRETETETKLPKMPPFNYSPPPYDGPSTAEIIAKRREFLSPALFHFYNTPLNIVEAKMQYVFDENGRRYLDAFGGIATVSCGHCHPEVVNSVVKQLKLINHSTILYLNHTISDFAEALVSTLPGDLKVVFFTNSGTEANELAMMMARLYTGCNDIVSLRNSYHGNAAATMGATAQSNWKFNVVQSGVHHAINPDPYRGIFGSDGEKYASDVHDLIQFGTSGQVAGFIGESIQGVGGIVELAPGYLPAAYDIVRKAGGVCIADEVQSGFARTGTHFWGFQSHGVIPDIVTMAKGIGNGIPLGAVVTTPEIAGVLSRRSYFNTFGGNPMCTAAGHAVLRVLHEEKLQENANLVGSHLKRRLTLLKNKYELIGDVRGRGLMLGVEFVKDRDLKTPAKAETLHLMDQMKEMGVLVGKGGFYGNVFRITPPLCFTLSDAG

SEQ ID NO: 72300 - protein, 423 aa, Arabidopsis thaliana
  peptide (1)..(423): Ceres Seq. ID no. 4928800
  misc_feature (29)..(422): Pfam Name: Aminotransferase class-III Pfam Description: Aminotransferase class-III
  misc_feature (1)..(422): Homolog of NCBI NO: 15231974 NR Description: putative aminotransferase; protein id: supported by cDNA: gi_20466699 [Arabidopsis thaliana] putative aminotransferase [Arabidopsis thaliana]
  misc_feature (1)..(422): Homolog of NCBI NO: 15028237 NR Description: putative beta-alanine-pyruvate aminotransferase
  misc_feature (1)..(422): Homolog of NCBI NO: 15224499 NR Description: putative beta-alanine-pyruvate aminotransferase; id: At2g38400.1, supported by cDNA: 147543., supported by cDNA: supported by cDNA: gi_5731260 [Arabidopsis thaliana]
  misc_feature (1)..(422): Homolog of NCBI NO: 18420498 NR Description: putative protein; protein id: At4g39660.1, by cDNA: gi_15809991, supported by cDNA: gi_5731258 [Arabidopsis >gi|15809992|gb|AAL06923.1| AT4g39660/T19P19_50 [Arabidopsis
  misc_feature (1)..(422): Homolog of NCBI NO: 5731259 NR Description: alanine:glyoxylate aminotransferase 2 homolog
  misc_feature (192)..(422): Homolog of NCBI NO: 16198011 NR Description: LD24726p [Drosophila melanogaster]
  misc_feature (192)..(422): Homolog of NCBI NO: 28574759 NR Description: CG11241-PA [Drosophila melanogaster]
  misc_feature (1)..(189): Homolog of NCBI NO: 16198011 NR Description: LD24726p [Drosophila melanogaster]
  misc_feature (1)..(189): Homolog of NCBI NO: 28574759 NR Description: CG11241-PA [Drosophila melanogaster]
  misc_feature (193)..(418): Homolog of NCBI NO: 13994255 NR Description: alanine-glyoxylate aminotransferase 2 [Homo
MPPFNYSPPPYDGPSTAEIIAKRREFLSPALFHFYNTPLNIVEAKMQYVFDENGRRYLDAFGGIATVSCGHCHPEVVNSVVKQLKLINHSTILYLNHTISDFAEALVSTLPGDLKVVFFTNSGTEANELAMMMARLYTGCNDIVSLRNSYHGNAAATMGATAQSNWKFNVVQSGVHHAINPDPYRGIFGSDGEKYASDVHDLIQFGTSGQVAGFIGESIQGVGGIVELAPGYLPAAYDIVRKAGGVCIADEVQSGFARTGTHFWGFQSHGVIPDIVTMAKGIGNGIPLGAVVTTPEIAGVLSRRSYFNTFGGNPMCTAAGHAVLRVLHEEKLQENANLVGSHLKRRLTLLKNKYELIGDVRGRGLMLGVEFVKDRDLKTPAKAETLHLMDQMKEMGVLVGKGGFYGNVFRITPPLCFTLSDAG

SEQ ID NO: 72301 - protein, 378 aa, Arabidopsis thaliana
  peptide (1)..(378): Ceres Seq. ID no. 4928801
  misc_feature (1)..(377): Pfam Name: Aminotransferase class-III Pfam Description: Aminotransferase class-III
  misc_feature (1)..(377): Homolog of NCBI NO: 15231974 NR Description: putative aminotransferase; protein id: supported by cDNA: gi_20466699 [Arabidopsis thaliana] putative aminotransferase [Arabidopsis thaliana]
  misc_feature (1)..(377): Homolog of NCBI NO: 15028237 NR Description: putative beta-alanine-pyruvate aminotransferase
  misc_feature (1)..(377): Homolog of NCBI NO: 15224499 NR Description: putative beta-alanine-pyruvate aminotransferase; id: At2g38400.1, supported by cDNA: 147543., supported by cDNA: supported by cDNA: gi_5731260 [Arabidopsis thaliana]
  misc_feature (1)..(377): Homolog of NCBI NO: 18420498 NR Description: putative protein; protein id: At4g39660.1, by cDNA: gi_15809991, supported by cDNA: gi_5731258 [Arabidopsis >gi|15809992|gb|AAL06923.1| AT4g39660/T19P19_50 [Arabidopsis
  misc_feature (1)..(377): Homolog of NCBI NO: 5731259 NR Description: alanine:glyoxylate aminotransferase 2 homolog
  misc_feature (147)..(377): Homolog of NCBI NO: 16198011 NR Description: LD24726p [Drosophila melanogaster]
  misc_feature (147)..(377): Homolog of NCBI NO: 28574759 NR Description: CG11241-PA [Drosophila melanogaster]
  misc_feature (1)..(144): Homolog of NCBI NO: 16198011 NR Description: LD24726p [Drosophila melanogaster]
  misc_feature (1)..(144): Homolog of NCBI NO: 28574759 NR Description: CG11241-PA [Drosophila melanogaster]
  misc_feature (148)..(373): Homolog of NCBI NO: 13994255 NR Description: alanine-glyoxylate aminotransferase 2 [Homo
MQYVFDENGRRYLDAFGGIATVSCGHCHPEVVNSVVKQLKLINHSTILYLNHTISDFAEALVSTLPGDLKVVFFTNSGTEANELAMMMARLYTGCNDIVSLRNSYHGNAAATMGATAQSNWKFNVVQSGVHHAINPDPYRGIFGSDGEKYASDVHDLIQFGTSGQVAGFIGESIQGVGGIVELAPGYLPAAYDIVRKAGGVCIADEVQSGFARTGTHFWGFQSHGVIPDIVTMAKGIGNGIPLGAVVTTPEIAGVLSRRSYFNTFGGNPMCTAAGHAVLRVLHEEKLQENANLVGSHLKRRLTLLKNKYELIGDVRGRGLMLGVEFVKDRDLKTPAKAETLHLMDQMKEMGVLVGKGGFYGNVFRITPPLCFTLSDAG

SEQ ID NO: 72302 - DNA, 1368 bp, Arabidopsis thaliana
  misc_feature (1)..(1368): Ceres Seq. ID no. 4928956
  misc_feature: MA Experiment ID: 20000440 Result: Up-regulated in Transcription
  misc_feature: MA Experiment 20000440 PARAMETER Experiment Name: At_Closed-Flower__Sub_P Parameter: Tissue Value: Closed Flower vs. Whole Plant
atggcagatttcaagcttcttttgcttatactcatccttctatctctctttgaacttgatctacttcactttcaccatgacttcttctctccttttccggtcaagatcggtttactcctgatatccatcttcttctatgcctactcaaccacccggtctaaaccggtttacctagtggatttctcatgtcaccaacccacggattcttgcaaaatctcatccgaaacgttcttcaacatggccaaaggcgctcaactctacaccgaagaaacaatccaattcatgacgaggatactaaaccggtccggtttaggagacgatacgtactccccacgttgcatgttaacctctccaccaactccatcaatgtacgaggcgagacatgaatccgaattagtcatcttcggagctcttaactcactatttaagaaaaccggaatcgaaccgagagaagtcggaatcttcatcgtaaactgcagcttgtttaaccctaacccatctctctcgtccatgatcgtaaaccggtacaagcttaaaaccgacgtcaaaacttacaatctctccggaatctccgtggacctcgccacaaatctactaaaggcaaaccctaatacctacgcagttattgttagtacggagaacatgactctaagcatgtatcgaggcaacgaccggtcaatgttagtccctaactgtctattccgagtaggtggcgctgcggttatgctctcaaaccggagtcaagaccgagtccggtctaagtacgaattgactcatattgtaaggactcacaaaggctctagcgataaacactacacttgtgctgaacaaaaagaagatagtaaaggtatcgttggagtcgcactctctaaagaactaacggttgttgctggtgacacgttaaagacgaatctaacagcacttggtccgcttgttttgcctttatctgaaaaactccggtttatcctctttttggtaaagagtaagcttttccggttaaaggttagtccatatgttccggattttaaactatgtttcaagcatttctgtattcacgctggtggtagagcgttacttgacgcggttgaaaaaggtcttggacttagtgagtttgatcttgagccgtctcggatgactttgcaccgctttggaaacacttcaagctcgtcgctgtggtacgagctggcttacgtggaggctaaatgtcgggtcaaacgaggagatagggtttggcagttggcgtttgggtcgggttttaaatgtaatagtattgtgtggagagcattgagaacgattccggctaacgagtcattggtgggtaacccgtggggtgactcggttcataagtatccagttcacgtgacctaa

SEQ ID NO: 72303 - protein, 455 aa, Arabidopsis thaliana; identical to SEQ ID NO: 71855
  peptide (1)..(455): Ceres Seq. ID no. 4928957
  misc_feature (285)..(430): Pfam Name: Chalcone and stilbene synthases, C-terminal domain Pfam Description: Chalcone and stilbene synthases, C-terminal
  misc_feature (1)..(455): Homolog of NCBI NO: 15228247 NR Description: putative fatty acid elongase 3-ketoacyl-CoA
  misc_feature (1)..(455): Homolog of NCBI NO: 15226428 NR Description: putative beta-ketoacyl-CoA synthase; protein id:
  misc_feature (38)..(454): Homolog of NCBI NO: 4091810 NR Description: fatty acid elongase 3-ketoacyl-CoA synthase 1
  misc_feature (38)..(454): Homolog of NCBI NO: 22329274 NR Description: fatty acid elongase 3-ketoacyl-CoA synthase 1; id: At1g01120.1, supported by cDNA: gi_18377663, supported by
  misc_feature (6)..(454): Homolog of NCBI NO: 15225767 NR Description: putative beta-ketoacyl-CoA synthase; protein id:
  misc_feature (15)..(454): Homolog of NCBI NO: 15219676 NR Description: putative beta-ketoacyl-CoA synthase; protein id:
  misc_feature (15)..(454): Homolog of NCBI NO: 18377979 NR Description: putative beta-ketoacyl-CoA synthase [Arabidopsis
  misc_feature (4)..(452): Homolog of NCBI NO: 3551960 NR Description: senescence-associated protein 15 [Hemerocallis
  misc_feature (14)..(454): Homolog of NCBI NO: 14334714 NR Description: putative beta-ketoacyl-CoA synthase [Arabidopsis
  misc_feature (14)..(454): Homolog of NCBI NO: 15239981 NR Description: beta-ketoacyl-CoA synthase; protein id: supported by cDNA: gi_14334713, supported by cDNA: gi_15983490

SEQ ID NO: 72304 - protein, 376 aa, Arabidopsis thaliana; identical to SEQ ID NO: 71856
  peptide (1)..(376): Ceres Seq. ID no. 4928958
  misc_feature (206)..(351): Pfam Name: Chalcone and stilbene synthases, C-terminal domain Pfam Description: Chalcone and stilbene synthases, C-terminal
  misc_feature (1)..(376): Homolog of NCBI NO: 15228247 NR Description: putative fatty acid elongase 3-ketoacyl-CoA
  misc_feature (1)..(376): Homolog of NCBI NO: 15226428 NR Description: putative beta-ketoacyl-CoA synthase; protein id:
  misc_feature (1)..(375): Homolog of NCBI NO: 4091810 NR Description: fatty acid elongase 3-ketoacyl-CoA synthase 1
  misc_feature (1)..(375): Homolog of NCBI NO: 22329274 NR Description: fatty acid elongase 3-ketoacyl-CoA synthase 1; id: At1g01120.1, supported by cDNA: gi_18377663, supported by
  misc_feature (1)..(375): Homolog of NCBI NO: 15225767 NR Description: putative beta-ketoacyl-CoA synthase; protein id:
  misc_feature (1)..(375): Homolog of NCBI NO: 15219676 NR Description: putative beta-ketoacyl-CoA synthase; protein id:
  misc_feature (1)..(375): Homolog of NCBI NO: 18377979 NR Description: putative beta-ketoacyl-CoA synthase [Arabidopsis
  misc_feature (1)..(373): Homolog of NCBI NO: 3551960 NR Description: senescence-associated protein 15 [Hemerocallis
  misc_feature (1)..(375): Homolog of NCBI NO: 14334714 NR Description: putative beta-ketoacyl-CoA synthase [Arabidopsis
  misc_feature (1)..(375): Homolog of NCBI NO: 15239981 NR Description: beta-ketoacyl-CoA synthase; protein id: supported by cDNA: gi_14334713, supported by cDNA: gi_15983490

SEQ ID NO: 72305 - protein, 361 aa, Arabidopsis thaliana
  peptide (1)..(361): Ceres Seq. ID no. 4928959
  misc_feature (191)..(336): Pfam Name: Chalcone and stilbene synthases, C-terminal domain Pfam Description: Chalcone and stilbene synthases, C-terminal
  misc_feature (1)..(361): Homolog of NCBI NO: 15228247 NR Description: putative fatty acid elongase 3-ketoacyl-CoA
  misc_feature (1)..(361): Homolog of NCBI NO: 15226428 NR Description: putative beta-ketoacyl-CoA synthase; protein id:
  misc_feature (1)..(360): Homolog of NCBI NO: 4091810 NR Description: fatty acid elongase 3-ketoacyl-CoA synthase 1
  misc_feature (1)..(360): Homolog of NCBI NO: 22329274 NR Description: fatty acid elongase 3-ketoacyl-CoA synthase 1; id: At1g01120.1, supported by cDNA: gi_18377663, supported by
  misc_feature (1)..(360): Homolog of NCBI NO: 15225767 NR Description: putative beta-ketoacyl-CoA synthase; protein id:
  misc_feature (1)..(360): Homolog of NCBI NO: 15219676 NR Description: putative beta-ketoacyl-CoA synthase; protein id:
  misc_feature (1)..(360): Homolog of NCBI NO: 18377979 NR Description: putative beta-ketoacyl-CoA synthase [Arabidopsis
  misc_feature (1)..(358): Homolog of NCBI NO: 3551960 NR Description: senescence-associated protein 15 [Hemerocallis
  misc_feature (1)..(360): Homolog of NCBI NO: 14334714 NR Description: putative beta-ketoacyl-CoA synthase [Arabidopsis
  misc_feature (1)..(360): Homolog of NCBI NO: 15239981 NR Description: beta-ketoacyl-CoA synthase; protein id: supported by cDNA: gi_14334713, supported by cDNA: gi_15983490
MTRILNRSGLGDDTYSPRCMLTSPPTPSMYEARHESELVIFGALNSLFKKTGIEPREVGIFIVNCSLFNPNPSLSSMIVNRYKLKTDVKTYNLSGISVDLATNLLKANPNTYAVIVSTENMTLSMYRGNDRSMLVPNCLFRVGGAAVMLSNRSQDRVRSKYELTHIVRTHKGSSDKHYTCAEQKEDSKGIVGVALSKELTVVAGDTLKTNLTALGPLVLPLSEKLRFILFLVKSKLFRLKVSPYVPDFKLCFKHFCIHAGGRALLDAVEKGLGLSEFDLEPSRMTLHRFGNTSSSSLWYELAYVEAKCRVKRGDRVWQLAFGSGFKCNSIVWRALRTIPANESLVGNPWGDSVHKYPVHVT

SEQ ID NO: 72306 - DNA, 1310 bp, Arabidopsis thaliana
  misc_feature (1)..(1310): Ceres Seq. ID no. 4929186
  misc_feature: MA Experiment ID: 108462 Result: Down-regulated in Transcription
  misc_feature: MA Experiment 108462 PARAMETER Experiment Name: At_Germinating_Seeds_cDNA_P Parameter: Age (day) Value: 2 vs. 0
  misc_feature: MA Experiment 108462 PARAMETER Experiment Name: At_Germinating_Seeds_cDNA_P Parameter: Tissue Value: Germinating Seeds
  misc_feature: MA Experiment ID: 108463 Result: Down-regulated in Transcription
  misc_feature: MA Experiment 108463 PARAMETER Experiment Name: At_Germinating_Seeds_cDNA_P Parameter: Age (day) Value: 3 vs. 0
  misc_feature: MA Experiment 108463 PARAMETER Experiment Name: At_Germinating_Seeds_cDNA_P Parameter: Tissue Value: Germinating Seeds
  misc_feature: MA Experiment ID: 108464 Result: Down-regulated in Transcription
  misc_feature: MA Experiment 108464 PARAMETER Experiment Name: At_Germinating_Seeds_cDNA_P Parameter: Age (day) Value: 4 vs. 0
  misc_feature: MA Experiment 108464 PARAMETER Experiment Name: At_Germinating_Seeds_cDNA_P Parameter: Tissue Value: Germinating Seeds
  misc_feature: MA Experiment ID: 20000180 Result: Down-regulated in Transcription
  misc_feature: MA Experiment 20000180 PARAMETER Experiment Name: At_Germinating_Seeds_P Parameter: Age (hr) Value: 24 vs. 0
  misc_feature: MA Experiment 20000180 PARAMETER Experiment Name: At_Germinating_Seeds_P Parameter: Tissue Value: Germinating Seeds
cacttttaattaaaacggtgccgtttctctcaggaacctctttcggtcggacgagaaagccaaaaacgtagcaaaacatcgatcctccgagtccgagattcaggaattggtaatggcggctatgtcagcggttctgtctctgggtttaggaacactccgcccttcgcatcgttccttgtcctgtttcgattccctccggcaccaccagacatcttttctccgttgccaccaaagtctcatctctagaaatacgacgaggtctccgctcaacaagattcttcaggcttgccttcaatccagtggattctgcaaatggtgatgctttggtgtcatcatccgatgaaagttctgagattgtatttatgggtaccggaaccagtgaagggattcctcgtgtcagctgcctcactaatcctttgaaaacatgttcggtatgcacaaaagcaacagaaccaggaaacagaaataggagacttaacaccagcattcttgttcggtacattagaccatccggaacaagtaacatcctcattgattgtggcaagttcttctaccatagtgcccttcgatggtttcccaccttcgggctaagaacacttgatgcagttgtaattactcattctcatgctgacgcaattggaggtctctgaaactgacaagtcttgatgatcttcgtgattggacaaacaatgtccaacctcacattccaatttacactgctatacgtgatctcgaggtgatgaagaagacccattattacttggttgatacaagtgtcatcatacccggagctgcagtctcagagttggagtttaaagtcatacacgaggaccagccatttgtggtaaacgatctgaagatcaccccattacctgtatggcatggaagtaactaccgttcccttggtttccgctttggtaatgtctgctacataagcgatgtcagtgacataccggaagaaacctacccgctccttaaagactgtgatctcctaattatggatgctttgaggcctgaccggtcttcagcaacacactttggcctcccaagggcgttagaggaagttcggaaaatcaaaccaaaaagaacccttttcaccggaatgatgcatttgatggaccacgagaaggtgagcgaagaactggagaaacttaggaacacagaaggcctcgatgtccaactgagctacgatggtcttcgtgtaccaatctcaatttaactcggtttattccttttttccctggtataaccggtttataattatatacataaaataaatttccttttttgtaatgacctgttatatgtgc

SEQ ID NO: 72307 - protein, 159 aa, Arabidopsis thaliana
  peptide (1)..(159): Ceres Seq. ID no. 4929187
  misc_feature (1)..(122): Pfam Name: Metallo-beta-lactamase superfamily Pfam Description: Metallo-beta-lactamase superfamily
  misc_feature (1)..(159): Homolog of NCBI NO: 9294602 NR Description: hydrolase-like protein [Arabidopsis thaliana]
  misc_feature (1)..(113): Homolog of NCBI NO: 15231379 NR Description: hydrolase, putative; protein id: At3g13800.1
  misc_feature (112)..(159): Homolog of NCBI NO: 15231379 NR Description: hydrolase, putative; protein id: At3g13800.1
  misc_feature (1)..(159): Homolog of NCBI NO: 25513552 NR Description: 36.3K hypothetical protein F12P21.8 - Arabidopsis >gi|12320859|gb|AAG50569.1|AC073506_11 hypothetical protein
  misc_feature (1)..(159): Homolog of NCBI NO: 30691663 NR Description: expressed protein [Arabidopsis thaliana]
  misc_feature (1)..(152): Homolog of NCBI NO: 19075752 NR Description: putative hydrolase [Schizosaccharomyces pombe]
  misc_feature (1)..(157): Homolog of NCBI NO: 32477197 NR Description: phnP protein homolog-putative hydrolase
  misc_feature (1)..(135): Homolog of NCBI NO: 15236346 NR Description: putative hydrolase; protein id: At4g03610.1
  misc_feature (1)..(157): Homolog of NCBI NO: 15594878 NR Description: phnP protein (phnP) [Borrelia burgdorferi]
  misc_feature (1)..(155): Homolog of NCBI NO: 29346777 NR Description: hydrolase, metal-dependent [Bacteroides
MKKTHYYLVDTSVIIPGAAVSELEFKVIHEDQPFVVNDLKITPLPVWHGSNYRSLGFRFGNVCYISDVSDIPEETYPLLKDCDLLIMDALRPDRSSATHFGLPRALEEVRKIKPKRTLFTGMMHLMDHEKVSEELEKLRNTEGLDVQLSYDGLRVPISI

SEQ ID NO: 72308 - protein, 95 aa, Arabidopsis thaliana; identical to SEQ ID NO: 39418
  peptide (1)..(95): Ceres Seq. ID no. 4929188
  misc_feature (38)..(95): Pfam Name: Metallo-beta-lactamase superfamily Pfam Description: Metallo-beta-lactamase superfamily
  misc_feature (1)..(95): Homolog of NCBI NO: 9294602 NR Description: hydrolase-like protein [Arabidopsis thaliana]
  misc_feature (1)..(95): Homolog of NCBI NO: 15231379 NR Description: hydrolase, putative; protein id: At3g13800.1
  misc_feature (1)..(95): Homolog of NCBI NO: 25513552 NR Description: 36.3K hypothetical protein F12P21.8 - Arabidopsis >gi|12320859|gb|AAG50569.1|AC073506_11 hypothetical protein
  misc_feature (1)..(95): Homolog of NCBI NO: 30691663 NR Description: expressed protein [Arabidopsis thaliana]
  misc_feature (1)..(95): Homolog of NCBI NO: 19075752 NR Description: putative hydrolase [Schizosaccharomyces pombe]

SEQ ID NO: 72309 - DNA, 1887 bp, Arabidopsis thaliana
  misc_feature (1)..(1887): Ceres Seq. ID no. 4929292
  misc_feature: MA Experiment ID: 20000307 Result: Down-regulated in Transcription
  misc_feature: MA Experiment 20000307 PARAMETER Experiment Name: At_Germinating_Seeds_Sub_P Parameter: Age (hr) Value: 24 vs. 0
  misc_feature: MA Experiment 20000307 PARAMETER Experiment Name: At_Germinating_Seeds_Sub_P Parameter: Organism Value: A. thaliana
  misc_feature: MA Experiment 20000307 PARAMETER Experiment Name: At_Germinating_Seeds_Sub_P Parameter: Plant Line Value: WS
  misc_feature: MA Experiment 20000307 PARAMETER Experiment Name: At_Germinating_Seeds_Sub_P Parameter: Tissue Value: Germinating Seeds
  misc_feature: MA Experiment ID: 20000315 Result: Down-regulated in Transcription
  misc_feature: MA Experiment 20000315 PARAMETER Experiment Name: At_14day_Shoots-Roots_Sub_P Parameter: Age (day) Value: 14
  misc_feature: MA Experiment 20000315 PARAMETER Experiment Name: At_14day_Shoots-Roots_Sub_P Parameter: Organism Value: A. thaliana
  misc_feature: MA Experiment 20000315 PARAMETER Experiment Name: At_14day_Shoots-Roots_Sub_P Parameter: Plant Line Value: WS
  misc_feature: MA Experiment 20000315 PARAMETER Experiment Name: At_14day_Shoots-Roots_Sub_P Parameter: Tissue Value: Shoots vs. Whole Plant
  misc_feature: MA Experiment ID: 20000328 Result: Down-regulated in Transcription
  misc_feature: MA Experiment 20000328 PARAMETER Experiment Name: At_42deg_Heat_Sub_P Parameter: Age (day) Value: 14
  misc_feature: MA Experiment 20000328 PARAMETER Experiment Name: At_42deg_Heat_Sub_P Parameter: Organism Value: A. thaliana
  misc_feature: MA Experiment 20000328 PARAMETER Experiment Name: At_42deg_Heat_Sub_P Parameter: Plant Line Value: WS
  misc_feature: MA Experiment 20000328 PARAMETER Experiment Name: At_42deg_Heat_Sub_P Parameter: Temperature (deg C) Value: 42 vs. 22
  misc_feature: MA Experiment 20000328 PARAMETER Experiment Name: At_42deg_Heat_Sub_P Parameter: Timepoint (hr) Value: 6
  misc_feature: MA Experiment 20000328 PARAMETER Experiment Name: At_42deg_Heat_Sub_P Parameter: Tissue Value: Aerial
atgtttaacttgatgagactaattcatcgatctttctcgtcgtctccaacaaactatgttcttcaaaccattcttccaatctctcaattatgctccaacggtcgtcttcaagaagctttactggagatggcgatgttaggtcccgagatggggttccatggttacgatgctttgttgaatgcgtgtttggacaaaagggctcttagagatggtcaaagagttcatgcccacatgatcaaaacccgttatttacccgccacttacctccgaactcgtctgcttatcttctatggtaaatgtgattgtttagaggatgcacggaaagtgctcgacgaaatgcctgagaagaatgtcgtttcctggactgctatgatctcgcgttattctcaaactgggcattcttctgaggctctcactgtttttgcagagatgatgagatcagatgggaaaccgaatgagttcactttcgctactgttcttacttcttgtatacgtgcttctgggttaggtcttggtaagcaaatccatggactcatagttaagtggaattacgattctcatatttttgttggaagctctcttcttgacatgtatgctaaagctggtcaaattaaagaagctcgtgagattttcgagtgtttgcctgagagagatgttgtctcatgtactgctattattgctggttatgcccaactaggtcttgatgaagaggcgttagagatgtttcatagactgcatagtgaaggaatgagtcccaattatgttacctatgctagtcttttgacagcattatctggacttgctttgctagatcatggcaagcaagctcattgccatgtcttgagacgtgaacttccgttttacgcggtccttcagaattctcttattgatatgtactcaaaatgtgggaatctttcttacgctagaaggctttttgataacatgcctgagaggacagcgatttcatggaatgcgatgcttgtgggatatagtaaacatgggttaggaagagaagttcttgaactttttagattgatgagagatgagaagagagtaaagcctgatgcagttacccttttggctgttttgtctggttgcagccatgggagaatggaagacacagggttgaatatatttgatggcatggtagcgggagaatacgggactaagcctggcactgagcattatggttgcatcgttgatatgcttggccgtgcgggtaggattgatgaggcatttgaattcatcaaaagaatgccatctaaaccaactgctggtgtcttgggttcccttttaggagcatgtagggttcacttatctgtggatattggcgaatctgtaggtcgcagactcattgagattgaaccagagaatgcagggaactatgtcatcctctctaatttgtatgcttcggctggaagatgggcagatgtaaacaatgtaagagctatgatgatgcagaaagctgttacaaaagaaccaggaagaagctggattcaacacgagcaaaccttacattacttccacgccaatgatcgtacccatccaagaagggaagaagtgttagctaaaatgaaagaaatatcgataaaaatgaagcaagctggttatgttcctgatcttagctgtgtgctatatgatgtggatgaagagcagaaggagaaaatgctacttggccacagtgagaaactagccttgacttttggtttgattgctactggtgaagggattccaattagagttttcaagaatctacgtatatgcgttgattgtcataacttcgccaagatcttctcaaaggtttttgaaagagaagtgtcattaagggataaaaacaggtttcatcaaattgtcgatggaatatgttcatgcggagattactggtga

SEQ ID NO: 72310 - protein, 628 aa, Arabidopsis thaliana
  peptide (1)..(628): Ceres Seq. ID no. 4929293
  misc_feature (357)..(391): Pfam Name: PPR repeat Pfam Description: PPR repeat
  misc_feature (9)..(627): Homolog of NCBI NO: 37534806 NR Description: putative PPR-repeat containing protein [Oryza
  misc_feature (27)..(628): Homolog of NCBI NO: 11281371 NR Description: hypothetical protein T8H10.30 - Arabidopsis >gi|6706414|emb|CAB66100.1| putative protein [Arabidopsis
  misc_feature (27)..(628): Homolog of NCBI NO: 30694644 NR Description: pentatricopeptide (PPR) repeat-containing protein
  misc_feature (27)..(628): Homolog of NCBI NO: 30794008 NR Description: unknown protein [Arabidopsis thaliana]
  misc_feature (55)..(628): Homolog of NCBI NO: 15229561 NR Description: hypothetical protein; protein id: At3g24000.1 thaliana] >gi|9294669|dbj|BAB03018.1| contains similarity to
  misc_feature (27)..(628): Homolog of NCBI NO: 15232648 NR Description: putative protein; protein id: At3g46790.1
  misc_feature (27)..(628): Homolog of NCBI NO: 9279668 NR Description: selenium-binding protein-like [Arabidopsis
  misc_feature (27)..(628): Homolog of NCBI NO: 15231617 NR Description: unknown protein; protein id: At3g26780.1
  misc_feature (46)..(628): Homolog of NCBI NO: 15223099 NR Description: unknown protein; protein id: At1g08070.1 thaliana] >gi|8778839|gb|AAF79838.1|AC026875_18 T6D22.15
  misc_feature (27)..(628): Homolog of NCBI NO: 15226200 NR Description: putative selenium-binding protein; protein id:
MFNLMRLIHRSFSSSPTNYVLQTILPISQLCSNGRLQEALLEMAMLGPEMGFHGYDALLNACLDKRALRDGQRVHAHMIKTRYLPATYLRTRLLIFYGKCDCLEDARKVLDEMPEKNVVSWTAMISRYSQTGHSSEALTVFAEMMRSDGKPNEFTFATVLTSCIRASGLGLGKQIHGLIVKWNYDSHIFVGSSLLDMYAKAGQIKEAREIFECLPERDVVSCTAIIAGYAQLGLDEEALEMFHRLHSEGMSPNYVTYASLLTALSGLALLDHGKQAHCHVLRRELPFYAVLQNSLIDMYSKCGNLSYARRLFDNMPERTAISWNAMLVGYSKHGLGREVLELFRLMRDEKRVKPDAVTLLAVLSGCSHGRMEDTGLNIFDGMVAGEYGTKPGTEHYGCIVDMLGRAGRIDEAFEFIKRMPSKPTAGVLGSLLGACRVHLSVDIGESVGRRLIEIEPENAGNYVILSNLYASAGRWADVNNVRAMMMQKAVTKEPGRSWIQHEQTLHYFHANDRTHPRREEVLAKMKEISIKMKQAGYVPDLSCVLYDVDEEQKEKMLLGHSEKLALTFGLIATGEGIPIRVFKNLRICVDCHNFAKIFSKVFEREVSLRDKNRFHQIVDGICSCGDYW

SEQ ID NO: 72311 - protein, 624 aa, Arabidopsis thaliana
  peptide (1)..(624): Ceres Seq. ID no. 4929294
  misc_feature (353)..(387): Pfam Name: PPR repeat Pfam Description: PPR repeat
  misc_feature (5)..(623): Homolog of NCBI NO: 37534806 NR Description: putative PPR-repeat containing protein [Oryza
  misc_feature (23)..(624): Homolog of NCBI NO: 11281371 NR Description: hypothetical protein T8H10.30 - Arabidopsis >gi|6706414|emb|CAB66100.1| putative protein [Arabidopsis
  misc_feature (23)..(624): Homolog of NCBI NO: 30694644 NR Description: pentatricopeptide (PPR) repeat-containing protein
  misc_feature (23)..(624): Homolog of NCBI NO: 30794008 NR Description: unknown protein [Arabidopsis thaliana]
  misc_feature (51)..(624): Homolog of NCBI NO: 15229561 NR Description: hypothetical protein; protein id: At3g24000.1 thaliana] >gi|9294669|dbj|BAB03018.1| contains similarity to
  misc_feature (23)..(624): Homolog of NCBI NO: 15232648 NR Description: putative protein; protein id: At3g46790.1
  misc_feature (23)..(624): Homolog of NCBI NO: 9279668 NR Description: selenium-binding protein-like [Arabidopsis
  misc_feature (23)..(624): Homolog of NCBI NO: 15231617 NR Description: unknown protein; protein id: At3g26780.1
  misc_feature (42)..(624): Homolog of NCBI NO: 15223099 NR Description: unknown protein; protein id: At1g08070.1 thaliana] >gi|8778839|gb|AAF79838.1|AC026875_18 T6D22.15
  misc_feature (23)..(624): Homolog of NCBI NO: 15226200 NR Description: putative selenium-binding protein; protein id:
MRLIHRSFSSSPTNYVLQTILPISQLCSNGRLQEALLEMAMLGPEMGFHGYDALLNACLDKRALRDGQRVHAHMIKTRYLPATYLRTRLLIFYGKCDCLEDARKVLDEMPEKNVVSWTAMISRYSQTGHSSEALTVFAEMMRSDGKPNEFTFATVLTSCIRASGLGLGKQIHGLIVKWNYDSHIFVGSSLLDMYAKAGQIKEAREIFECLPERDVVSCTAIIAGYAQLGLDEEALEMFHRLHSEGMSPNYVTYASLLTALSGLALLDHGKQAHCHVLRRELPFYAVLQNSLIDMYSKCGNLSYARRLFDNMPERTAISWNAMLVGYSKHGLGREVLELFRLMRDEKRVKPDAVTLLAVLSGCSHGRMEDTGLNIFDGMVAGEYGTKPGTEHYGCIVDMLGRAGRIDEAFEFIKRMPSKPTAGVLGSLLGACRVHLSVDIGESVGRRLIEIEPENAGNYVILSNLYASAGRWADVNNVRAMMMQKAVTKEPGRSWIQHEQTLHYFHANDRTHPRREEVLAKMKEISIKMKQAGYVPDLSCVLYDVDEEQKEKMLLGHSEKLALTFGLIATGEGIPIRVFKNLRICVDCHNFAKIFSKVFEREVSLRDKNRFHQIVDGICSCGDYW

SEQ ID NO: 72312 - protein, 586 aa, Arabidopsis thaliana
  peptide (1)..(586): Ceres Seq. ID no. 4929295
  misc_feature (315)..(349): Pfam Name: PPR repeat Pfam Description: PPR repeat
  misc_feature (1)..(585): Homolog of NCBI NO: 37534806 NR Description: putative PPR-repeat containing protein [Oryza
  misc_feature (1)..(586): Homolog of NCBI NO: 11281371 NR Description: hypothetical protein T8H10.30 - Arabidopsis >gi|6706414|emb|CAB66100.1| putative protein [Arabidopsis
  misc_feature (1)..(586): Homolog of NCBI NO: 30794008 NR Description: unknown protein [Arabidopsis thaliana]
  misc_feature (1)..(586): Homolog of NCBI NO: 30694644 NR Description: pentatricopeptide (PPR) repeat-containing protein
  misc_feature (13)..(586): Homolog of NCBI NO: 15229561 NR Description: hypothetical protein; protein id: At3g24000.1 thaliana] >gi|9294669|dbj|BAB03018.1| contains similarity to
  misc_feature (1)..(586): Homolog of NCBI NO: 15232648 NR Description: putative protein; protein id: At3g46790.1
  misc_feature (1)..(586): Homolog of NCBI NO: 9279668 NR Description: selenium-binding protein-like [Arabidopsis
  misc_feature (1)..(586): Homolog of NCBI NO: 15231617 NR Description: unknown protein; protein id: At3g26780.1
  misc_feature (4)..(586): Homolog of NCBI NO: 15223099 NR Description: unknown protein; protein id: At1g08070.1 thaliana] >gi|8778839|gb|AAF79838.1|AC026875_18 T6D22.15
  misc_feature (1)..(586): Homolog of NCBI NO: 15226200 NR Description: putative selenium-binding protein; protein id:
MAMLGPEMGFHGYDALLNACLDKRALRDGQRVHAHMIKTRYLPATYLRTRLLIFYGKCDCLEDARKVLDEMPEKNVVSWTAMISRYSQTGHSSEALTVFAEMMRSDGKPNEFTFATVLTSCIRASGLGLGKQIHGLIVKWNYDSHIFVGSSLLDMYAKAGQIKEAREIFECLPERDVVSCTAIIAGYAQLGLDEEALEMFHRLHSEGMSPNYVTYASLLTALSGLALLDHGKQAHCHVLRRELPFYAVLQNSLIDMYSKCGNLSYARRLFDNMPERTAISWNAMLVGYSKHGLGREVLELFRLMRDEKRVKPDAVTLLAVLSGCSHGRMEDTGLNIFDGMVAGEYGTKPGTEHYGCIVDMLGRAGRIDEAFEFIKRMPSKPTAGVLGSLLGACRVHLSVDIGESVGRRLIEIEPENAGNYVILSNLYASAGRWADVNNVRAMMMQKAVTKEPGRSWIQHEQTLHYFHANDRTHPRREEVLAKMKEISIKMKQAGYVPDLSCVLYDVDEEQKEKMLLGHSEKLALTFGLIATGEGIPIRVFKNLRICVDCHNFAKIFSKVFEREVSLRDKNRFHQIVDGICSCGDYW

SEQ ID NO: 72313 - DNA, 1134 bp, Arabidopsis thaliana
  misc_feature (1)..(1134): Ceres Seq. ID no. 4929400
  misc_feature: MA Experiment ID: 20000314 Result: Up-regulated in Transcription
  misc_feature: MA Experiment 20000314 PARAMETER Experiment Name: At_14day_Shoots-Roots_Sub_P Parameter: Age (day) Value: 14
  misc_feature: MA Experiment 20000314 PARAMETER Experiment Name: At_14day_Shoots-Roots_Sub_P Parameter: Organism Value: A. thaliana
  misc_feature: MA Experiment 20000314 PARAMETER Experiment Name: At_14day_Shoots-Roots_Sub_P Parameter: Plant Line Value: WS
  misc_feature: MA Experiment 20000314 PARAMETER Experiment Name: At_14day_Shoots-Roots_Sub_P Parameter: Tissue Value: Roots vs. Whole Plant
atggcaagtcctagatttaattccatcatcatcatcttattcatctgcactataagcttatcgatcgtctcgatttcttgcaaagaagatcttaaaacgaaccaagccgccttgtttgcgtttggagattctctgtttgaagccggaaacaataattacttcgactctatctcaagtttccgatcaaatttctggccgtatggtaaaacaacgttcaagtttccaacgggacgggtctctgatggacgaataatgatagattttattgctgaatacgcatggttaccgttgatcccgccaaatctacaacctggttacagtaacagtcaactaacctatggacttaatttcgctactacagccgccggagttttcgccggaacttttcccggatcggtaactaatctctcgaaagatttgggaacacagttaaacaacttcaagaacgtggagaaaacgttgaggtctaatttaggagatgcagaggcgaggagagtaatctcgaaagctgtttatctttttcacataggagcaaatgactatcaatacccattctttgcaaatacctcaacttttagtaacactaccaaagaaagattcatcgatttcgtcatcggtaacacaacgactgtaatcgaggagttgtataaattaggagcaaggaaattcggattcttgagcttgggtccatttggttgtacaccaagcgcattgataataaacagtacaaagataggatcttgtttcgagccagtcacagagctgatcaatctccataaccaagaatttccaaaagtcttgaggcgtctagagcgccggttatccggattcaaatacgctcttcatgactttcacacttctctatcccaaagaatcaacaatccttctcgttacggttttaaggaaggggagatggcatgttgcgggagtgggccgttgaggggaatcaatacatgtggattccgaaatggaccatcgcaaggttacaagctatgcgaaaacgctgatgattacgtcttctttgatccttctcatttgacggaaacggctcatcaacagatcgctgagctgatttggagcggaccacctaatgtcactgcaccttacaatcttaaaacattgttcagactctag

SEQ ID NO: 72314 - protein, 377 aa, Arabidopsis thaliana
  peptide (1)..(377): Ceres Seq. ID no. 4929401
  misc_feature (38)..(358): Pfam Name: GDSL-like Lipase/Acylhydrolase Pfam Description: GDSL-like Lipase/Acylhydrolase
  misc_feature (1)..(377): Homolog of NCBI NO: 15231809 NR Description: unknown protein; protein id: At3g14225.1
  misc_feature (84)..(377): Homolog of NCBI NO: 25405682 NR Description: hypothetical protein F15I1.7 [imported] - thaliana >gi|4587540|gb|AAD25771.1|AC006577_7 Belongs to the
  misc_feature (9)..(89): Homolog of NCBI NO: 25405682 NR Description: hypothetical protein F15I1.7 [imported] - thaliana >gi|4587540|gb|AAD25771.1|AC006577_7 Belongs to the
  misc_feature (9)..(377): Homolog of NCBI NO: 15221018 NR Description: lipase, putative; protein id: At1g53990.1
  misc_feature (1)..(377): Homolog of NCBI NO: 21358785 NR Description: lipase SIL1 [Brassica rapa subsp. pekinensis]
  misc_feature (8)..(377): Homolog of NCBI NO: 25336255 NR Description: hypothetical protein F15I1.2 [imported] - thaliana >gi|4587535|gb|AAD25766.1|AC006577_2 Belongs to the
  misc_feature (7)..(377): Homolog of NCBI NO: 15237530 NR Description: GDSL-motif lipase/hydrolase-like protein; protein
  misc_feature (8)..(364): Homolog of NCBI NO: 15220995 NR Description: lipase, putative; protein id: At1g53940.1
  misc_feature (12)..(377): Homolog of NCBI NO: 25336254 NR Description: hypothetical protein T18A20.15 [imported] -
  misc_feature (12)..(377): Homolog of NCBI NO: 30695607 NR Description: GDSL-motif lipase/hydrolase protein [Arabidopsis
MASPRFNSIIIILFICTISLSIVSISCKEDLKTNQAALFAFGDSLFEAGNNNYFDSISSFRSNFWPYGKTTFKFPTGRVSDGRIMIDFIAEYAWLPLIPPNLQPGYSNSQLTYGLNFATTAAGVFAGTFPGSVTNLSKDLGTQLNNFKNVEKTLRSNLGDAEARRVISKAVYLFHIGANDYQYPFFANTSTFSNTTKERFIDFVIGNTTTVIEELYKLGARKFGFLSLGPFGCTPSALIINSTKIGSCFEPVTELINLHNQEFPKVLRRLERRLSGFKYALHDFHTSLSQRINNPSRYGFKEGEMACCGSGPLRGINTCGFRNGPSQGYKLCENADDYVFFDPSHLTETAHQQIAELIWSGPPNVTAPYNLKTLFRL

SEQ ID NO: 72315 - protein, 293 aa, Arabidopsis thaliana
  peptide (1)..(293): Ceres Seq. ID no. 4929402
  misc_feature (1)..(274): Pfam Name: GDSL-like Lipase/Acylhydrolase Pfam Description: GDSL-like Lipase/Acylhydrolase
  misc_feature (1)..(293): Homolog of NCBI NO: 15231809 NR Description: unknown protein; protein id: At3g14225.1
  misc_feature (1)..(293): Homolog of NCBI NO: 25405682 NR Description: hypothetical protein F15I1.7 [imported] - thaliana >gi|4587540|gb|AAD25771.1|AC006577_7 Belongs to the
  misc_feature (1)..(293): Homolog of NCBI NO: 15221018 NR Description: lipase, putative; protein id: At1g53990.1
  misc_feature (1)..(293): Homolog of NCBI NO: 21358785 NR Description: lipase SIL1 [Brassica rapa subsp. pekinensis]
  misc_feature (1)..(293): Homolog of NCBI NO: 25336255 NR Description: hypothetical protein F15I1.2 [imported] - thaliana >gi|4587535|gb|AAD25766.1|AC006577_2 Belongs to the
  misc_feature (1)..(293): Homolog of NCBI NO: 15237530 NR Description: GDSL-motif lipase/hydrolase-like protein; protein
  misc_feature (1)..(280): Homolog of NCBI NO: 15220995 NR Description: lipase, putative; protein id: At1g53940.1
  misc_feature (1)..(293): Homolog of NCBI NO: 25336254 NR Description: hypothetical protein T18A20.15 [imported] -
  misc_feature (1)..(293): Homolog of NCBI NO: 30695607 NR Description: GDSL-motif lipase/hydrolase protein [Arabidopsis
  misc_feature (1)..(291): Homolog of NCBI NO: 31616513 NR Description: GDSL-lipase [Chenopodium rubrum]
MIDFIAEYAWLPLIPPNLQPGYSNSQLTYGLNFATTAAGVFAGTFPGSVTNLSKDLGTQLNNFKNVEKTLRSNLGDAEARRVISKAVYLFHIGANDYQYPFFANTSTFSNTTKERFIDFVIGNTTTVIEELYKLGARKFGFLSLGPFGCTPSALIINSTKIGSCFEPVTELINLHNQEFPKVLRRLERRLSGFKYALHDFHTSLSQRINNPSRYGFKEGEMACCGSGPLRGINTCGFRNGPSQGYKLCENADDYVFFDPSHLTETAHQQIAELIWSGPPNVTAPYNLKTLFRL

SEQ ID NO: 72316 - DNA, 1695 bp, Arabidopsis thaliana
  misc_feature (1)..(1695): Ceres Seq. ID no. 4929461
  misc_feature: MA Experiment ID: 108434 Result: Down-regulated in Transcription
  misc_feature: MA Experiment 108434 PARAMETER Experiment Name: At_Root_Tips_cDNA_P Parameter: Tissue Value: Root Tips
  misc_feature: MA Experiment ID: 108435 Result: Down-regulated in Transcription
  misc_feature: MA Experiment 108435 PARAMETER Experiment Name: At_stm_Mutants_cDNA_P Parameter: Plant Line Value: wt Landsburg vs stm
  misc_feature: MA Experiment 108435 PARAMETER Experiment Name: At_stm_Mutants_cDNA_P Parameter: Tissue Value: Shoot Apical Meristem Region
  misc_feature: MA Experiment ID: 20000111 Result: Down-regulated in Transcription
  misc_feature: MA Experiment 20000111 PARAMETER Experiment Name: At_42deg_Heat_cDNA_P Parameter: Temperature (deg C) Value: 42 vs. 22
  misc_feature: MA Experiment 20000111 PARAMETER Experiment Name: At_42deg_Heat_cDNA_P Parameter: Timepoint (hr) Value: 6
  misc_feature: MA Experiment 20000111 PARAMETER Experiment Name: At_42deg_Heat_cDNA_P Parameter: Tissue Value: Aerial
  misc_feature: MA Experiment ID: 20000113 Result: Down-regulated in Transcription
  misc_feature: MA Experiment 20000113 PARAMETER Experiment Name: At_42deg_Heat_cDNA_P Parameter: Temperature (deg C) Value: 42 vs. 22
  misc_feature: MA Experiment 20000113 PARAMETER Experiment Name: At_42deg_Heat_cDNA_P Parameter: Timepoint (hr) Value: 8
  misc_feature: MA Experiment 20000113 PARAMETER Experiment Name: At_42deg_Heat_cDNA_P Parameter: Tissue Value: Aerial
  misc_feature: MA Experiment ID: 20000173 Result: Down-regulated in Transcription
  misc_feature: MA Experiment 20000173 PARAMETER Experiment Name: At_42deg_Heat_P Parameter: Age (day) Value: 14
  misc_feature: MA Experiment 20000173 PARAMETER Experiment Name: At_42deg_Heat_P Parameter: Organism Value: A. thaliana
  misc_feature: MA Experiment 20000173 PARAMETER Experiment Name: At_42deg_Heat_P Parameter: Plant Line Value: WS
  misc_feature: MA Experiment 20000173 PARAMETER Experiment Name: At_42deg_Heat_P Parameter: Temperature (deg C) Value: 42 vs. 22
  misc_feature: MA Experiment 20000173 PARAMETER Experiment Name: At_42deg_Heat_P Parameter: Timepoint (hr) Value: 6
  misc_feature: MA Experiment 20000173 PARAMETER Experiment Name: At_42deg_Heat_P Parameter: Tissue Value: Aerial
  misc_feature: MA Experiment ID: 20000224 Result: Up-regulated in Transcription
  misc_feature: MA Experiment ID: 20000264 Result: Down-regulated in Transcription
  misc_feature: MA Experiment 20000264 PARAMETER Experiment Name: At_Open_Flower_P Parameter: Age (day) Value: 21
  misc_feature: MA Experiment 20000264 PARAMETER Experiment Name: At_Open_Flower_P Parameter: Plant Line Value: WS
  misc_feature: MA Experiment 20000264 PARAMETER Experiment Name: At_Open_Flower_P Parameter: Tissue Value: Open Flower vs. Whole Plant
  misc_feature: MA Experiment ID: 20000437 Result: Up-regulated in Transcription
  misc_feature: MA Experiment 20000437 PARAMETER Experiment Name: At_Drought_P Parameter: Age (day) Value: 8
  misc_feature: MA Experiment 20000437 PARAMETER Experiment Name: At_Drought_P Parameter: Organism Value: A. thaliana
  misc_feature: MA Experiment 20000437 PARAMETER Experiment Name: At_Drought_P Parameter: Plant Line Value: WS
  misc_feature: MA Experiment 20000437 PARAMETER Experiment Name: At_Drought_P Parameter: Timepoint (hr) Value: 24
  misc_feature: MA Experiment 20000437 PARAMETER Experiment Name: At_Drought_P Parameter: Tissue Value: Whole Plant
  misc_feature: MA Experiment 20000437 PARAMETER Experiment Name: At_Drought_P Parameter: Treatment Value: Drought vs. No Drought
  misc_feature: MA Experiment ID: 20000496 Result: Down-regulated in Transcription
  misc_feature: MA Experiment 20000496 PARAMETER Experiment Name: At_Guard_Cells_P Parameter: Harvest Date Value: 7/19/2002
  misc_feature: MA Experiment 20000496 PARAMETER Experiment Name: At_Guard_Cells_P Parameter: Organism Value: Canola
  misc_feature: MA Experiment 20000496 PARAMETER Experiment Name: At_Guard_Cells_P Parameter: Tissue Value: Guard Cells vs. Leaves
  misc_feature: MA Experiment ID: 20000709 Result: Up-regulated in Transcription
  misc_feature: MA Experiment 20000709 PARAMETER Experiment Name: At_15mM_NH4NO3_L-to-H_P Parameter: Age (hr) Value: 14
  misc_feature: MA Experiment 20000709 PARAMETER Experiment Name: At_15mM_NH4NO3_L-to-H_P Parameter: Organism Value: A. thaliana
  misc_feature: MA Experiment 20000709 PARAMETER Experiment Name: At_15mM_NH4NO3_L-to-H_P Parameter: Plant Line Value: WS
  misc_feature: MA Experiment 20000709 PARAMETER Experiment Name: At_15mM_NH4NO3_L-to-H_P Parameter: Timepoint (hr) Value: 4
  misc_feature: MA Experiment 20000709 PARAMETER Experiment Name: At_15mM_NH4NO3_L-to-H_P Parameter: Tissue Value: Aerial
  misc_feature: MA Experiment 20000709 PARAMETER Experiment Name: At_15mM_NH4NO3_L-to-H_P Parameter: Treatment Value: 15mM NH4NO3 vs. 30mM Mannitol
  misc_feature: MA Experiment ID: 20000794 Result: Down-regulated in Transcription
  misc_feature: MA Experiment 20000794 PARAMETER Experiment Name: At_Petals_P Parameter: Age (day) Value: 23-25 days
  misc_feature: MA Experiment 20000794 PARAMETER Experiment Name: At_Petals_P Parameter: Plant Line Value: WS
  misc_feature: MA Experiment 20000794 PARAMETER Experiment Name: At_Petals_P Parameter: Tissue Value: Petals vs. Whole plant
  misc_feature: MA Experiment ID: 20001911 Result: Up-regulated in Transcription
  misc_feature: MA Experiment 20001911 PARAMETER Experiment Name: At_Drought_Reproduction_P Parameter: Age (day) Value: 40
  misc_feature: MA Experiment 20001911 PARAMETER Experiment Name: At_Drought_Reproduction_P Parameter: Organism Value: A. thaliana
  misc_feature: MA Experiment 20001911 PARAMETER Experiment Name: At_Drought_Reproduction_P Parameter: Plant Line Value: WS
  misc_feature: MA Experiment 20001911 PARAMETER Experiment Name: At_Drought_Reproduction_P Parameter: Timepoint (day) Value: 10
  misc_feature: MA Experiment 20001911 PARAMETER Experiment Name: At_Drought_Reproduction_P Parameter: Tissue Value: Flowers
  misc_feature: MA Experiment 20001911 PARAMETER Experiment Name: At_Drought_Reproduction_P Parameter: Treatment Value: Drought vs. No Drought
atcctgagaatggtcacaaattctctacctctctctctctctctctctggtagagaaaatggagatatcagttgcatcggtaacagtttctgtagctgtagttgttgtgtcatggtgggtatggagaactttacagcgggtttggcttaaaccaaagatgcttgagagttacctgagaagacaaggtcttgccggaactccttacacgcctcttgtcggtgatttgaagagaaattttagcatgctggctgaggcaagatccaaacccatcaacctaacagatgatatcacaccacgtatcgtgccttatccgttgcaaatgctcaagactcatgggaggactttctttacatggtttggacccataccaacaatcaccataatggatcctgagcaaatcaaagaagtgttcaacaaagtttatgatttccagaaggcacatacgtttcctctgggcagattaatagcggctggactcgttagttatgatggtgataaatggacaaaacaccgaagaatcatcaacccggctttccaccttgagaagatcaaaaatatggtacctgcgttccaccagagctgcagcgagattgttggcgaatgggacaagttagtgacggataaacagtcatcctgtgaggtggatatttggccttggcttgtgagtatgactgcagatgtgatctcccgtactgcatttggcagcagctacaaagaagggcagaggatatttgagctccaagcggaattagcacagctcatcattcaagcttttcggaaagctattatccctggatatcgttatttccctacaaagggtaatagaaggatgaaagcagcagctagagaaatcaaatttatactgagagggatcgttaacaaaaggcttagggcaagagaagctggggaagcaccaagtgacgatttgctgggtatacttcttgaatcgaatttgggacaaacaaaaggaaatggaatgagtaccgaggaactgatggaggagtgcaagttgttctatttcgctgggcaagagactactacagtacttctggtttggacaatggtgttgttaagccaacaccaagattggcaggctcgtgcaagagaagaagtgaagcaagtttttggcgataaagaacctgatgcagaaggcttgaaccagctcaaagttgtaagtaaaccgaaccaaaaaccttcaagtgacgtgagttcttttgttgcattgaagctgaaaatttgatccctcacagatgacgatgatattatatgaagtccttaggctatatcctccagtagtccagctgacccgagccattcacaaagagatgcagctaggtgacctgacactaccaggcggcgttcagataagtctaccaattctgctaatccaacgcgacagggagctgtggggaaacgatgcaggggagttcaagccagatagattcaaagacggtctctcaaaggcaacaaagaaccaagtctccttctttccttttgcgtggggaccgaggatctgcattggccaaaattttgcactgcttgaggcaaagatggcaatgacactgattctacggaaattctcctttgagctttctccttcttatgttcacgcgccttacacagtcctcactactcacccacagttcggtgctcctcttatcttgcacaagctctaatcgtataaactccttgttc

SEQ ID NO: 72317 - protein, 393 aa, Arabidopsis thaliana
  peptide (1)..(393): Ceres Seq. ID no. 4929462
  misc_feature (90)..(373): Pfam Name: Cytochrome P450 Pfam Description: Cytochrome P450
  misc_feature (1)..(373): Homolog of NCBI NO: 15231903 NR Description: cytochrome P450, putative; protein id: supported by cDNA: gi_18086481 [Arabidopsis thaliana] cytochrome P450 [Arabidopsis thaliana]
  misc_feature (1)..(373): Homolog of NCBI NO: 15231901 NR Description: cytochrome P450, putative; protein id: [Arabidopsis thaliana] >gi|9294387|dbj|BAB02397.1| cytochrome
  misc_feature (1)..(373): Homolog of NCBI NO: 15231907 NR Description: cytochrome P450, putative; protein id: supported by cDNA: gi_15292786, supported by cDNA: gi_20465786 thaliana] >gi|9294391|dbj|BAB02401.1| cytochrome P450
  misc_feature (1)..(373): Homolog of NCBI NO: 15231906 NR Description: cytochrome P450, putative; protein id: supported by cDNA: gi_13605896 [Arabidopsis thaliana] cytochrome P450 [Arabidopsis thaliana]
  misc_feature (1)..(373): Homolog of NCBI NO: 15231899 NR Description: cytochrome P450, putative; protein id:
  misc_feature (1)..(373): Homolog of NCBI NO: 9294386 NR Description: cytochrome P450 [Arabidopsis thaliana]
  misc_feature (5)..(373): Homolog of NCBI NO: 15231889 NR Description: cytochrome P450, putative; protein id: supported by cDNA: gi_18252154 [Arabidopsis thaliana] cytochrome P450 [Arabidopsis thaliana]
  misc_feature (1)..(373): Homolog of NCBI NO: 15231897 NR Description: cytochrome P450, putative; protein id:
  misc_feature (114)..(373): Homolog of NCBI NO: 9294385 NR Description: cytochrome P450-like protein [Arabidopsis
  misc_feature (1)..(56): Homolog of NCBI NO: 9294385 NR Description: cytochrome P450-like protein [Arabidopsis
MEISVASVTVSVAVVVVSWWVWRTLQRVWLKPKMLESYLRRQGLAGTPYTPLVGDLKRNFSMLAEARSKPINLTDDITPRIVPYPLQMLKTHGRTFFTWFGPIPTITIMDPEQIKEVFNKVYDFQKAHTFPLGRLIAAGLVSYDGDKWTKHRRIINPAFHLEKIKNMVPAFHQSCSEIVGEWDKLVTDKQSSCEVDIWPWLVSMTADVISRTAFGSSYKEGQRIFELQAELAQLIIQAFRKAIIPGYRYFPTKGNRRMKAAAREIKFILRGIVNKRLRAREAGEAPSDDLLGILLESNLGQTKGNGMSTEELMEECKLFYFAGQETTTVLLVWTMVLLSQHQDWQARAREEVKQVFGDKEPDAEGLNQLKVVSKPNQKPSSDVSSFVALKLKI

SEQ ID NO: 72318 - protein, 360 aa, Arabidopsis thaliana
  peptide (1)..(360): Ceres Seq. ID no. 4929463
  misc_feature (57)..(340): Pfam Name: Cytochrome P450 Pfam Description: Cytochrome P450
  misc_feature (1)..(340): Homolog of NCBI NO: 15231903 NR Description: cytochrome P450, putative; protein id: supported by cDNA: gi_18086481 [Arabidopsis thaliana] cytochrome P450 [Arabidopsis thaliana]
  misc_feature (1)..(340): Homolog of NCBI NO: 15231901 NR Description: cytochrome P450, putative; protein id: [Arabidopsis thaliana] >gi|9294387|dbj|BAB02397.1| cytochrome
  misc_feature (1)..(340): Homolog of NCBI NO: 15231907 NR Description: cytochrome P450, putative; protein id: supported by cDNA: gi_15292786, supported by cDNA: gi_20465786 thaliana] >gi|9294391|dbj|BAB02401.1| cytochrome P450
  misc_feature (1)..(340): Homolog of NCBI NO: 15231906 NR Description: cytochrome P450, putative; protein id: supported by cDNA: gi_13605896 [Arabidopsis thaliana] cytochrome P450 [Arabidopsis thaliana]
  misc_feature (1)..(340): Homolog of NCBI NO: 15231899 NR Description: cytochrome P450, putative; protein id:
  misc_feature (1)..(340): Homolog of NCBI NO: 9294386 NR Description: cytochrome P450 [Arabidopsis thaliana]
  misc_feature (1)..(340): Homolog of NCBI NO: 15231889 NR Description: cytochrome P450, putative; protein id: supported by cDNA: gi_18252154 [Arabidopsis thaliana] cytochrome P450 [Arabidopsis thaliana]
  misc_feature (1)..(340): Homolog of NCBI NO: 15231897 NR Description: cytochrome P450, putative; protein id:
  misc_feature (81)..(340): Homolog of NCBI NO: 9294385 NR Description: cytochrome P450-like protein [Arabidopsis
  misc_feature (1)..(23): Homolog of NCBI NO: 9294385 NR Description: cytochrome P450-like protein [Arabidopsis
MLESYLRRQGLAGTPYTPLVGDLKRNFSMLAEARSKPINLTDDITPRIVPYPLQMLKTHGRTFFTWFGPIPTITIMDPEQIKEVFNKVYDFQKAHTFPLGRLIAAGLVSYDGDKWTKHRRIINPAFHLEKIKNMVPAFHQSCSEIVGEWDKLVTDKQSSCEVDIWPWLVSMTADVISRTAFGSSYKEGQRIFELQAELAQLIIQAFRKAIIPGYRYFPTKGNRRMKAAAREIKFILRGIVNKRLRAREAGEAPSDDLLGILLESNLGQTKGNGMSTEELMEECKLFYFAGQETTTVLLVWTMVLLSQHQDWQARAREEVKQVFGDKEPDAEGLNQLKVVSKPNQKPSSDVSSFVALKLKI

SEQ ID NO: 72319 - protein, 332 aa, Arabidopsis thaliana
  peptide (1)..(332): Ceres Seq. ID no. 4929464
  misc_feature (29)..(312): Pfam Name: Cytochrome P450 Pfam Description: Cytochrome P450
  misc_feature (1)..(312): Homolog of NCBI NO: 15231903 NR Description: cytochrome P450, putative; protein id: supported by cDNA: gi_18086481 [Arabidopsis thaliana] cytochrome P450 [Arabidopsis thaliana]
  misc_feature (1)..(312): Homolog of NCBI NO: 15231901 NR Description: cytochrome P450, putative; protein id: [Arabidopsis thaliana] >gi|9294387|dbj|BAB02397.1| cytochrome
  misc_feature (1)..(312): Homolog of NCBI NO: 15231907 NR Description: cytochrome P450, putative; protein id: supported by cDNA: gi_15292786, supported by cDNA: gi_20465786 thaliana] >gi|9294391|dbj|BAB02401.1| cytochrome P450
  misc_feature (1)..(312): Homolog of NCBI NO: 15231906 NR Description: cytochrome P450, putative; protein id: supported by cDNA: gi_13605896 [Arabidopsis thaliana] cytochrome P450 [Arabidopsis thaliana]
  misc_feature (1)..(312): Homolog of NCBI NO: 15231899 NR Description: cytochrome P450, putative; protein id:
  misc_feature (1)..(312): Homolog of NCBI NO: 9294386 NR Description: cytochrome P450 [Arabidopsis thaliana]
  misc_feature (1)..(312): Homolog of NCBI NO: 15231889 NR Description: cytochrome P450, putative; protein id: supported by cDNA: gi_18252154 [Arabidopsis thaliana] cytochrome P450 [Arabidopsis thaliana]
  misc_feature (1)..(312): Homolog of NCBI NO: 15231897 NR Description: cytochrome P450, putative; protein id:
  misc_feature (53)..(312): Homolog of NCBI NO: 9294385 NR Description: cytochrome P450-like protein [Arabidopsis
  misc_feature (1)..(312): Homolog of NCBI NO: 15231895 NR Description: cytochrome P450, putative; protein id: supported by cDNA: gi_15529168, supported by cDNA: gi_17386113 thaliana] >gi|9294384|dbj|BAB02394.1| cytochrome P450
MLAEARSKPINLTDDITPRIVPYPLQMLKTHGRTFFTWFGPIPTITIMDPEQIKEVFNKVYDFQKAHTFPLGRLIAAGLVSYDGDKWTKHRRIINPAFHLEKIKNMVPAFHQSCSEIVGEWDKLVTDKQSSCEVDIWPWLVSMTADVISRTAFGSSYKEGQRIFELQAELAQLIIQAFRKAIIPGYRYFPTKGNRRMKAAAREIKFILRGIVNKRLRAREAGEAPSDDLLGILLESNLGQTKGNGMSTEELMEECKLFYFAGQETTTVLLVWTMVLLSQHQDWQARAREEVKQVFGDKEPDAEGLNQLKVVSKPNQKPSSDVSSFVALKLKI

SEQ ID NO: 72320 - DNA, 2967 bp, Arabidopsis thaliana
  misc_feature (1)..(2967): Ceres Seq. ID no. 4929535
  misc_feature: MA Experiment ID: 20000355 Result: Down-regulated in Transcription
  misc_feature: MA Experiment 20000355 PARAMETER Experiment Name: At_Siliques_Sub_P Parameter: Age (day) Value: 21
  misc_feature: MA Experiment 20000355 PARAMETER Experiment Name: At_Siliques_Sub_P Parameter: Organism Value: A. thaliana
  misc_feature: MA Experiment 20000355 PARAMETER Experiment Name: At_Siliques_Sub_P Parameter: Plant Line Value: WS
  misc_feature: MA Experiment 20000355 PARAMETER Experiment Name: At_Siliques_Sub_P Parameter: Tissue Value: Less Than 5mm Siliques vs. Whole Plant
  misc_feature: Pfam Name: Pkinase Pfam Description: Protein kinase domain
atgtcgttaaatcgacaacttctattcacttactacttcatcgtctctcttatcctcttctccgatttcgtatcctctgcaacattaccaaaagaagaagtggatgctttacaaagcgtcgcgacggcgttgaagaagagtaattggaatttcagtgtggatccatgtgacgaaaccttgtctgaaggcggatggaggaatcctaacgccgctaagggattcgaagacgccgttacttgtaactgctcctccgtcatctgccacgtcaccaacatagttctcaaggcacaagaccttcaaggatctcttcctacagatctttcaggacttcctttcttgcaagagcttgatctgactagaaactatctcaacggttccattcctcccgaatggggagcctcatcacttctaaacatctcactacttggaaaccggataagtggttcaatcccaaaagaacttggaaaccttacaaccctttctggtcttgtcttggaatacaaccaactctcagggaagatacctccagagctcgggaatctaccaaaccttaaaagactctcgaataacttgagcggggaaatcccaagtacattcgccaaacttactacgttgactgatttacgtattagtgacaaccagttcactggtgctataccagatttcatccagaactggaaaggactagagaaactggttattcaagcaagtggtttagttggaccgattcctagtgccattggtcttctgggaaccttgacagacttgagaatcactgacttgagtggacctgaatctccatttccgccactaagaaacatgacatcgatgaagtatttgattcttaggaactgtaaccttacaggagacttacctgcgtatcttggacagaatagaaaattaaagaatctagatcttagctttaacaaactgagtggaccaatcccagccacatattccggtctttcagatgtagatttcatatactttacaagtaacatgttaaatggacaagtaccaagttggatggtagaccaaggagacacgattgatattacttacaataacttctccaaagataaaaccgaagaatgtcaacaaaaatccgtgaacacgttttcaagcacaagccctttagtggcaaataactccaatgagactaagtatgatgctgacacatgggatacaccgggttactatgatagtaaaaacgggtgggtttctagcaacacgggaaacttcttggatgatgatcggactaacaatggaaaatcaaaatggtcgaattcatcagagcttaagataacaaattctagcatagattttaggctttacacacaagcgcgtctctcggctatctccctcacttaccaggcattgtgtcttggaaaaggaaactatacggttaatcttcatttcgctgaaattatgttcaatgaaaagaacatgtatagcaatttgggaagacgatacttcgacatatacgttcagggtaaacgtgaagtgaaagatttcaatatcgttgatgaagcaaaaggtgtgggaaaagctgttgttaagaaatttcctgtcatggttacaaatgggaaactggaaataagattgcagtgggctgggaaaggaactcaagctattcctgtgagaggtgtctatggtcctctcatatctgctgtatcggtagatccagattttattccaccaaaggaaccgggcactggaactggtggtggaagttctgttggtacagtggttggtagtgtaatcgcttctacggtgtttcttgtgcttttaatcggcggtatattatggtggagaggctgcttaagacccaagagtcagatggaaaaagatttcaagaacttagatttccagatcagttcgttctccttgaggcaaatcaaagttgccacggataactttgatcctgcaaacaagatcggagaaggtggttttggtcctgtacacaagggaataatgactgatggaactgtaatcgcggtgaagcagctatcggcaaaatcaaaacaagggaatcgagaattcttaaacgagattgctatgatttcggctctgcagcatccacatttggttaaactatatggatgttgcgttgaaggtgatcagctcctgctagtttacgagtacttggagaacaacagtctcgcgcgagctcttttcggacctcaagagactcagataccactaaattggccaatgaggcagaagatttgtgttggaatagcgagaggattagcttatctccacgaggaatcaagactcaagatcgtacacagagacatcaaagccactaatgtcttgctggataaggaactaaacccaaagatttcagattttgggcttgctaagcttgatgaagaagaaaacacacacatcagcacacgagtcgctggaacatatggatacatggctccagaatacgccatgagaggccatttgacagataaagccgacgtctacagttttggcgttgtggccctagaaatcgttcacggaaagagcaacacgagctcacgatctaaagctgataccttctaccttcttgactgggtgcacgttttaagggaacaaaacactctacttgaagtagtagatccaaggctaggaacagattacaacaaacaagaagcattgatgatgattcagatagggatgctctgtaccagtccagctccaggggatagaccttcgatgtcgacggtggtgagtatgctcgaaggccattcaacggtgaatgttgagaaacttcttgaagcttcggtcaacaatgaaaaggacgaagagagtgtgagagcgatgaaaaggcattacgccacgataggtgaggaggagataacgaacacgacaactaccgatggacctttcacgtcgtcttctacgtcaaccgccaacgccaacgatctttaccctgttaagctcgactctgcctattggaacactagaacttaa

SEQ ID NO: 72321 - protein, 988 aa, Arabidopsis thaliana
  peptide (1)..(988): Ceres Seq. ID no. 4929536
  misc_feature: Pfam Name: Pkinase Pfam Description: Protein kinase domain
  misc_feature (117)..(953): Homolog of NCBI NO: 15220901 NR Description: leucine-rich repeat transmembrane protein kinase,
  misc_feature (132)..(953): Homolog of NCBI NO: 25405986 NR Description: protein F12M16.30 [imported] - Arabidopsis >gi|7769864|gb|AAF69542.1|AC008007_17 F12M16.30 [Arabidopsis
  misc_feature (123)..(967): Homolog of NCBI NO: 25405630 NR Description: hypothetical protein T3F20.24 [imported] - thaliana >gi|8671882|gb|AAF78445.1|AC018748_24 Contains a weak
  misc_feature (1)..(980): Homolog of NCBI NO: 15220545 NR Description: receptor-like serine/threonine kinase, putative;
  misc_feature (34)..(986): Homolog of NCBI NO: 9972372 NR Description: Putative receptor-like serine/threonine kinase -
  misc_feature (1)..(562): Homolog of NCBI NO: 15220541 NR Description: receptor-like serine threonine kinase, putative; id: At1g29730.1 [Arabidopsis thaliana]
  misc_feature (607)..(917): Homolog of NCBI NO: 15220541 NR Description: receptor-like serine threonine kinase, putative; id: At1g29730.1 [Arabidopsis thaliana]
  misc_feature (30)..(515): Homolog of NCBI NO: 15222473 NR Description: leucine-rich repeat transmembrane protein kinase,
  misc_feature (539)..(973): Homolog of NCBI NO: 15222473 NR Description: leucine-rich repeat transmembrane protein kinase,
  misc_feature (86)..(967): Homolog of NCBI NO: 15220789 NR Description: receptor-like serine/threonine kinase, putative;
MSLNRQLLFTYYFIVSLILFSDFVSSATLPKEEVDALQSVATALKKSNWNFSVDPCDETLSEGGWRNPNAAKGFEDAVTCNCSSVICHVTNIVLKAQDLQGSLPTDLSGLPFLQELDLTRNYLNGSIPPEWGASSLLNISLLGNRISGSIPKELGNLTTLSGLVLEYNQLSGKIPPELGNLPNLKRLSNNLSGEIPSTFAKLTTLTDLRISDNQFTGAIPDFIQNWKGLEKLVIQASGLVGPIPSAIGLLGTLTDLRITDLSGPESPFPPLRNMTSMKYLILRNCNLTGDLPAYLGQNRKLKNLDLSFNKLSGPIPATYSGLSDVDFIYFTSNMLNGQVPSWMVDQGDTIDITYNNFSKDKTEECQQKSVNTFSSTSPLVANNSNETKYDADTWDTPGYYDSKNGWVSSNTGNFLDDDRTNNGKSKWSNSSELKITNSSIDFRLYTQARLSAISLTYQALCLGKGNYTVNLHFAEIMFNEKNMYSNLGRRYFDIYVQGKREVKDFNIVDEAKGVGKAVVKKFPVMVTNGKLEIRLQWAGKGTQAIPVRGVYGPLISAVSVDPDFIPPKEPGTGTGGGSSVGTVVGSVIASTVFLVLLIGGILWWRGCLRPKSQMEKDFKNLDFQISSFSLRQIKVATDNFDPANKIGEGGFGPVHKGIMTDGTVIAVKQLSAKSKQGNREFLNEIAMISALQHPHLVKLYGCCVEGDQLLLVYEYLENNSLARALFGPQETQIPLNWPMRQKICVGIARGLAYLHEESRLKIVHRDIKATNVLLDKELNPKISDFGLAKLDEEENTHISTRVAGTYGYMAPEYAMRGHLTDKADVYSFGVVALEIVHGKSNTSSRSKADTFYLLDWVHVLREQNTLLEVVDPRLGTDYNKQEALMMIQIGMLCTSPAPGDRPSMSTVVSMLEGHSTVNVEKLLEASVNNEKDEESVRAMKRHYATIGEEEITNTTTTDGPFTSSSTSTANANDLYPVKLDSAYWNTRT

SEQ ID NO: 72322 - protein, 715 aa, Arabidopsis thaliana
  peptide (1)..(715): Ceres Seq. ID no. 4929537
  misc_feature: Pfam Name: Pkinase Pfam Description: Protein kinase domain
  misc_feature (1)..(680): Homolog of NCBI NO: 15220901 NR Description: leucine-rich repeat transmembrane protein kinase,
  misc_feature (1)..(680): Homolog of NCBI NO: 25405986 NR Description: protein F12M16.30 [imported] - Arabidopsis >gi|7769864|gb|AAF69542.1|AC008007_17 F12M16.30 [Arabidopsis
  misc_feature (1)..(694): Homolog of NCBI NO: 25405630 NR Description: hypothetical protein T3F20.24 [imported] - thaliana >gi|8671882|gb|AAF78445.1|AC018748_24 Contains a weak
  misc_feature (1)..(707): Homolog of NCBI NO: 15220545 NR Description: receptor-like serine/threonine kinase, putative;
  misc_feature (1)..(713): Homolog of NCBI NO: 9972372 NR Description: Putative receptor-like serine/threonine kinase -
  misc_feature (1)..(289): Homolog of NCBI NO: 15220541 NR Description: receptor-like serine threonine kinase, putative; id: At1g29730.1 [Arabidopsis thaliana]
  misc_feature (334)..(644): Homolog of NCBI NO: 15220541 NR Description: receptor-like serine threonine kinase, putative; id: At1g29730.1 [Arabidopsis thaliana]
  misc_feature (1)..(242): Homolog of NCBI NO: 15222473 NR Description: leucine-rich repeat transmembrane protein kinase,
  misc_feature (266)..(700): Homolog of NCBI NO: 15222473 NR Description: leucine-rich repeat transmembrane protein kinase,
  misc_feature (1)..(694): Homolog of NCBI NO: 15220789 NR Description: receptor-like serine/threonine kinase, putative;
MTSMKYLILRNCNLTGDLPAYLGQNRKLKNLDLSFNKLSGPIPATYSGLSDVDFIYFTSNMLNGQVPSWMVDQGDTIDITYNNFSKDKTEECQQKSVNTFSSTSPLVANNSNETKYDADTWDTPGYYDSKNGWVSSNTGNFLDDDRTNNGKSKWSNSSELKITNSSIDFRLYTQARLSAISLTYQALCLGKGNYTVNLHFAEIMFNEKNMYSNLGRRYFDIYVQGKREVKDFNIVDEAKGVGKAVVKKFPVMVTNGKLEIRLQWAGKGTQAIPVRGVYGPLISAVSVDPDFIPPKEPGTGTGGGSSVGTVVGSVIASTVFLVLLIGGILWWRGCLRPKSQMEKDFKNLDFQISSFSLRQIKVATDNFDPANKIGEGGFGPVHKGIMTDGTVIAVKQLSAKSKQGNREFLNEIAMISALQHPHLVKLYGCCVEGDQLLLVYEYLENNSLARALFGPQETQIPLNWPMRQKICVGIARGLAYLHEESRLKIVHRDIKATNVLLDKELNPKISDFGLAKLDEEENTHISTRVAGTYGYMAPEYAMRGHLTDKADVYSFGVVALEIVHGKSNTSSRSKADTFYLLDWVHVLREQNTLLEVVDPRLGTDYNKQEALMMIQIGMLCTSPAPGDRPSMSTVVSMLEGHSTVNVEKLLEASVNNEKDEESVRAMKRHYATIGEEEITNTTTTDGPFTSSSTSTANANDLYPVKLDSAYWNTRT

SEQ ID NO: 72323 - protein, 712 aa, Arabidopsis thaliana
  peptide (1)..(712): Ceres Seq. ID no. 4929538
  misc_feature: Pfam Name: Pkinase Pfam Description: Protein kinase domain
  misc_feature (1)..(677): Homolog of NCBI NO: 15220901 NR Description: leucine-rich repeat transmembrane protein kinase,
  misc_feature (1)..(677): Homolog of NCBI NO: 25405986 NR Description: protein F12M16.30 [imported] - Arabidopsis >gi|7769864|gb|AAF69542.1|AC008007_17 F12M16.30 [Arabidopsis
  misc_feature (1)..(691): Homolog of NCBI NO: 25405630 NR Description: hypothetical protein T3F20.24 [imported] - thaliana >gi|8671882|gb|AAF78445.1|AC018748_24 Contains a weak
  misc_feature (1)..(704): Homolog of NCBI NO: 15220545 NR Description: receptor-like serine/threonine kinase, putative;
  misc_feature (1)..(710): Homolog of NCBI NO: 9972372 NR Description: Putative receptor-like serine/threonine kinase -
  misc_feature (1)..(286): Homolog of NCBI NO: 15220541 NR Description: receptor-like serine threonine kinase, putative; id: At1g29730.1 [Arabidopsis thaliana]
  misc_feature (331)..(641): Homolog of NCBI NO: 15220541 NR Description: receptor-like serine threonine kinase, putative; id: At1g29730.1 [Arabidopsis thaliana]
  misc_feature (1)..(239): Homolog of NCBI NO: 15222473 NR Description: leucine-rich repeat transmembrane protein kinase,
  misc_feature (263)..(697): Homolog of NCBI NO: 15222473 NR Description: leucine-rich repeat transmembrane protein kinase,
  misc_feature (1)..(691): Homolog of NCBI NO: 15220789 NR Description: receptor-like serine/threonine kinase, putative;
MKYLILRNCNLTGDLPAYLGQNRKLKNLDLSFNKLSGPIPATYSGLSDVDFIYFTSNMLNGQVPSWMVDQGDTIDITYNNFSKDKTEECQQKSVNTFSSTSPLVANNSNETKYDADTWDTPGYYDSKNGWVSSNTGNFLDDDRTNNGKSKWSNSSELKITNSSIDFRLYTQARLSAISLTYQALCLGKGNYTVNLHFAEIMFNEKNMYSNLGRRYFDIYVQGKREVKDFNIVDEAKGVGKAVVKKFPVMVTNGKLEIRLQWAGKGTQAIPVRGVYGPLISAVSVDPDFIPPKEPGTGTGGGSSVGTVVGSVIASTVFLVLLIGGILWWRGCLRPKSQMEKDFKNLDFQISSFSLRQIKVATDNFDPANKIGEGGFGPVHKGIMTDGTVIAVKQLSAKSKQGNREFLNEIAMISALQHPHLVKLYGCCVEGDQLLLVYEYLENNSLARALFGPQETQIPLNWPMRQKICVGIARGLAYLHEESRLKIVHRDIKATNVLLDKELNPKISDFGLAKLDEEENTHISTRVAGTYGYMAPEYAMRGHLTDKADVYSFGVVALEIVHGKSNTSSRSKADTFYLLDWVHVLREQNTLLEVVDPRLGTDYNKQEALMMIQIGMLCTSPAPGDRPSMSTVVSMLEGHSTVNVEKLLEASVNNEKDEESVRAMKRHYATIGEEEITNTTTTDGPFTSSSTSTANANDLYPVKLDSAYWNTRT

SEQ ID NO: 72324 - DNA, 2562 bp, Arabidopsis thaliana
  misc_feature (1)..(2562): Ceres Seq. ID no. 4929543
  misc_feature: MA Experiment ID: 20000348 Result: Up-regulated in Transcription
  misc_feature: MA Experiment 20000348 PARAMETER Experiment Name: At_100uM_ABA_Sub_P Parameter: Age (day) Value: 14
  misc_feature: MA Experiment 20000348 PARAMETER Experiment Name: At_100uM_ABA_Sub_P Parameter: Organism Value: A. thaliana
  misc_feature: MA Experiment 20000348 PARAMETER Experiment Name: At_100uM_ABA_Sub_P Parameter: Plant Line Value: WS
  misc_feature: MA Experiment 20000348 PARAMETER Experiment Name: At_100uM_ABA_Sub_P Parameter: Timepoint (hr) Value: 1
  misc_feature: MA Experiment 20000348 PARAMETER Experiment Name: At_100uM_ABA_Sub_P Parameter: Tissue Value: Aerial
  misc_feature: MA Experiment 20000348 PARAMETER Experiment Name: At_100uM_ABA_Sub_P Parameter: Treatment Value: 100uM ABA vs. No Treatment
  misc_feature: MA Experiment ID: 20000440 Result: Up-regulated in Transcription
  misc_feature: MA Experiment 20000440 PARAMETER Experiment Name: At_Closed-Flower__Sub_P Parameter: Tissue Value: Closed Flower vs. Whole Plant
  misc_feature: MA Experiment ID: 20001807 Result: Down-regulated in Transcription
  misc_feature: MA Experiment 20001807 PARAMETER Experiment Name: At_50mM_NH4NO3_L-to-H_Sub_P Parameter: Timepoint (hr) Value: 6
  misc_feature: MA Experiment 20001807 PARAMETER Experiment Name: At_50mM_NH4NO3_L-to-H_Sub_P Parameter: Tissue Value: Leaf
  misc_feature: MA Experiment 20001807 PARAMETER Experiment Name: At_50mM_NH4NO3_L-to-H_Sub_P Parameter: Treatment Value: 50mM NH4NO3 vs 100mM Mannitol
atggcggctgtcgattcaactgatcggcgggacttcatagtgaacatcaacggccaagagagtggagccgtcggtgctacagggtcaagcagcaatgctgagggaggtaatatttggaaagagtcaagctatgacttttgggatggtgaaaagggtaagaatgataagaaaggagacgacgaagacgaagacggcggcagtttccatttcaggcagcggggagagcggaggcattcgtcagctgagttatctgatccgccgtcgaagctaattggtcagtttcttcacaagcagagagcttcaggagatgagatctctttagatgttgagcttaacatggcagagctacagagcaacacgccgccacgtcctgcaactgctagcaacacgccgcgacgtggcttaacgacgatttctgaatcttcttctccggttaagactaaagttaaagcagacgcagtaagacggaggcagaacagaacatcgctaggtggaagtagcgacgaggaaggtcgaaacagagacgaagcagaggttttgaagtgtggttcgaagaaaccgatgttgagtaggaacaagaccaaatcaagattgcaggatcctccaacaccgacacatccagcgattgacaagacagagatgaagtctggtcggagatccgggatttttaaatctgggtttcttgggaaaagccctaaagcgggtactccgggtcggaatgggtttgaggaagaagaagaggaggatccgtttctagacgaggatttaccggaggaattcaaaagggacaaacttagcttctgggttttccttgaatggataagtctagttctgatagtcacaagtttggtctgtagcttaaccatacataacttgcaacgcaagacatggtggaagctggatttgtggaaatgggaagtgactgttttggtgttgatatgtgggagattagtctcgagttggatagtgagaatcattgtcttcttggtcgagaaaaacttcacttggaggaaaagggttttgtatttcgtctacggagtgagaaaatctgttcaaaactgcttgtggttagggctagtgttgctcgcgtggcatttcttgttcgataagaaagtcgaaagagagactcggagcactgctcttcggtatgtgacgagagtgttggtatgtttgcttgtggctcttatcatttggttggttaaaacaattctggttaaagttttggcttcatcgttccacatgagcacttactttgatcggattcaggagtcgttgttcactcaatacgtgattgaaactctctccggtcctcctttgatggagattcagagaatggaggaagaagagcaacaagtagcagaagatgttaagagcttagagaaattagccggagctaagctgcctccagctctaaaagcgaccgtcaagagttttatgaaagtcgggaaaagtccgggactgaatcggattggttctaagagaggagaagatggcgaagggattaggattgatcagttgaagagaatgaacacaaagaatgtgtctgcttggaacatgaagagattgatgaatataatactaaaaggcgctatttctactttggatcaaaatatgcaggacactactcaggaggatgaggacgctacgcatataagaagcgagtacgaagctaaatgcgcagctaggaagatttttcacaacgtcaccgagccaggttctaggtacatatatttggaagacttcttgcgttttctatgtgaagaggaggctgaaagagccatggctctctttgaaggagcttcagagagcgataagatcagcaagtcttgcctcaagaattgggtggttaaggcgtttagagaaaggagagctctggctttgaccttaaacgatacaaaaacagcagtggacagacttcaccgtataatcaacgtgctccttctagtagcctttgtatttggaaactcctgcaaaaccatcttcgaagccatcattttcctttttgttatgcacccatttgatgtcggtgaccgatgtgaaatcgacggtgttcagttggtagtggaggagatgaacatattgacgactgttttcttgcgatatgataatcaaaagatcatatatccgaatagtgtcctcggcacaaaacctatagctaactattaccgaagtcccgatatgggagacgcggttgaattctgtgttcatatagcaactcctcctgaaaagatcactgccattaaacagagaatactaagttacgtagacaacaagaaggattattggtatcctgcacctatgattgtgttcctaagcatggatgacttgaatagtgtgaagatagcggtgtggttgacacatagaatgaatcatcaagacatgggagagaggtatataagaagaggtctattactagaggaagtgggaaaaacttgtagagagctagatatcgagtatcgcttatatcctcttaacattaatgttcgaagtctccctcctacggctaatccaacttcttcagaccgcattcctccttcatggatgcaacaacgcggtccttga

SEQ ID NO: 72325 - protein, 853 aa, Arabidopsis thaliana
  peptide (1)..(853): Ceres Seq. ID no. 4929544
  misc_feature (646)..(820): Pfam Name: Mechanosensitive ion channel Pfam Description: Mechanosensitive ion channel
  misc_feature (3)..(652): Homolog of NCBI NO: 15220793 NR Description: hypothetical protein; protein id: At1g53470.1
  misc_feature (642)..(851): Homolog of NCBI NO: 15220793 NR Description: hypothetical protein; protein id: At1g53470.1
  misc_feature (133)..(681): Homolog of NCBI NO: 15218429 NR Description: hypothetical protein; protein id: At1g78610.1
  misc_feature (646)..(847): Homolog of NCBI NO: 15218429 NR Description: hypothetical protein; protein id: At1g78610.1
  misc_feature (5)..(652): Homolog of NCBI NO: 38345847 NR Description: OSJNBa0084K11.11 [Oryza sativa (japonica
  misc_feature (625)..(848): Homolog of NCBI NO: 38345847 NR Description: OSJNBa0084K11.11 [Oryza sativa (japonica
  misc_feature (103)..(652): Homolog of NCBI NO: 15227342 NR Description: hypothetical protein; protein id: At2g17000.1
  misc_feature (646)..(849): Homolog of NCBI NO: 15227342 NR Description: hypothetical protein; protein id: At2g17000.1
  misc_feature (30)..(419): Homolog of NCBI NO: 30679840 NR Description: expressed protein [Arabidopsis thaliana]
  misc_feature (646)..(851): Homolog of NCBI NO: 30679840 NR Description: expressed protein [Arabidopsis thaliana]
MAAVDSTDRRDFIVNINGQESGAVGATGSSSNAEGGNIWKESSYDFWDGEKGKNDKKGDDEDEDGGSFHFRQRGERRHSSAELSDPPSKLIGQFLHKQRASGDEISLDVELNMAELQSNTPPRPATASNTPRRGLTTISESSSPVKTKVKADAVRRRQNRTSLGGSSDEEGRNRDEAEVLKCGSKKPMLSRNKTKSRLQDPPTPTHPAIDKTEMKSGRRSGIFKSGFLGKSPKAGTPGRNGFEEEEEEDPFLDEDLPEEFKRDKLSFWVFLEWISLVLIVTSLVCSLTIHNLQRKTWWKLDLWKWEVTVLVLICGRLVSSWIVRIIVFLVEKNFTWRKRVLYFVYGVRKSVQNCLWLGLVLLAWHFLFDKKVERETRSTALRYVTRVLVCLLVALIIWLVKTILVKVLASSFHMSTYFDRIQESLFTQYVIETLSGPPLMEIQRMEEEEQQVAEDVKSLEKLAGAKLPPALKATVKSFMKVGKSPGLNRIGSKRGEDGEGIRIDQLKRMNTKNVSAWNMKRLMNIILKGAISTLDQNMQDTTQEDEDATHIRSEYEAKCAARKIFHNVTEPGSRYIYLEDFLRFLCEEEAERAMALFEGASESDKISKSCLKNWVVKAFRERRALALTLNDTKTAVDRLHRIINVLLLVAFVFGNSCKTIFEAIIFLFVMHPFDVGDRCEIDGVQLVVEEMNILTTVFLRYDNQKIIYPNSVLGTKPIANYYRSPDMGDAVEFCVHIATPPEKITAIKQRILSYVDNKKDYWYPAPMIVFLSMDDLNSVKIAVWLTHRMNHQDMGERYIRRGLLLEEVGKTCRELDIEYRLYPLNINVRSLPPTANPTSSDRIPPSWMQQRGP

SEQ ID NO: 72326 - protein, 741 aa, Arabidopsis thaliana
  peptide (1)..(741): Ceres Seq. ID no. 4929545
  misc_feature (534)..(708): Pfam Name: Mechanosensitive ion channel Pfam Description: Mechanosensitive ion channel
  misc_feature (1)..(540): Homolog of NCBI NO: 15220793 NR Description: hypothetical protein; protein id: At1g53470.1
  misc_feature (530)..(739): Homolog of NCBI NO: 15220793 NR Description: hypothetical protein; protein id: At1g53470.1
  misc_feature (21)..(569): Homolog of NCBI NO: 15218429 NR Description: hypothetical protein; protein id: At1g78610.1
  misc_feature (534)..(735): Homolog of NCBI NO: 15218429 NR Description: hypothetical protein; protein id: At1g78610.1
  misc_feature (1)..(540): Homolog of NCBI NO: 38345847 NR Description: OSJNBa0084K11.11 [Oryza sativa (japonica
  misc_feature (513)..(736): Homolog of NCBI NO: 38345847 NR Description: OSJNBa0084K11.11 [Oryza sativa (japonica
  misc_feature (1)..(540): Homolog of NCBI NO: 15227342 NR Description: hypothetical protein; protein id: At2g17000.1
  misc_feature (534)..(737): Homolog of NCBI NO: 15227342 NR Description: hypothetical protein; protein id: At2g17000.1
  misc_feature (1)..(307): Homolog of NCBI NO: 30679840 NR Description: expressed protein [Arabidopsis thaliana]
  misc_feature (534)..(739): Homolog of NCBI NO: 30679840 NR Description: expressed protein [Arabidopsis thaliana]
MAELQSNTPPRPATASNTPRRGLTTISESSSPVKTKVKADAVRRRQNRTSLGGSSDEEGRNRDEAEVLKCGSKKPMLSRNKTKSRLQDPPTPTHPAIDKTEMKSGRRSGIFKSGFLGKSPKAGTPGRNGFEEEEEEDPFLDEDLPEEFKRDKLSFWVFLEWISLVLIVTSLVCSLTIHNLQRKTWWKLDLWKWEVTVLVLICGRLVSSWIVRIIVFLVEKNFTWRKRVLYFVYGVRKSVQNCLWLGLVLLAWHFLFDKKVERETRSTALRYVTRVLVCLLVALIIWLVKTILVKVLASSFHMSTYFDRIQESLFTQYVIETLSGPPLMEIQRMEEEEQQVAEDVKSLEKLAGAKLPPALKATVKSFMKVGKSPGLNRIGSKRGEDGEGIRIDQLKRMNTKNVSAWNMKRLMNIILKGAISTLDQNMQDTTQEDEDATHIRSEYEAKCAARKIFHNVTEPGSRYIYLEDFLRFLCEEEAERAMALFEGASESDKISKSCLKNWVVKAFRERRALALTLNDTKTAVDRLHRIINVLLLVAFVFGNSCKTIFEAIIFLFVMHPFDVGDRCEIDGVQLVVEEMNILTTVFLRYDNQKIIYPNSVLGTKPIANYYRSPDMGDAVEFCVHIATPPEKITAIKQRILSYVDNKKDYWYPAPMIVFLSMDDLNSVKIAVWLTHRMNHQDMGERYIRRGLLLEEVGKTCRELDIEYRLYPLNINVRSLPPTANPTSSDRIPPSWMQQRGP

SEQ ID NO: 72327 - protein, 666 aa, Arabidopsis thaliana
  peptide (1)..(666): Ceres Seq. ID no. 4929546
  misc_feature (459)..(633): Pfam Name: Mechanosensitive ion channel Pfam Description: Mechanosensitive ion channel
  misc_feature (1)..(465): Homolog of NCBI NO: 15220793 NR Description: hypothetical protein; protein id: At1g53470.1
  misc_feature (455)..(664): Homolog of NCBI NO: 15220793 NR Description: hypothetical protein; protein id: At1g53470.1
  misc_feature (1)..(494): Homolog of NCBI NO: 15218429 NR Description: hypothetical protein; protein id: At1g78610.1
  misc_feature (459)..(660): Homolog of NCBI NO: 15218429 NR Description: hypothetical protein; protein id: At1g78610.1
  misc_feature (1)..(465): Homolog of NCBI NO: 38345847 NR Description: OSJNBa0084K11.11 [Oryza sativa (japonica
  misc_feature (438)..(661): Homolog of NCBI NO: 38345847 NR Description: OSJNBa0084K11.11 [Oryza sativa (japonica
  misc_feature (1)..(465): Homolog of NCBI NO: 15227342 NR Description: hypothetical protein; protein id: At2g17000.1
  misc_feature (459)..(662): Homolog of NCBI NO: 15227342 NR Description: hypothetical protein; protein id: At2g17000.1
  misc_feature (1)..(232): Homolog of NCBI NO: 30679840 NR Description: expressed protein [Arabidopsis thaliana]
  misc_feature (459)..(664): Homolog of NCBI NO: 30679840 NR Description: expressed protein [Arabidopsis thaliana]
MLSRNKTKSRLQDPPTPTHPAIDKTEMKSGRRSGIFKSGFLGKSPKAGTPGRNGFEEEEEEDPFLDEDLPEEFKRDKLSFWVFLEWISLVLIVTSLVCSLTIHNLQRKTWWKLDLWKWEVTVLVLICGRLVSSWIVRIIVFLVEKNFTWRKRVLYFVYGVRKSVQNCLWLGLVLLAWHFLFDKKVERETRSTALRYVTRVLVCLLVALIIWLVKTILVKVLASSFHMSTYFDRIQESLFTQYVIETLSGPPLMEIQRMEEEEQQVAEDVKSLEKLAGAKLPPALKATVKSFMKVGKSPGLNRIGSKRGEDGEGIRIDQLKRMNTKNVSAWNMKRLMNIILKGAISTLDQNMQDTTQEDEDATHIRSEYEAKCAARKIFHNVTEPGSRYIYLEDFLRFLCEEEAERAMALFEGASESDKISKSCLKNWVVKAFRERRALALTLNDTKTAVDRLHRIINVLLLVAFVFGNSCKTIFEAIIFLFVMHPFDVGDRCEIDGVQLVVEEMNILTTVFLRYDNQKIIYPNSVLGTKPIANYYRSPDMGDAVEFCVHIATPPEKITAIKQRILSYVDNKKDYWYPAPMIVFLSMDDLNSVKIAVWLTHRMNHQDMGERYIRRGLLLEEVGKTCRELDIEYRLYPLNINVRSLPPTANPTSSDRIPPSWMQQRGP

SEQ ID NO: 72328 - DNA, 777 bp, Arabidopsis thaliana
  misc_feature (1)..(777): Ceres Seq. ID no. 4929798
  misc_feature: MA Experiment ID: 20000182 Result: Up-regulated in Transcription
  misc_feature: MA Experiment 20000182 PARAMETER Experiment Name: At_2mM_SA_P Parameter: Age (day) Value: 14
  misc_feature: MA Experiment 20000182 PARAMETER Experiment Name: At_2mM_SA_P Parameter: Organism Value: A. thaliana
  misc_feature: MA Experiment 20000182 PARAMETER Experiment Name: At_2mM_SA_P Parameter: Plant Line Value: WS
  misc_feature: MA Experiment 20000182 PARAMETER Experiment Name: At_2mM_SA_P Parameter: Timepoint (hr) Value: 6
  misc_feature: MA Experiment 20000182 PARAMETER Experiment Name: At_2mM_SA_P Parameter: Tissue Value: Aerial
  misc_feature: MA Experiment 20000182 PARAMETER Experiment Name: At_2mM_SA_P Parameter: Treatment Value: 2mM SA vs. No Treatment
  misc_feature: MA Experiment ID: 20000227 Result: Down-regulated in Transcription
  misc_feature: MA Experiment 20000227 PARAMETER Experiment Name: At_Root-Tips-vs-Tops_P Parameter: Tissue Value: Root Tips vs. Root Tops
  misc_feature: MA Experiment ID: 20000234 Result: Down-regulated in Transcription
  misc_feature: MA Experiment 20000234 PARAMETER Experiment Name: At_Siliques_P Parameter: Age (day) Value: 21
  misc_feature: MA Experiment 20000234 PARAMETER Experiment Name: At_Siliques_P Parameter: Organism Value: A. thaliana
  misc_feature: MA Experiment 20000234 PARAMETER Experiment Name: At_Siliques_P Parameter: Plant Line Value: WS
  misc_feature: MA Experiment 20000234 PARAMETER Experiment Name: At_Siliques_P Parameter: Tissue Value: Less Than 5mm Siliques vs. Whole Plant
  misc_feature: MA Experiment ID: 20000235 Result: Down-regulated in Transcription
  misc_feature: MA Experiment 20000235 PARAMETER Experiment Name: At_Siliques_P Parameter: Age (day) Value: 21
  misc_feature: MA Experiment 20000235 PARAMETER Experiment Name: At_Siliques_P Parameter: Organism Value: A. thaliana
  misc_feature: MA Experiment 20000235 PARAMETER Experiment Name: At_Siliques_P Parameter: Plant Line Value: WS
  misc_feature: MA Experiment 20000235 PARAMETER Experiment Name: At_Siliques_P Parameter: Tissue Value: 5-10mm Siliques vs. Whole Plant
  misc_feature: MA Experiment ID: 20000264 Result: Down-regulated in Transcription
  misc_feature: MA Experiment 20000264 PARAMETER Experiment Name: At_Open_Flower_P Parameter: Age (day) Value: 21
  misc_feature: MA Experiment 20000264 PARAMETER Experiment Name: At_Open_Flower_P Parameter: Plant Line Value: WS
  misc_feature: MA Experiment 20000264 PARAMETER Experiment Name: At_Open_Flower_P Parameter: Tissue Value: Open Flower vs. Whole Plant
  misc_feature: MA Experiment ID: 20000265 Result: Down-regulated in Transcription
  misc_feature: MA Experiment 20000265 PARAMETER Experiment Name: At_Open_Flower_P Parameter: Age (day) Value: 21
  misc_feature: MA Experiment 20000265 PARAMETER Experiment Name: At_Open_Flower_P Parameter: Plant Line Value: WS
  misc_feature: MA Experiment 20000265 PARAMETER Experiment Name: At_Open_Flower_P Parameter: Tissue Value: Closed Flower vs. Whole Plant
  misc_feature: MA Experiment ID: 20000286 Result: Down-regulated in Transcription
  misc_feature: MA Experiment 20000286 PARAMETER Experiment Name: At_Open_Flower_P Parameter: Age (day) Value: 21
  misc_feature: MA Experiment 20000286 PARAMETER Experiment Name: At_Open_Flower_P Parameter: Plant Line Value: WS
  misc_feature: MA Experiment 20000286 PARAMETER Experiment Name: At_Open_Flower_P Parameter: Tissue Value: Half Open vs. Whole Plant
  misc_feature: MA Experiment ID: 20001557 Result: Down-regulated in Transcription
  misc_feature: MA Experiment 20001557 PARAMETER Experiment Name: At_Drought_Soil_Dry_P Parameter: Age (day) Value: 27
  misc_feature: MA Experiment 20001557 PARAMETER Experiment Name: At_Drought_Soil_Dry_P Parameter: Organism Value: A. thaliana
  misc_feature: MA Experiment 20001557 PARAMETER Experiment Name: At_Drought_Soil_Dry_P Parameter: Plant Line Value: WS
  misc_feature: MA Experiment 20001557 PARAMETER Experiment Name: At_Drought_Soil_Dry_P Parameter: Post Timepoint (hr) Value: 3
  misc_feature: MA Experiment 20001557 PARAMETER Experiment Name: At_Drought_Soil_Dry_P Parameter: Post-Treatment Value: Re-Water vs. No Drought
  misc_feature: MA Experiment 20001557 PARAMETER Experiment Name: At_Drought_Soil_Dry_P Parameter: Timepoint (day) Value: 13
  misc_feature: MA Experiment 20001557 PARAMETER Experiment Name: At_Drought_Soil_Dry_P Parameter: Treatment Value: Drought vs. No Drought
atggagaatttaaatcataagtgggatcgttgttcctcttctcatcaaactcctctttctttcaaaggcaatcagaagcagattggacaaggtcagagagaagtgttcacacattttgtgtcacttccattagccatataccctgacttgacgaaaaatatcgaggcttttcagaattctgtattgggaaacaatgataaggatccattgaagtttcagagtactttagctgaaatgggaatagaaaaatcgatctttgtaactcccaaaactttccatttgactgtggttatgttaaagttagagaacaatgaatctgtggttaaagctcagaatatccttcagcagagtattttttctaatgtgaggcaagctttgaaaaacagacctgtcttcataagactcagaggattggaatgtatgagtggatctttagacaaaactcgcgttctctatgctcctgttgaagaagttggtcgtgagggccgcctgctaaatgcttgtcatgttatcattgatgcatttgagaatgttggatttgctggtaaagatgcaaagtcacgcttgaagctacacgccacgttgatgaatgcaagctacagaaaagataaaagcaaaaagatggatacttttgatgctcgagagatacacaaagagtttgagaacaaggattggggaacatatctaatcagagaagctcacatctcacaacgttataagtatgaccccaatggctacttccattgctgcgcttcactaccttttccacataagtga

SEQ ID NO: 72329 - protein, 258 aa, Arabidopsis thaliana
  peptide (1)..(258): Ceres Seq. ID no. 4929799
  misc_feature (1)..(258): Homolog of NCBI NO: 30683966 NR Description: expressed protein [Arabidopsis thaliana]
  misc_feature (1)..(258): Homolog of NCBI NO: 9279705 NR Description: gene_id:MYA6.3~unknown protein [Arabidopsis
  misc_feature (74)..(256): Homolog of NCBI NO: 9279706 NR Description: gene_id:MYA6.4~unknown protein [Arabidopsis
  misc_feature (36)..(63): Homolog of NCBI NO: 9279706 NR Description: gene_id:MYA6.4~unknown protein [Arabidopsis
  misc_feature (74)..(256): Homolog of NCBI NO: 15233319 NR Description: unknown protein; protein id: At3g16230.1
  misc_feature (36)..(63): Homolog of NCBI NO: 15233319 NR Description: unknown protein; protein id: At3g16230.1
  misc_feature (78)..(204): Homolog of NCBI NO: 34904330 NR Description: unnamed protein product [Oryza sativa (japonica group)] >gi|7340918|dbj|BAA92990.1| unnamed protein product
  misc_feature (188)..(256): Homolog of NCBI NO: 34904330 NR Description: unnamed protein product [Oryza sativa (japonica group)] >gi|7340918|dbj|BAA92990.1| unnamed protein product
  misc_feature (98)..(195): Homolog of NCBI NO: 34904328 NR Description: unnamed protein product [Oryza sativa (japonica group)] >gi|7340917|dbj|BAA92989.1| unnamed protein product
  misc_feature (210)..(256): Homolog of NCBI NO: 34904328 NR Description: unnamed protein product [Oryza sativa (japonica group)] >gi|7340917|dbj|BAA92989.1| unnamed protein product
MENLNHKWDRCSSSHQTPLSFKGNQKQIGQGQREVFTHFVSLPLAIYPDLTKNIEAFQNSVLGNNDKDPLKFQSTLAEMGIEKSIFVTPKTFHLTVVMLKLENNESVVKAQNILQQSIFSNVRQALKNRPVFIRLRGLECMSGSLDKTRVLYAPVEEVGREGRLLNACHVIIDAFENVGFAGKDAKSRLKLHATLMNASYRKDKSKKMDTFDAREIHKEFENKDWGTYLIREAHISQRYKYDPNGYFHCCASLPFPHK

SEQ ID NO: 72330 - protein, 180 aa, Arabidopsis thaliana
  peptide (1)..(180): Ceres Seq. ID no. 4929800
  misc_feature (1)..(180): Homolog of NCBI NO: 30683966 NR Description: expressed protein [Arabidopsis thaliana]
  misc_feature (1)..(180): Homolog of NCBI NO: 9279705 NR Description: gene_id:MYA6.3~unknown protein [Arabidopsis
  misc_feature (1)..(178): Homolog of NCBI NO: 9279706 NR Description: gene_id:MYA6.4~unknown protein [Arabidopsis
  misc_feature (1)..(178): Homolog of NCBI NO: 15233319 NR Description: unknown protein; protein id: At3g16230.1
  misc_feature (1)..(126): Homolog of NCBI NO: 34904330 NR Description: unnamed protein product [Oryza sativa (japonica group)] >gi|7340918|dbj|BAA92990.1| unnamed protein product
  misc_feature (110)..(178): Homolog of NCBI NO: 34904330 NR Description: unnamed protein product [Oryza sativa (japonica group)] >gi|7340918|dbj|BAA92990.1| unnamed protein product
  misc_feature (20)..(117): Homolog of NCBI NO: 34904328 NR Description: unnamed protein product [Oryza sativa (japonica group)] >gi|7340917|dbj|BAA92989.1| unnamed protein product
  misc_feature (132)..(178): Homolog of NCBI NO: 34904328 NR Description: unnamed protein product [Oryza sativa (japonica group)] >gi|7340917|dbj|BAA92989.1| unnamed protein product
  misc_feature (1)..(173): Homolog of NCBI NO: 31198711 NR Description: ENSANGP00000010782 [Anopheles gambiae]
  misc_feature (1)..(177): Homolog of NCBI NO: 12841120 NR Description: unnamed protein product [Mus musculus]
MGIEKSIFVTPKTFHLTVVMLKLENNESVVKAQNILQQSIFSNVRQALKNRPVFIRLRGLECMSGSLDKTRVLYAPVEEVGREGRLLNACHVIIDAFENVGFAGKDAKSRLKLHATLMNASYRKDKSKKMDTFDAREIHKEFENKDWGTYLIREAHISQRYKYDPNGYFHCCASLPFPHK

SEQ ID NO: 72331 - protein, 161 aa, Arabidopsis thaliana
  peptide (1)..(161): Ceres Seq. ID no. 4929801
  misc_feature (1)..(161): Homolog of NCBI NO: 30683966 NR Description: expressed protein [Arabidopsis thaliana]
  misc_feature (1)..(161): Homolog of NCBI NO: 9279705 NR Description: gene_id:MYA6.3~unknown protein [Arabidopsis
  misc_feature (1)..(159): Homolog of NCBI NO: 9279706 NR Description: gene_id:MYA6.4~unknown protein [Arabidopsis
  misc_feature (1)..(159): Homolog of NCBI NO: 15233319 NR Description: unknown protein; protein id: At3g16230.1
  misc_feature (1)..(107): Homolog of NCBI NO: 34904330 NR Description: unnamed protein product [Oryza sativa (japonica group)] >gi|7340918|dbj|BAA92990.1| unnamed protein product
  misc_feature (91)..(159): Homolog of NCBI NO: 34904330 NR Description: unnamed protein product [Oryza sativa (japonica group)] >gi|7340918|dbj|BAA92990.1| unnamed protein product
  misc_feature (1)..(98): Homolog of NCBI NO: 34904328 NR Description: unnamed protein product [Oryza sativa (japonica group)] >gi|7340917|dbj|BAA92989.1| unnamed protein product
  misc_feature (113)..(159): Homolog of NCBI NO: 34904328 NR Description: unnamed protein product [Oryza sativa (japonica group)] >gi|7340917|dbj|BAA92989.1| unnamed protein product
  misc_feature (1)..(154): Homolog of NCBI NO: 31198711 NR Description: ENSANGP00000010782 [Anopheles gambiae]
  misc_feature (1)..(158): Homolog of NCBI NO: 12841120 NR Description: unnamed protein product [Mus musculus]
MLKLENNESVVKAQNILQQSIFSNVRQALKNRPVFIRLRGLECMSGSLDKTRVLYAPVEEVGREGRLLNACHVIIDAFENVGFAGKDAKSRLKLHATLMNASYRKDKSKKMDTFDAREIHKEFENKDWGTYLIREAHISQRYKYDPNGYFHCCASLPFPHK

SEQ ID NO: 72332 - DNA, 549 bp, Arabidopsis thaliana
  misc_feature (1)..(549): Ceres Seq. ID no. 4929928
  misc_feature: MA Experiment ID: 20000184 Result: Up-regulated in Transcription
  misc_feature: MA Experiment 20000184 PARAMETER Experiment Name: At_Shoots__P Parameter: Age (day) Value: 7
  misc_feature: MA Experiment 20000184 PARAMETER Experiment Name: At_Shoots__P Parameter: Tissue Value: Shoots vs. Whole Plant
  misc_feature: MA Experiment ID: 20000185 Result: Up-regulated in Transcription
  misc_feature: MA Experiment 20000185 PARAMETER Experiment Name: At_Roots__P Parameter: Age (day) Value: 7 vs. 21
  misc_feature: MA Experiment 20000185 PARAMETER Experiment Name: At_Roots__P Parameter: Organism Value: A. thaliana
  misc_feature: MA Experiment 20000185 PARAMETER Experiment Name: At_Roots__P Parameter: Tissue Value: Roots vs. Whole Plant
  misc_feature: MA Experiment ID: 20000227 Result: Down-regulated in Transcription
  misc_feature: MA Experiment 20000227 PARAMETER Experiment Name: At_Root-Tips-vs-Tops_P Parameter: Tissue Value: Root Tips vs. Root Tops
  misc_feature: MA Experiment ID: 20000264 Result: Down-regulated in Transcription
  misc_feature: MA Experiment 20000264 PARAMETER Experiment Name: At_Open_Flower_P Parameter: Age (day) Value: 21
  misc_feature: MA Experiment 20000264 PARAMETER Experiment Name: At_Open_Flower_P Parameter: Plant Line Value: WS
  misc_feature: MA Experiment 20000264 PARAMETER Experiment Name: At_Open_Flower_P Parameter: Tissue Value: Open Flower vs. Whole Plant
  misc_feature: MA Experiment ID: 20000265 Result: Down-regulated in Transcription
  misc_feature: MA Experiment 20000265 PARAMETER Experiment Name: At_Open_Flower_P Parameter: Age (day) Value: 21
  misc_feature: MA Experiment 20000265 PARAMETER Experiment Name: At_Open_Flower_P Parameter: Plant Line Value: WS
  misc_feature: MA Experiment 20000265 PARAMETER Experiment Name: At_Open_Flower_P Parameter: Tissue Value: Closed Flower vs. Whole Plant
  misc_feature: MA Experiment ID: 20000268 Result: Down-regulated in Transcription
  misc_feature: MA Experiment 20000268 PARAMETER Experiment Name: At_100mM_NaCl__P Parameter: Age (day) Value: 14
  misc_feature: MA Experiment 20000268 PARAMETER Experiment Name: At_100mM_NaCl__P Parameter: Organism Value: A. thaliana
  misc_feature: MA Experiment 20000268 PARAMETER Experiment Name: At_100mM_NaCl__P Parameter: Plant Line Value: WS
  misc_feature: MA Experiment 20000268 PARAMETER Experiment Name: At_100mM_NaCl__P Parameter: Timepoint (hr) Value: 6
  misc_feature: MA Experiment 20000268 PARAMETER Experiment Name: At_100mM_NaCl__P Parameter: Tissue Value: Whole Plant
  misc_feature: MA Experiment 20000268 PARAMETER Experiment Name: At_100mM_NaCl__P Parameter: Treatment Value: 100mM NaCl vs. No Treatment
  misc_feature: MA Experiment ID: 20000436 Result: Down-regulated in Transcription
  misc_feature: MA Experiment 20000436 PARAMETER Experiment Name: At_Drought_P Parameter: Age (day) Value: 7
  misc_feature: MA Experiment 20000436 PARAMETER Experiment Name: At_Drought_P Parameter: Organism Value: A. thaliana
  misc_feature: MA Experiment 20000436 PARAMETER Experiment Name: At_Drought_P Parameter: Plant Line Value: WS
  misc_feature: MA Experiment 20000436 PARAMETER Experiment Name: At_Drought_P Parameter: Timepoint (hr) Value: 12
  misc_feature: MA Experiment 20000436 PARAMETER Experiment Name: At_Drought_P Parameter: Tissue Value: Whole Plant
  misc_feature: MA Experiment 20000436 PARAMETER Experiment Name: At_Drought_P Parameter: Treatment Value: Drought vs. No Drought
  misc_feature: MA Experiment ID: 20000437 Result: Down-regulated in Transcription
  misc_feature: MA Experiment 20000437 PARAMETER Experiment Name: At_Drought_P Parameter: Age (day) Value: 8
  misc_feature: MA Experiment 20000437 PARAMETER Experiment Name: At_Drought_P Parameter: Organism Value: A. thaliana
  misc_feature: MA Experiment 20000437 PARAMETER Experiment Name: At_Drought_P Parameter: Plant Line Value: WS
  misc_feature: MA Experiment 20000437 PARAMETER Experiment Name: At_Drought_P Parameter: Timepoint (hr) Value: 24
  misc_feature: MA Experiment 20000437 PARAMETER Experiment Name: At_Drought_P Parameter: Tissue Value: Whole Plant
  misc_feature: MA Experiment 20000437 PARAMETER Experiment Name: At_Drought_P Parameter: Treatment Value: Drought vs. No Drought
  misc_feature: MA Experiment ID: 20000438 Result: Up-regulated in Transcription
  misc_feature: MA Experiment 20000438 PARAMETER Experiment Name: At_Shoots__P Parameter: Age (day) Value: 14
  misc_feature: MA Experiment 20000438 PARAMETER Experiment Name: At_Shoots__P Parameter: Tissue Value: Shoots vs. Whole Plant
  misc_feature: MA Experiment ID: 20000439 Result: Up-regulated in Transcription
  misc_feature: MA Experiment 20000439 PARAMETER Experiment Name: At_Roots__P Parameter: Age (day) Value: 14 vs. 21
  misc_feature: MA Experiment 20000439 PARAMETER Experiment Name: At_Roots__P Parameter: Organism Value: A. thaliana
  misc_feature: MA Experiment 20000439 PARAMETER Experiment Name: At_Roots__P Parameter: Tissue Value: Roots vs. Whole Plant
  misc_feature: MA Experiment ID: 20000574 Result: Down-regulated in Transcription
  misc_feature: MA Experiment 20000574 PARAMETER Experiment Name: At_100uM_ABA_Mutants__P Parameter: Organism Value: A. thaliana
  misc_feature: MA Experiment 20000574 PARAMETER Experiment Name: At_100uM_ABA_Mutants__P Parameter: Plant Line Value: CS23 vs. Ler wt
  misc_feature: MA Experiment 20000574 PARAMETER Experiment Name: At_100uM_ABA_Mutants__P Parameter: Timepoint (hr) Value: N/A
  misc_feature: MA Experiment 20000574 PARAMETER Experiment Name: At_100uM_ABA_Mutants__P Parameter: Tissue Value: Whole Plant
  misc_feature: MA Experiment 20000574 PARAMETER Experiment Name: At_100uM_ABA_Mutants__P Parameter: Treatment Value: None
  misc_feature: MA Experiment ID: 20000794 Result: Down-regulated in Transcription
  misc_feature: MA Experiment 20000794 PARAMETER Experiment Name: At_Petals_P Parameter: Age (day) Value: 23-25 days
  misc_feature: MA Experiment 20000794 PARAMETER Experiment Name: At_Petals_P Parameter: Plant Line Value: WS
  misc_feature: MA Experiment 20000794 PARAMETER Experiment Name: At_Petals_P Parameter: Tissue Value: Petals vs. Whole plant
  misc_feature: MA Experiment ID: 20001558 Result: Down-regulated in Transcription
  misc_feature: MA Experiment 20001558 PARAMETER Experiment Name: At_Drought_Soil_Dry_P Parameter: Age (day) Value: 27
  misc_feature: MA Experiment 20001558 PARAMETER Experiment Name: At_Drought_Soil_Dry_P Parameter: Organism Value: A. thaliana
  misc_feature: MA Experiment 20001558 PARAMETER Experiment Name: At_Drought_Soil_Dry_P Parameter: Plant Line Value: WS
  misc_feature: MA Experiment 20001558 PARAMETER Experiment Name: At_Drought_Soil_Dry_P Parameter: Post Timepoint (hr) Value: 6
  misc_feature: MA Experiment 20001558 PARAMETER Experiment Name: At_Drought_Soil_Dry_P Parameter: Post-Treatment Value: Re-Water vs. No Drought
  misc_feature: MA Experiment 20001558 PARAMETER Experiment Name: At_Drought_Soil_Dry_P Parameter: Timepoint (day) Value: 13
  misc_feature: MA Experiment 20001558 PARAMETER Experiment Name: At_Drought_Soil_Dry_P Parameter: Treatment Value: Drought vs. No Drought
atgagctcgtcgttatggacatattacggaatagtgacacctggtgaatacttggtttctactgtcaatggctttggtgctcttgctgaatccatctacgttctcattttcctcttctttgtccccaaatccagattcttgaaaacagttgttgtggttctagctttgaacgtgtgtttcccagttatcgcgattgcgggaacaagaactctgtttggagatgcaaactcgcgttctagttcaatgggtttcatatgtgctactctcaacattatcatgtatggttctcctctttcagctattaaaacggttgtgacgacgagaagtgtgcagtttatgccattttggttgtcatttttcctctttctgaacggcgcgatttggggtgtctacgctttactcctacacgatatgtttctactagtgccaaatggaatgggattctttcttgggataatgcaactcctaatttatgcctattacagaaatgccgaaccaattgtagaagatgaagaaggcctcataccaaatcaacctctcctcgcttaa

SEQ ID NO: 72333 - protein, 182 aa, Arabidopsis thaliana
  peptide (1)..(182): Ceres Seq. ID no. 4929929
  misc_feature (80)..(166): Pfam Name: MtN3/saliva family Pfam Description: MtN3/saliva family
  misc_feature (1)..(182): Homolog of NCBI NO: 30684193 NR Description: nodulin MtN3 family protein [Arabidopsis thaliana]
  misc_feature (1)..(182): Homolog of NCBI NO: 27754697 NR Description: putative cytochrome c oxidoreductase [Arabidopsis
  misc_feature (1)..(182): Homolog of NCBI NO: 30683457 NR Description: nodulin MtN3 family protein [Arabidopsis thaliana]
  misc_feature (2)..(169): Homolog of NCBI NO: 14715258 NR Description: N3 like protein [Medicago truncatula]
  misc_feature (1)..(124): Homolog of NCBI NO: 7485021 NR Description: hypothetical protein - Arabidopsis thaliana cytochrome c oxidoreductase like protein [Arabidopsis thaliana]
  misc_feature (5)..(179): Homolog of NCBI NO: 18413388 NR Description: putative protein; protein id: At4g10850.1, by cDNA: 33161. [Arabidopsis thaliana] contains similarity to Medicago truncatula MtN3 (GB:Y08726)
  misc_feature (1)..(172): Homolog of NCBI NO: 11994120 NR Description: contains similarity to nodulin MtN3
  misc_feature (1)..(172): Homolog of NCBI NO: 18405611 NR Description: Expressed protein; protein id: At3g28007.1, by cDNA: 22745., supported by cDNA: gi_16226221 [Arabidopsis >gi|16226222|gb|AAL16107.1|AF428275_1 unknown protein
  misc_feature (1)..(172): Homolog of NCBI NO: 21592355 NR Description: contains similarity to nodulin MtN3 protein
  misc_feature (5)..(179): Homolog of NCBI NO: 7486148 NR Description: hypothetical protein F25I24.60 - Arabidopsis >gi|4539359|emb|CAB40053.1| putative protein [Arabidopsis >gi|7267783|emb|CAB81186.1| putative protein [Arabidopsis
MSSSLWTYYGIVTPGEYLVSTVNGFGALAESIYVLIFLFFVPKSRFLKTVVVVLALNVCFPVIAIAGTRTLFGDANSRSSSMGFICATLNIIMYGSPLSAIKTVVTTRSVQFMPFWLSFFLFLNGAIWGVYALLLHDMFLLVPNGMGFFLGIMQLLIYAYYRNAEPIVEDEEGLIPNQPLLA

SEQ ID NO: 72334 - protein, 101 aa, Arabidopsis thaliana
  peptide (1)..(101): Ceres Seq. ID no. 4929930
  misc_feature (1)..(85): Pfam Name: MtN3/saliva family Pfam Description: MtN3/saliva family
  misc_feature (1)..(101): Homolog of NCBI NO: 30684193 NR Description: nodulin MtN3 family protein [Arabidopsis thaliana]
  misc_feature (1)..(101): Homolog of NCBI NO: 27754697 NR Description: putative cytochrome c oxidoreductase [Arabidopsis
  misc_feature (1)..(101): Homolog of NCBI NO: 30683457 NR Description: nodulin MtN3 family protein [Arabidopsis thaliana]
  misc_feature (1)..(88): Homolog of NCBI NO: 14715258 NR Description: N3 like protein [Medicago truncatula]
  misc_feature (1)..(43): Homolog of NCBI NO: 7485021 NR Description: hypothetical protein - Arabidopsis thaliana cytochrome c oxidoreductase like protein [Arabidopsis thaliana]
  misc_feature (1)..(98): Homolog of NCBI NO: 18413388 NR Description: putative protein; protein id: At4g10850.1, by cDNA: 33161. [Arabidopsis thaliana] contains similarity to Medicago truncatula MtN3 (GB:Y08726)
  misc_feature (1)..(91): Homolog of NCBI NO: 11994120 NR Description: contains similarity to nodulin MtN3
  misc_feature (1)..(91): Homolog of NCBI NO: 18405611 NR Description: Expressed protein; protein id: At3g28007.1, by cDNA: 22745., supported by cDNA: gi_16226221 [Arabidopsis >gi|16226222|gb|AAL16107.1|AF428275_1 unknown protein
  misc_feature (1)..(91): Homolog of NCBI NO: 21592355 NR Description: contains similarity to nodulin MtN3 protein
  misc_feature (1)..(98): Homolog of NCBI NO: 7486148 NR Description: hypothetical protein F25I24.60 - Arabidopsis >gi|4539359|emb|CAB40053.1| putative protein [Arabidopsis >gi|7267783|emb|CAB81186.1| putative protein [Arabidopsis
MGFICATLNIIMYGSPLSAIKTVVTTRSVQFMPFWLSFFLFLNGAIWGVYALLLHDMFLLVPNGMGFFLGIMQLLIYAYYRNAEPIVEDEEGLIPNQPLLA

SEQ ID NO: 72335 - DNA, 1039 bp, Arabidopsis thaliana
  misc_feature (1)..(1039): Ceres Seq. ID no. 4930032
  misc_feature: MA Experiment ID: 108434 Result: Up-regulated in Transcription
  misc_feature: MA Experiment 108434 PARAMETER Experiment Name: At_Root_Tips_cDNA_P Parameter: Tissue Value: Root Tips
  misc_feature: MA Experiment ID: 108573 Result: Up-regulated in Transcription
  misc_feature: MA Experiment 108573 PARAMETER Experiment Name: At_Drought_cDNA_P Parameter: Timepoint (hr) Value: 6
  misc_feature: MA Experiment 108573 PARAMETER Experiment Name: At_Drought_cDNA_P Parameter: Tissue Value: Aerial
  misc_feature: MA Experiment 108573 PARAMETER Experiment Name: At_Drought_cDNA_P Parameter: Treatment Value: Drought vs. No Drought
  misc_feature: MA Experiment ID: 108577 Result: Down-regulated in Transcription
  misc_feature: MA Experiment 108577 PARAMETER Experiment Name: At_42deg_Heat_cDNA_P Parameter: Temperature (deg C) Value: 42 vs. 22
  misc_feature: MA Experiment 108577 PARAMETER Experiment Name: At_42deg_Heat_cDNA_P Parameter: Timepoint (hr) Value: 6
  misc_feature: MA Experiment 108577 PARAMETER Experiment Name: At_42deg_Heat_cDNA_P Parameter: Tissue Value: Aerial
  misc_feature: MA Experiment ID: 108579 Result: Down-regulated in Transcription
  misc_feature: MA Experiment 108579 PARAMETER Experiment Name: At_4deg_Cold_cDNA_P Parameter: Temperature (deg C) Value: 4 vs. 22
  misc_feature: MA Experiment 108579 PARAMETER Experiment Name: At_4deg_Cold_cDNA_P Parameter: Timepoint (hr) Value: 6
  misc_feature: MA Experiment 108579 PARAMETER Experiment Name: At_4deg_Cold_cDNA_P Parameter: Tissue Value: Aerial
  misc_feature: MA Experiment ID: 20001247 Result: Up-regulated in Transcription
  misc_feature: MA Experiment 20001247 PARAMETER Experiment Name: At_Far-red-induction_P Parameter: Age (day) Value: 7
  misc_feature: MA Experiment 20001247 PARAMETER Experiment Name: At_Far-red-induction_P Parameter: Light Value: Far-red vs. White
  misc_feature: MA Experiment 20001247 PARAMETER Experiment Name: At_Far-red-induction_P Parameter: Organism Value: A. thaliana
  misc_feature: MA Experiment 20001247 PARAMETER Experiment Name: At_Far-red-induction_P Parameter: Plant Line Value: Columbia
  misc_feature: MA Experiment 20001247 PARAMETER Experiment Name: At_Far-red-induction_P Parameter: Timepoint (hr) Value: 1
  misc_feature: MA Experiment 20001247 PARAMETER Experiment Name: At_Far-red-induction_P Parameter: Tissue Value: Whole Plant
  misc_feature: MA Experiment ID: 20001248 Result: Up-regulated in Transcription
  misc_feature: MA Experiment 20001248 PARAMETER Experiment Name: At_Far-red-induction_P Parameter: Age (day) Value: 7
  misc_feature: MA Experiment 20001248 PARAMETER Experiment Name: At_Far-red-induction_P Parameter: Light Value: Far-red vs. White
  misc_feature: MA Experiment 20001248 PARAMETER Experiment Name: At_Far-red-induction_P Parameter: Organism Value: A. thaliana
  misc_feature: MA Experiment 20001248 PARAMETER Experiment Name: At_Far-red-induction_P Parameter: Plant Line Value: Columbia
  misc_feature: MA Experiment 20001248 PARAMETER Experiment Name: At_Far-red-induction_P Parameter: Timepoint (hr) Value: 4
  misc_feature: MA Experiment 20001248 PARAMETER Experiment Name: At_Far-red-induction_P Parameter: Tissue Value: Whole Plant
  misc_feature: MA Experiment ID: 20001450 Result: Up-regulated in Transcription
  misc_feature: MA Experiment 20001450 PARAMETER Experiment Name: At_Far-red-induction_P Parameter: Age (day) Value: 7
  misc_feature: MA Experiment 20001450 PARAMETER Experiment Name: At_Far-red-induction_P Parameter: Light Value: Far-red vs. White
  misc_feature: MA Experiment 20001450 PARAMETER Experiment Name: At_Far-red-induction_P Parameter: Organism Value: A. thaliana
  misc_feature: MA Experiment 20001450 PARAMETER Experiment Name: At_Far-red-induction_P Parameter: Plant Line Value: Columbia
  misc_feature: MA Experiment 20001450 PARAMETER Experiment Name: At_Far-red-induction_P Parameter: Timepoint (hr) Value: 8
  misc_feature: MA Experiment 20001450 PARAMETER Experiment Name: At_Far-red-induction_P Parameter: Tissue Value: Whole Plant
  misc_feature: MA Experiment ID: 20001451 Result: Up-regulated in Transcription
  misc_feature: MA Experiment 20001451 PARAMETER Experiment Name: At_Far-red-induction_P Parameter: Age (day) Value: 7
  misc_feature: MA Experiment 20001451 PARAMETER Experiment Name: At_Far-red-induction_P Parameter: Light Value: Far-red vs. White
  misc_feature: MA Experiment 20001451 PARAMETER Experiment Name: At_Far-red-induction_P Parameter: Organism Value: A. thaliana
  misc_feature: MA Experiment 20001451 PARAMETER Experiment Name: At_Far-red-induction_P Parameter: Plant Line Value: Columbia
  misc_feature: MA Experiment 20001451 PARAMETER Experiment Name: At_Far-red-induction_P Parameter: Timepoint (hr) Value: 24
  misc_feature: MA Experiment 20001451 PARAMETER Experiment Name: At_Far-red-induction_P Parameter: Tissue Value: Whole Plant
gttaaaataaaataaaataaaaataaaaggaagaagaagaagaagaaaggattcgtcttccttcttccacaccctttctgacacctcatctcccctcccaccttctccgtcccgttccgtttctccatcagatcctcgattccgatccaacagttcgaattcagtttccgattctgatctgatcgaaccaatactcactgagatttgatcggcgattatggagtctatatctccggtatcgaatcagcttcttcagccgacgacgacgagctctaattccgatcgctctcgtcgtaagcgtaagaagaaatcatcgccatcatcggttgagaaatctccatctccgtcaatatcgttggagaaatggagatcggagaagcagcaacagatctactcaacgaagctagttcatgctttaagagagctacgaatcagccaacaaccatcttcatcatcatcttcttcgattccacgtggaggtagagccgtacgtgaagtcgccgatagagctttagcagttgcggcgagaggtaaaacgttatggagtcgagcgatactttcaaaagctgtaaaactcaaattcaggaaacacaaacgccagagaatctctaatccgacgacgacgacgttaaccaccgggagtatcaggtcaaagaaacagagagcgacggttttgaggcttaaggctaaaggtttgccagctgtacagaggaaagtgaaagtactgagccggttagttcccggttgccgtaaacaatcattaccggtggttttagaagaaaccactgattatatagctgcgatggagatgcagattcgtactatgactgcgattctctccgccgttagttcttctcctccgccgccaacgccaggtcacgaagggggacaaacacacatgcttggttagttggccaaactgtccttttatttttttccaattttaaaaaccaaaaaaaaaactgtttttttttatcatattattattcttctcactgtattgtttgttgtttgaatattttactattcaactttattt

SEQ ID NO: 72336 - protein, 230 aa, Arabidopsis thaliana; identical to SEQ ID NO: 39916
  peptide (1)..(230): Ceres Seq. ID no. 4930033
  misc_feature (1)..(230): Homolog of NCBI NO: 18401374 NR Description: bHLH protein; protein id: At3g17100.1, supported cDNA: gi_15010765, supported by cDNA: gi_16323263 [Arabidopsis >gi|7670034|dbj|BAA94988.1|
  misc_feature (12)..(217): Homolog of NCBI NO: 21618012 NR Description: unknown [Arabidopsis thaliana]
  misc_feature (12)..(217): Homolog of NCBI NO: 18397627 NR Description: bHLH protein; protein id: At3g06590.1, supported cDNA: 9391., supported by cDNA: gi_19698882, supported by cDNA: [Arabidopsis thaliana] >gi|12322686|gb|AAG51338.1|AC020580_18
  misc_feature (18)..(218): Homolog of NCBI NO: 18390998 NR Description: bHLH protein; protein id: At1g09250.1, supported cDNA: 9228. [Arabidopsis thaliana] >gi|25402527|pir||D86225
  misc_feature (78)..(219): Homolog of NCBI NO: 34898122 NR Description: bHLH protein-like [Oryza sativa (japonica
  misc_feature (49)..(213): Homolog of NCBI NO: 34904544 NR Description: B1066G12.17 [Oryza sativa (japonica
  misc_feature (32)..(218): Homolog of NCBI NO: 18397368 NR Description: bHLH protein; protein id: At3g05800.1, supported cDNA: 21672. [Arabidopsis thaliana] hypothetical protein [Arabidopsis thaliana]
  misc_feature (88)..(217): Homolog of NCBI NO: 34912942 NR Description: OSJNBb0035I14.10 [Oryza sativa (japonica

SEQ ID NO: 72337 - DNA, 1665 bp, Arabidopsis thaliana
  misc_feature (1)..(1665): Ceres Seq. ID no. 4930507
  misc_feature: MA Experiment ID: 20000182 Result: Down-regulated in Transcription
  misc_feature: MA Experiment 20000182 PARAMETER Experiment Name: At_2mM_SA_P Parameter: Age (day) Value: 14
  misc_feature: MA Experiment 20000182 PARAMETER Experiment Name: At_2mM_SA_P Parameter: Organism Value: A. thaliana
  misc_feature: MA Experiment 20000182 PARAMETER Experiment Name: At_2mM_SA_P Parameter: Plant Line Value: WS
  misc_feature: MA Experiment 20000182 PARAMETER Experiment Name: At_2mM_SA_P Parameter: Timepoint (hr) Value: 6
  misc_feature: MA Experiment 20000182 PARAMETER Experiment Name: At_2mM_SA_P Parameter: Tissue Value: Aerial
  misc_feature: MA Experiment 20000182 PARAMETER Experiment Name: At_2mM_SA_P Parameter: Treatment Value: 2mM SA vs. No Treatment
  misc_feature: MA Experiment ID: 20000234 Result: Up-regulated in Transcription
  misc_feature: MA Experiment 20000234 PARAMETER Experiment Name: At_Siliques_P Parameter: Age (day) Value: 21
  misc_feature: MA Experiment 20000234 PARAMETER Experiment Name: At_Siliques_P Parameter: Organism Value: A. thaliana
  misc_feature: MA Experiment 20000234 PARAMETER Experiment Name: At_Siliques_P Parameter: Plant Line Value: WS
  misc_feature: MA Experiment 20000234 PARAMETER Experiment Name: At_Siliques_P Parameter: Tissue Value: Less Than 5mm Siliques vs. Whole Plant
  misc_feature: MA Experiment ID: 20000436 Result: Down-regulated in Transcription
  misc_feature: MA Experiment 20000436 PARAMETER Experiment Name: At_Drought_P Parameter: Age (day) Value: 7
  misc_feature: MA Experiment 20000436 PARAMETER Experiment Name: At_Drought_P Parameter: Organism Value: A. thaliana
  misc_feature: MA Experiment 20000436 PARAMETER Experiment Name: At_Drought_P Parameter: Plant Line Value: WS
  misc_feature: MA Experiment 20000436 PARAMETER Experiment Name: At_Drought_P Parameter: Timepoint (hr) Value: 12
  misc_feature: MA Experiment 20000436 PARAMETER Experiment Name: At_Drought_P Parameter: Tissue Value: Whole Plant
  misc_feature: MA Experiment 20000436 PARAMETER Experiment Name: At_Drought_P Parameter: Treatment Value: Drought vs. No Drought
  misc_feature: MA Experiment ID: 20000437 Result: Down-regulated in Transcription
  misc_feature: MA Experiment 20000437 PARAMETER Experiment Name: At_Drought_P Parameter: Age (day) Value: 8
  misc_feature: MA Experiment 20000437 PARAMETER Experiment Name: At_Drought_P Parameter: Organism Value: A. thaliana
  misc_feature: MA Experiment 20000437 PARAMETER Experiment Name: At_Drought_P Parameter: Plant Line Value: WS
  misc_feature: MA Experiment 20000437 PARAMETER Experiment Name: At_Drought_P Parameter: Timepoint (hr) Value: 24
  misc_feature: MA Experiment 20000437 PARAMETER Experiment Name: At_Drought_P Parameter: Tissue Value: Whole Plant
  misc_feature: MA Experiment 20000437 PARAMETER Experiment Name: At_Drought_P Parameter: Treatment Value: Drought vs. No Drought
  misc_feature: MA Experiment ID: 20001451 Result: Down-regulated in Transcription
  misc_feature: MA Experiment 20001451 PARAMETER Experiment Name: At_Far-red-induction_P Parameter: Age (day) Value: 7
  misc_feature: MA Experiment 20001451 PARAMETER Experiment Name: At_Far-red-induction_P Parameter: Light Value: Far-red vs. White
  misc_feature: MA Experiment 20001451 PARAMETER Experiment Name: At_Far-red-induction_P Parameter: Organism Value: A. thaliana
  misc_feature: MA Experiment 20001451 PARAMETER Experiment Name: At_Far-red-induction_P Parameter: Plant Line Value: Columbia
  misc_feature: MA Experiment 20001451 PARAMETER Experiment Name: At_Far-red-induction_P Parameter: Timepoint (hr) Value: 24
  misc_feature: MA Experiment 20001451 PARAMETER Experiment Name: At_Far-red-induction_P Parameter: Tissue Value: Whole Plant
  misc_feature: MA Experiment ID: 20001458 Result: Up-regulated in Transcription
  misc_feature: MA Experiment 20001458 PARAMETER Experiment Name: At_50mM_NH4NO3_L-to-H_P Parameter: Age (day) Value: Undefined
  misc_feature: MA Experiment 20001458 PARAMETER Experiment Name: At_50mM_NH4NO3_L-to-H_P Parameter: Organism Value: Undefined
  misc_feature: MA Experiment 20001458 PARAMETER Experiment Name: At_50mM_NH4NO3_L-to-H_P Parameter: Plant Line Value: Undefined
  misc_feature: MA Experiment 20001458 PARAMETER Experiment Name: At_50mM_NH4NO3_L-to-H_P Parameter: Timepoint (hr) Value: 2
  misc_feature: MA Experiment 20001458 PARAMETER Experiment Name: At_50mM_NH4NO3_L-to-H_P Parameter: Tissue Value: Siliques
  misc_feature: MA Experiment 20001458 PARAMETER Experiment Name: At_50mM_NH4NO3_L-to-H_P Parameter: Treatment Value: 50mM NH4NO3 vs. 100mM Manitol
  misc_feature: MA Experiment ID: 20001555 Result: Up-regulated in Transcription
  misc_feature: MA Experiment 20001555 PARAMETER Experiment Name: At_Drought_Soil_Dry_P Parameter: Age (day) Value: 24
  misc_feature: MA Experiment 20001555 PARAMETER Experiment Name: At_Drought_Soil_Dry_P Parameter: Organism Value: A. thaliana
  misc_feature: MA Experiment 20001555 PARAMETER Experiment Name: At_Drought_Soil_Dry_P Parameter: Plant Line Value: WS
  misc_feature: MA Experiment 20001555 PARAMETER Experiment Name: At_Drought_Soil_Dry_P Parameter: Post Timepoint (hr) Value: None
  misc_feature: MA Experiment 20001555 PARAMETER Experiment Name: At_Drought_Soil_Dry_P Parameter: Post-Treatment Value: None
  misc_feature: MA Experiment 20001555 PARAMETER Experiment Name: At_Drought_Soil_Dry_P Parameter: Timepoint (day) Value: 10
  misc_feature: MA Experiment 20001555 PARAMETER Experiment Name: At_Drought_Soil_Dry_P Parameter: Treatment Value: Drought vs. No Drought
  misc_feature: MA Experiment ID: 20001556 Result: Up-regulated in Transcription
  misc_feature: MA Experiment 20001556 PARAMETER Experiment Name: At_Drought_Soil_Dry_P Parameter: Age (day) Value: 26
  misc_feature: MA Experiment 20001556 PARAMETER Experiment Name: At_Drought_Soil_Dry_P Parameter: Organism Value: A. thaliana
  misc_feature: MA Experiment 20001556 PARAMETER Experiment Name: At_Drought_Soil_Dry_P Parameter: Plant Line Value: WS
  misc_feature: MA Experiment 20001556 PARAMETER Experiment Name: At_Drought_Soil_Dry_P Parameter: Post Timepoint (hr) Value: None
  misc_feature: MA Experiment 20001556 PARAMETER Experiment Name: At_Drought_Soil_Dry_P Parameter: Post-Treatment Value: None
  misc_feature: MA Experiment 20001556 PARAMETER Experiment Name: At_Drought_Soil_Dry_P Parameter: Timepoint (day) Value: 12
  misc_feature: MA Experiment 20001556 PARAMETER Experiment Name: At_Drought_Soil_Dry_P Parameter: Treatment Value: Drought vs. No Drought
  misc_feature: MA Experiment ID: 20001557 Result: Up-regulated in Transcription
  misc_feature: MA Experiment 20001557 PARAMETER Experiment Name: At_Drought_Soil_Dry_P Parameter: Age (day) Value: 27
  misc_feature: MA Experiment 20001557 PARAMETER Experiment Name: At_Drought_Soil_Dry_P Parameter: Organism Value: A. thaliana
  misc_feature: MA Experiment 20001557 PARAMETER Experiment Name: At_Drought_Soil_Dry_P Parameter: Plant Line Value: WS
  misc_feature: MA Experiment 20001557 PARAMETER Experiment Name: At_Drought_Soil_Dry_P Parameter: Post Timepoint (hr) Value: 3
  misc_feature: MA Experiment 20001557 PARAMETER Experiment Name: At_Drought_Soil_Dry_P Parameter: Post-Treatment Value: Re-Water vs. No Drought
  misc_feature: MA Experiment 20001557 PARAMETER Experiment Name: At_Drought_Soil_Dry_P Parameter: Timepoint (day) Value: 13
  misc_feature: MA Experiment 20001557 PARAMETER Experiment Name: At_Drought_Soil_Dry_P Parameter: Treatment Value: Drought vs. No Drought
  misc_feature: MA Experiment ID: 20001558 Result: Up-regulated in Transcription
  misc_feature: MA Experiment 20001558 PARAMETER Experiment Name: At_Drought_Soil_Dry_P Parameter: Age (day) Value: 27
  misc_feature: MA Experiment 20001558 PARAMETER Experiment Name: At_Drought_Soil_Dry_P Parameter: Organism Value: A. thaliana
  misc_feature: MA Experiment 20001558 PARAMETER Experiment Name: At_Drought_Soil_Dry_P Parameter: Plant Line Value: WS
  misc_feature: MA Experiment 20001558 PARAMETER Experiment Name: At_Drought_Soil_Dry_P Parameter: Post Timepoint (hr) Value: 6
  misc_feature: MA Experiment 20001558 PARAMETER Experiment Name: At_Drought_Soil_Dry_P Parameter: Post-Treatment Value: Re-Water vs. No Drought
  misc_feature: MA Experiment 20001558 PARAMETER Experiment Name: At_Drought_Soil_Dry_P Parameter: Timepoint (day) Value: 13
  misc_feature: MA Experiment 20001558 PARAMETER Experiment Name: At_Drought_Soil_Dry_P Parameter: Treatment Value: Drought vs. No Drought
  misc_feature: MA Experiment ID: 20001560 Result: Up-regulated in Transcription
  misc_feature: MA Experiment 20001560 PARAMETER Experiment Name: At_Drought_Soil_Dry_P Parameter: Age (day) Value: 28
  misc_feature: MA Experiment 20001560 PARAMETER Experiment Name: At_Drought_Soil_Dry_P Parameter: Organism Value: A. thaliana
  misc_feature: MA Experiment 20001560 PARAMETER Experiment Name: At_Drought_Soil_Dry_P Parameter: Plant Line Value: WS
  misc_feature: MA Experiment 20001560 PARAMETER Experiment Name: At_Drought_Soil_Dry_P Parameter: Post Timepoint (hr) Value: None
  misc_feature: MA Experiment 20001560 PARAMETER Experiment Name: At_Drought_Soil_Dry_P Parameter: Post-Treatment Value: None
  misc_feature: MA Experiment 20001560 PARAMETER Experiment Name: At_Drought_Soil_Dry_P Parameter: Timepoint (day) Value: 14
  misc_feature: MA Experiment 20001560 PARAMETER Experiment Name: At_Drought_Soil_Dry_P Parameter: Treatment Value: Drought vs. No Drought
  misc_feature: MA Experiment ID: 20001757 Result: Up-regulated in Transcription
  misc_feature: MA Experiment 20001757 PARAMETER Experiment Name: At_50mM_NH4NO3_L-to-H_P Parameter: Timepoint (hr) Value: 6
  misc_feature: MA Experiment 20001757 PARAMETER Experiment Name: At_50mM_NH4NO3_L-to-H_P Parameter: Tissue Value: Leaf
  misc_feature: MA Experiment 20001757 PARAMETER Experiment Name: At_50mM_NH4NO3_L-to-H_P Parameter: Treatment Value: 50mM NH4NO3 vs 100mM Mannitol
atgttggccgcgacgcctgctcatggactcaggtacgtggtggtgcccacacgctcatggcttcataggtttcgatgctgctcgtcttctctcgctcctctctccccttctgaattctcgggcggtaataaagcccagaagaagctcaacgacgagaacaacaccaacgtaagcaatgagaaaacggcgccgtattatccgaaacgaggagaaacagtggagcttgtgtgcgagagtttaggattcaaaggcaaaggaatctgtaaagttgatggaactggctacgtcgttatgtgtgaccgagctcttcccggcgaacgttttcttggccgtgtcactcgccgcaaaggcagctatgctgaagtgacaaaaatgaagacaatatctccacataaggacttagtagaagctccatgtgagtatgcatcttactgtggtggttgcaaaactcagaatctctcttatgaagctcagcttagagctaaagaagagcaagttcatgagcttatcagacatgttggaaggttttctgataacaatcctggccttgagattgtcttgaagcctattgttgcttgcgatattcaattccattatcggaataagatggagttttcatttggtccacaaagatggcttccgattgaaatgttaaacgagagacaagatggtcctaagaactttgcattggggctccatgcacctggattttttgataaggttttaaatgttgataagtgcttattacagagcgagccaggaaacttggttcttgctgctgtccaagattgctggagagatcctgaattaagtctttcaccatatgattgtcgttcacatgttgggtttcttaaacatttgatgctgagaactggaaggaatgtggagactggttcactagaacttatggtcaattttgtgacatcgtcttataagccagagctgttgaaacccctggttgataggatttcatcaattcctcaagtggtaagcattatgaataatgtaaattcttcggtaggaaacacatccgttggcgaaaaggaatatactctttatgggaaggatacaatcacagaggtcttaagagggcttacatttcaaatttcagccaactctttctttcagactaacactcatcaggctgaagttttatataagcttattgaggaatctgctggacttaaaggagatggctcagaagtcgtgctcgatcttttctgtggaactggtaccataggccttacacttgccagaagggcgaaacacgtgtatggttatgaagtagtaccacaagcaataacagatgcacacaagaatgcccaaataaacggcatagagaatgcaacattcatccaaggggatctaaacaaaataggagaagattttgggaacaatttccctaagcctgatatcgttatttctgatcccaatcgacctggtatgcacatgaagttgatcaagtttctgctaaagcttaaatctccacggatcatttatgtttcctgtaatcctgcaacctgcgccagggatctcgattacctctgtcacggcgtggaggagaagaatctaaaaggttgctacaaactgatgagtgttcagccagtggatatgttccctcacactcctcacatcgaatgtgtctgcttgttagagcttgcttga

SEQ ID NO: 72338 - protein, 554 aa, Arabidopsis thaliana
  peptide (1)..(554): Ceres Seq. ID no. 4930508
  misc_feature (154)..(554): Pfam Name: tRNA (Uracil-5-)-methyltransferase Pfam Description: tRNA (Uracil-5-)-methyltransferase
  misc_feature (1)..(554): Homolog of NCBI NO: 9280234 NR Description: RNA methyltransferase-like protein [Arabidopsis
  misc_feature (1)..(554): Homolog of NCBI NO: 15232519 NR Description: hypothetical protein; protein id: At3g21300.1
  misc_feature (1)..(554): Homolog of NCBI NO: 19310570 NR Description: unknown protein [Arabidopsis thaliana]
  misc_feature (65)..(553): Homolog of NCBI NO: 34903506 NR Description: putative RNA methyltransferase [Oryza sativa
  misc_feature (68)..(554): Homolog of NCBI NO: 21672850 NR Description: RNA methyltransferase, TrmA family [Chlorobium TLS] >gi|21645898|gb|AAM71257.1| RNA methyltransferase, TrmA
  misc_feature (231)..(553): Homolog of NCBI NO: 15613250 NR Description: RNA methyltransferase [Bacillus halodurans]
  misc_feature (59)..(208): Homolog of NCBI NO: 15613250 NR Description: RNA methyltransferase [Bacillus halodurans]
  misc_feature (83)..(553): Homolog of NCBI NO: 29346053 NR Description: RNA methyltransferase [Bacteroides VPI- 5482] >gi|29337947|gb|AAO75750.1| RNA methyltransferase
  misc_feature (68)..(551): Homolog of NCBI NO: 23136902 NR Description: hypothetical protein [Cytophaga hutchinsonii]
  misc_feature (80)..(551): Homolog of NCBI NO: 34540828 NR Description: RNA methyltransferase, TrmA family [Porphyromonas W83] >gi|34397142|gb|AAQ66206.1| RNA methyltransferase, TrmA
MLAATPAHGLRYVVVPTRSWLHRFRCCSSSLAPLSPSEFSGGNKAQKKLNDENNTNVSNEKTAPYYPKRGETVELVCESLGFKGKGICKVDGTGYVVMCDRALPGERFLGRVTRRKGSYAEVTKMKTISPHKDLVEAPCEYASYCGGCKTQNLSYEAQLRAKEEQVHELIRHVGRFSDNNPGLEIVLKPIVACDIQFHYRNKMEFSFGPQRWLPIEMLNERQDGPKNFALGLHAPGFFDKVLNVDKCLLQSEPGNLVLAAVQDCWRDPELSLSPYDCRSHVGFLKHLMLRTGRNVETGSLELMVNFVTSSYKPELLKPLVDRISSIPQVVSIMNNVNSSVGNTSVGEKEYTLYGKDTITEVLRGLTFQISANSFFQTNTHQAEVLYKLIEESAGLKGDGSEVVLDLFCGTGTIGLTLARRAKHVYGYEVVPQAITDAHKNAQINGIENATFIQGDLNKIGEDFGNNFPKPDIVISDPNRPGMHMKLIKFLLKLKSPRIIYVSCNPATCARDLDYLCHGVEEKNLKGCYKLMSVQPVDMFPHTPHIECVCLLELA

SEQ ID NO: 72339 - protein, 457 aa, Arabidopsis thaliana
  peptide (1)..(457): Ceres Seq. ID no. 4930509
  misc_feature (57)..(457): Pfam Name: tRNA (Uracil-5-)-methyltransferase Pfam Description: tRNA (Uracil-5-)-methyltransferase
  misc_feature (1)..(457): Homolog of NCBI NO: 9280234 NR Description: RNA methyltransferase-like protein [Arabidopsis
  misc_feature (1)..(457): Homolog of NCBI NO: 19310570 NR Description: unknown protein [Arabidopsis thaliana]
  misc_feature (1)..(457): Homolog of NCBI NO: 15232519 NR Description: hypothetical protein; protein id: At3g21300.1
  misc_feature (1)..(456): Homolog of NCBI NO: 34903506 NR Description: putative RNA methyltransferase [Oryza sativa
  misc_feature (1)..(457): Homolog of NCBI NO: 21672850 NR Description: RNA methyltransferase, TrmA family [Chlorobium TLS] >gi|21645898|gb|AAM71257.1| RNA methyltransferase, TrmA
  misc_feature (134)..(456): Homolog of NCBI NO: 15613250 NR Description: RNA methyltransferase [Bacillus halodurans]
  misc_feature (1)..(111): Homolog of NCBI NO: 15613250 NR Description: RNA methyltransferase [Bacillus halodurans]
  misc_feature (1)..(456): Homolog of NCBI NO: 29346053 NR Description: RNA methyltransferase [Bacteroides VPI- 5482] >gi|29337947|gb|AAO75750.1| RNA methyltransferase
  misc_feature (1)..(454): Homolog of NCBI NO: 23136902 NR Description: hypothetical protein [Cytophaga hutchinsonii]
  misc_feature (1)..(454): Homolog of NCBI NO: 34540828 NR Description: RNA methyltransferase, TrmA family [Porphyromonas W83] >gi|34397142|gb|AAQ66206.1| RNA methyltransferase, TrmA
MCDRALPGERFLGRVTRRKGSYAEVTKMKTISPHKDLVEAPCEYASYCGGCKTQNLSYEAQLRAKEEQVHELIRHVGRFSDNNPGLEIVLKPIVACDIQFHYRNKMEFSFGPQRWLPIEMLNERQDGPKNFALGLHAPGFFDKVLNVDKCLLQSEPGNLVLAAVQDCWRDPELSLSPYDCRSHVGFLKHLMLRTGRNVETGSLELMVNFVTSSYKPELLKPLVDRISSIPQVVSIMNNVNSSVGNTSVGEKEYTLYGKDTITEVLRGLTFQISANSFFQTNTHQAEVLYKLIEESAGLKGDGSEVVLDLFCGTGTIGLTLARRAKHVYGYEVVPQAITDAHKNAQINGIENATFIQGDLNKIGEDFGNNFPKPDIVISDPNRPGMHMKLIKFLLKLKSPRIIYVSCNPATCARDLDYLCHGVEEKNLKGCYKLMSVQPVDMFPHTPHIECVCLLELA

SEQ ID NO: 72340 - protein, 430 aa, Arabidopsis thaliana
  peptide (1)..(430): Ceres Seq. ID no. 4930510
  misc_feature (30)..(430): Pfam Name: tRNA (Uracil-5-)-methyltransferase Pfam Description: tRNA (Uracil-5-)-methyltransferase
  misc_feature (1)..(430): Homolog of NCBI NO: 9280234 NR Description: RNA methyltransferase-like protein [Arabidopsis
  misc_feature (1)..(430): Homolog of NCBI NO: 19310570 NR Description: unknown protein [Arabidopsis thaliana]
  misc_feature (1)..(430): Homolog of NCBI NO: 15232519 NR Description: hypothetical protein; protein id: At3g21300.1
  misc_feature (1)..(429): Homolog of NCBI NO: 34903506 NR Description: putative RNA methyltransferase [Oryza sativa
  misc_feature (1)..(430): Homolog of NCBI NO: 21672850 NR Description: RNA methyltransferase, TrmA family [Chlorobium TLS] >gi|21645898|gb|AAM71257.1| RNA methyltransferase, TrmA
  misc_feature (107)..(429): Homolog of NCBI NO: 15613250 NR Description: RNA methyltransferase [Bacillus halodurans]
  misc_feature (1)..(84): Homolog of NCBI NO: 15613250 NR Description: RNA methyltransferase [Bacillus halodurans]
  misc_feature (1)..(429): Homolog of NCBI NO: 29346053 NR Description: RNA methyltransferase [Bacteroides VPI- 5482] >gi|29337947|gb|AAO75750.1| RNA methyltransferase
  misc_feature (1)..(427): Homolog of NCBI NO: 23136902 NR Description: hypothetical protein [Cytophaga hutchinsonii]
  misc_feature (1)..(427): Homolog of NCBI NO: 34540828 NR Description: RNA methyltransferase, TrmA family [Porphyromonas W83] >gi|34397142|gb|AAQ66206.1| RNA methyltransferase, TrmA
MKTISPHKDLVEAPCEYASYCGGCKTQNLSYEAQLRAKEEQVHELIRHVGRFSDNNPGLEIVLKPIVACDIQFHYRNKMEFSFGPQRWLPIEMLNERQDGPKNFALGLHAPGFFDKVLNVDKCLLQSEPGNLVLAAVQDCWRDPELSLSPYDCRSHVGFLKHLMLRTGRNVETGSLELMVNFVTSSYKPELLKPLVDRISSIPQVVSIMNNVNSSVGNTSVGEKEYTLYGKDTITEVLRGLTFQISANSFFQTNTHQAEVLYKLIEESAGLKGDGSEVVLDLFCGTGTIGLTLARRAKHVYGYEVVPQAITDAHKNAQINGIENATFIQGDLNKIGEDFGNNFPKPDIVISDPNRPGMHMKLIKFLLKLKSPRIIYVSCNPATCARDLDYLCHGVEEKNLKGCYKLMSVQPVDMFPHTPHIECVCLLELA

SEQ ID NO: 72341 - DNA, 1584 bp, Arabidopsis thaliana
  misc_feature (1)..(1584): Ceres Seq. ID no. 4930547
  misc_feature: MA Experiment ID: 108595 Result: Up-regulated in Transcription
  misc_feature: MA Experiment 108595 PARAMETER Experiment Name: At_Ler-pi_Ovule_cDNA_P Parameter: Plant Line Value: null
  misc_feature: MA Experiment ID: 20000234 Result: Up-regulated in Transcription
  misc_feature: MA Experiment 20000234 PARAMETER Experiment Name: At_Siliques_P Parameter: Age (day) Value: 21
  misc_feature: MA Experiment 20000234 PARAMETER Experiment Name: At_Siliques_P Parameter: Organism Value: A. thaliana
  misc_feature: MA Experiment 20000234 PARAMETER Experiment Name: At_Siliques_P Parameter: Plant Line Value: WS
  misc_feature: MA Experiment 20000234 PARAMETER Experiment Name: At_Siliques_P Parameter: Tissue Value: Less Than 5mm Siliques vs. Whole Plant
  misc_feature: MA Experiment ID: 20000264 Result: Up-regulated in Transcription
  misc_feature: MA Experiment 20000264 PARAMETER Experiment Name: At_Open_Flower_P Parameter: Age (day) Value: 21
  misc_feature: MA Experiment 20000264 PARAMETER Experiment Name: At_Open_Flower_P Parameter: Plant Line Value: WS
  misc_feature: MA Experiment 20000264 PARAMETER Experiment Name: At_Open_Flower_P Parameter: Tissue Value: Open Flower vs. Whole Plant
  misc_feature: MA Experiment ID: 20000265 Result: Up-regulated in Transcription
  misc_feature: MA Experiment 20000265 PARAMETER Experiment Name: At_Open_Flower_P Parameter: Age (day) Value: 21
  misc_feature: MA Experiment 20000265 PARAMETER Experiment Name: At_Open_Flower_P Parameter: Plant Line Value: WS
  misc_feature: MA Experiment 20000265 PARAMETER Experiment Name: At_Open_Flower_P Parameter: Tissue Value: Closed Flower vs. Whole Plant
  misc_feature: MA Experiment ID: 20000286 Result: Up-regulated in Transcription
  misc_feature: MA Experiment 20000286 PARAMETER Experiment Name: At_Open_Flower_P Parameter: Age (day) Value: 21
  misc_feature: MA Experiment 20000286 PARAMETER Experiment Name: At_Open_Flower_P Parameter: Plant Line Value: WS
  misc_feature: MA Experiment 20000286 PARAMETER Experiment Name: At_Open_Flower_P Parameter: Tissue Value: Half Open vs. Whole Plant
accaaaatcagattagagtttcagagacatctctcgaatacgatcatcagacaagacttaacctccatttgcacgtcttcctgctcacgacagacaaatcatgaacgaatccgacagctgaacgaattgcgtgtctgagaagatccaaatcctaattttctaccttttttttttgggaactaaggttagaatttggagcttctcgtacgtttttgcttgcctacgtttccggacaaaaccctatttgcatataaacagaacaggttctgttcatcaagacactgaagcctgatggggatggaggaagggattaaagataatgctgcatcagctcccaattcaagacctacaaaccaacttaaagctcttttaccgatgcgggtgcttcaagttttcttgttgttctttgttttggttcttggaatctcagtcattagtatgcacatgatcaagtacttaaagattcaaactttagctccatcgacattgatctctacttatgatgagagaattacgttagagagccttatcaagcctccattgaatggttggcattccatgaatgacagtgagcttctttggcgtgcttcgatggagcctcggatacttgactatccatttaaaagagttcctaaaatggcattcatgtttctcaccaaaggacctttgccatttgctccactttgggaaaggtttttcaaagggcatgagggcttttactcaatctatgttcatactttgccaaattatagatcagatttcccaagctcatctgtgttttacagaagacagatcccaagtcagcatgtagcttggggagagatgagtatgtgtgatgctgaaaggaggcttttggctaacgcgttgctcgatatctctaacgaatggtttgttttactatctgaagcgtgtattcctcttcgcggtttcaactttgtctaccgttatgtctctagatcaagatatagtttcatgggttctgttgacgaggacgggccttacgggagaggcagatatagctatgcaatgggaccagaagtaagtctaaacgagtggagaaaagggtctcagtggtttgaaataaacagagcacttgctgttgatattgttgaagacatggtttactataacaaattcaaagagttttgtagacctccttgttatgtagatgaacattacttcccaacaatgctctctattggatatccggattttctcgctaatcggacattgacttggacagattggtcaaggggtggtgctcatccagctacttttggcaaggctgatataacagagaagttcatcaagaagctgtcaagaggtaaagcttgcttctacaatgatcagccatctcaagtttgttatctttttgcaagaaagtttgctccaagcgcattgaagcctttacttaaacttgcaccaaaggttcttgggttctaattaatggatctcttgtcttctttttgttcttggtttttgttctgaaatgttcttgaacttgagtgtagcttcgtatagcatggacacaactctgatccttattgtctccttccacattgataatatagatacttcaatggc

SEQ ID NO: 72342 - protein, 383 aa, Arabidopsis thaliana; identical to SEQ ID NO: 35988
  peptide (1)..(383): Ceres Seq. ID no. 4930548
  misc_feature (151)..(262): Pfam Name: Arabidopsis protein of unknown function, DUF266 Pfam Description: Arabidopsis protein of unknown function, DUF266
  misc_feature (1)..(383): Homolog of NCBI NO: 18402952 NR Description: expressed protein; protein id: At3g21310.1,
  misc_feature (3)..(383): Homolog of NCBI NO: 21554566 NR Description: unknown [Arabidopsis thaliana]
  misc_feature (1)..(344): Homolog of NCBI NO: 9280235 NR Description: gb|AAD40142.1~gene_id:MXL8.19~strong similarity
  misc_feature (3)..(383): Homolog of NCBI NO: 15218028 NR Description: hypothetical protein; protein id: At1g51770.1
  misc_feature (1)..(383): Homolog of NCBI NO: 15239155 NR Description: putative protein; protein id: At5g11730.1, by cDNA: gi_20260569 [Arabidopsis thaliana]
  misc_feature (1)..(381): Homolog of NCBI NO: 15239557 NR Description: putative protein; protein id: At5g25970.1 thaliana] >gi|5107829|gb|AAD40142.1|AF149413_23 contains to several Arabidopsis thaliana hypothetical proteins including
  misc_feature (75)..(383): Homolog of NCBI NO: 15218485 NR Description: unknown protein; protein id: At1g10280.1 thaliana] >gi|4914330|gb|AAD32878.1|AC005489_16 F14N23.16
  misc_feature (74)..(383): Homolog of NCBI NO: 38344090 NR Description: OSJNBb0056F09.13 [Oryza sativa (japonica
  misc_feature (72)..(383): Homolog of NCBI NO: 15221386 NR Description: hypothetical protein; protein id: At1g68390.1
  misc_feature (83)..(381): Homolog of NCBI NO: 34907318 NR Description: contains ESTs to Arabidopsis thaliana chromosome 1, At1g10280~unknown protein

SEQ ID NO: 72343 - protein, 381 aa, Arabidopsis thaliana; identical to SEQ ID NO: 35989
  peptide (1)..(381): Ceres Seq. ID no. 4930549
  misc_feature (149)..(260): Pfam Name: Arabidopsis protein of unknown function, DUF266 Pfam Description: Arabidopsis protein of unknown function, DUF266
  misc_feature (1)..(381): Homolog of NCBI NO: 18402952 NR Description: expressed protein; protein id: At3g21310.1,
  misc_feature (1)..(381): Homolog of NCBI NO: 21554566 NR Description: unknown [Arabidopsis thaliana]
  misc_feature (1)..(342): Homolog of NCBI NO: 9280235 NR Description: gb|AAD40142.1~gene_id:MXL8.19~strong similarity
  misc_feature (1)..(381): Homolog of NCBI NO: 15218028 NR Description: hypothetical protein; protein id: At1g51770.1
  misc_feature (1)..(381): Homolog of NCBI NO: 15239155 NR Description: putative protein; protein id: At5g11730.1, by cDNA: gi_20260569 [Arabidopsis thaliana]
  misc_feature (1)..(379): Homolog of NCBI NO: 15239557 NR Description: putative protein; protein id: At5g25970.1 thaliana] >gi|5107829|gb|AAD40142.1|AF149413_23 contains to several Arabidopsis thaliana hypothetical proteins including
  misc_feature (73)..(381): Homolog of NCBI NO: 15218485 NR Description: unknown protein; protein id: At1g10280.1 thaliana] >gi|4914330|gb|AAD32878.1|AC005489_16 F14N23.16
  misc_feature (72)..(381): Homolog of NCBI NO: 38344090 NR Description: OSJNBb0056F09.13 [Oryza sativa (japonica
  misc_feature (70)..(381): Homolog of NCBI NO: 15221386 NR Description: hypothetical protein; protein id: At1g68390.1
  misc_feature (81)..(379): Homolog of NCBI NO: 34907318 NR Description: contains ESTs to Arabidopsis thaliana chromosome 1, At1g10280~unknown protein

SEQ ID NO: 72344 - protein, 355 aa, Arabidopsis thaliana; identical to SEQ ID NO: 35990
  peptide (1)..(355): Ceres Seq. ID no. 4930550
  misc_feature (123)..(234): Pfam Name: Arabidopsis protein of unknown function, DUF266 Pfam Description: Arabidopsis protein of unknown function, DUF266
  misc_feature (1)..(355): Homolog of NCBI NO: 18402952 NR Description: expressed protein; protein id: At3g21310.1,
  misc_feature (1)..(355): Homolog of NCBI NO: 21554566 NR Description: unknown [Arabidopsis thaliana]
  misc_feature (1)..(316): Homolog of NCBI NO: 9280235 NR Description: gb|AAD40142.1~gene_id:MXL8.19~strong similarity
  misc_feature (1)..(355): Homolog of NCBI NO: 15218028 NR Description: hypothetical protein; protein id: At1g51770.1
  misc_feature (1)..(355): Homolog of NCBI NO: 15239155 NR Description: putative protein; protein id: At5g11730.1, by cDNA: gi_20260569 [Arabidopsis thaliana]
  misc_feature (1)..(353): Homolog of NCBI NO: 15239557 NR Description: putative protein; protein id: At5g25970.1 thaliana] >gi|5107829|gb|AAD40142.1|AF149413_23 contains to several Arabidopsis thaliana hypothetical proteins including
  misc_feature (47)..(355): Homolog of NCBI NO: 15218485 NR Description: unknown protein; protein id: At1g10280.1 thaliana] >gi|4914330|gb|AAD32878.1|AC005489_16 F14N23.16
  misc_feature (46)..(355): Homolog of NCBI NO: 38344090 NR Description: OSJNBb0056F09.13 [Oryza sativa (japonica
  misc_feature (44)..(355): Homolog of NCBI NO: 15221386 NR Description: hypothetical protein; protein id: At1g68390.1
  misc_feature (55)..(353): Homolog of NCBI NO: 34907318 NR Description: contains ESTs to Arabidopsis thaliana chromosome 1, At1g10280~unknown protein

SEQ ID NO: 72345 - DNA, 2886 bp, Arabidopsis thaliana
  misc_feature (1)..(2886): Ceres Seq. ID no. 4930559
  misc_feature: MA Experiment ID: 20000173 Result: Down-regulated in Transcription
  misc_feature: MA Experiment 20000173 PARAMETER Experiment Name: At_42deg_Heat_P Parameter: Age (day) Value: 14
  misc_feature: MA Experiment 20000173 PARAMETER Experiment Name: At_42deg_Heat_P Parameter: Organism Value: A. thaliana
  misc_feature: MA Experiment 20000173 PARAMETER Experiment Name: At_42deg_Heat_P Parameter: Plant Line Value: WS
  misc_feature: MA Experiment 20000173 PARAMETER Experiment Name: At_42deg_Heat_P Parameter: Temperature (deg C) Value: 42 vs. 22
  misc_feature: MA Experiment 20000173 PARAMETER Experiment Name: At_42deg_Heat_P Parameter: Timepoint (hr) Value: 6
  misc_feature: MA Experiment 20000173 PARAMETER Experiment Name: At_42deg_Heat_P Parameter: Tissue Value: Aerial
  misc_feature: MA Experiment ID: 20000439 Result: Up-regulated in Transcription
  misc_feature: MA Experiment 20000439 PARAMETER Experiment Name: At_Roots__P Parameter: Age (day) Value: 14 vs. 21
  misc_feature: MA Experiment 20000439 PARAMETER Experiment Name: At_Roots__P Parameter: Organism Value: A. thaliana
  misc_feature: MA Experiment 20000439 PARAMETER Experiment Name: At_Roots__P Parameter: Tissue Value: Roots vs. Whole Plant
  misc_feature: MA Experiment ID: 20000794 Result: Up-regulated in Transcription
  misc_feature: MA Experiment 20000794 PARAMETER Experiment Name: At_Petals_P Parameter: Age (day) Value: 23-25 days
  misc_feature: MA Experiment 20000794 PARAMETER Experiment Name: At_Petals_P Parameter: Plant Line Value: WS
  misc_feature: MA Experiment 20000794 PARAMETER Experiment Name: At_Petals_P Parameter: Tissue Value: Petals vs. Whole plant
  misc_feature: Pfam Name: DIRP Pfam Description: DIRP
atgcctcgtgctgttggaaaaaggactcctagaattcctatctcatacacccttgagaaggatactagggaaagatatttatcacctgttaagagaggtttaaatcagaagggggatgatactgatgatgatatggaacatgagatagcattagcattggctgaggcttcacaacgaggtggctctacaaagaactcccacacaccaaatagaaaagcaaagatgtacccccctgataaaaagggtgaaagaatgcgtgccgatattgacttggcgattgccaagcttcatgccactgatatggaagatgtccgctgtgaaccaagcttaggaagcactgaagctgataatgcggattattctggaggtagaaatgacttgacacatggagaaggttctagtgccgtggaaaagcagcaaaaaggaagaacatactataggaggagagtaggcattaaagaagaagatgcaaaagaagcctgcagtggtacagatgaagcaccaagcttaggcgctcccgatgagaaatttgaacaagaaagggaagggaaggctttgaaattcacatataaagtttcaaggagaaaaaatgaagacacagcatgtgatgctctccatacgctggcagatctatcgctgatgatgcctgaaactgccactgatactgagtcatcagttcaagctgaggaaaagaaagctggagaagcttatgtttcagattttaaagggactgatccggcatccatgtctaaaagtagttctcttagaaactccaaacagagaagatacggcagcaatgacctttgtaaccctgaactcgagagaaaaagtccaagtagttctttaatccaaaagagacggcagaaagcattaccagctaaagttcttaaagatgagcttgctgcaagctcacaagtcatagagccttgtaatagcaagggaataggtgaggaatataagcctgttgggagaggtaaacggtccgcaagtattcgaaactcacatgaaaagaaatctgccaaatctcatgatcatacttcgtcaagtaacaacatagtagaagaagatgagtcagctccatcaaatgcagtcattaaaaaacaagttaacttgccaactaaagttaggagcagaagaaagatagtaactgagaaacctctaactattgatgacgggaaaatttctgagactatagtgagtgaactttctgatactcagactttattcccaaatgataaagaaaccgcagagaagttttcgcattgcatttctagtttccgagcacggagatggtgtatttttgagtggttctacagtgcaattgactatccatggtttgccagacaagagtttgttgagtatttggatcatgtagggttgggtcatgttcctagattaactcgcgttgaatggggtgtcataaggagttctcttgggaaaccaaggcgattttctgaacagtttttgaaggaggaaaaagaaaagctatacctatacagggactctgtaagaaaacattatgatgaactaaacacgggcatgagggaaggacttccaatggatttggcccggcctctaaatgtttcacagagagtcatttgcctgcatccaaagtcaagagagattcatgacggcaatgtcctaactgttgatcactgtaggtaccggattcagtttgacaaccctgaattaggggtagaatttgttaaggatactgaatgcatgccactgaatcctctagaaaacatgccagcatcgctggcaaggcactatgctttctcaaattatcacattcagaatcccattgaggagaaaatgcatgaacgggcaaaggaaagcatgctggaaggatatcccaaactttcgtgtgagacaggccatctcttgtcctctccaaattataacattagcaattcactaaagcaggaaaaggtagatatctcaagttcaaatccacaagctcaagacggagttgatgaggctcttgctttacaattgtttaattctcagccctcaagtattggacaaatccaggcaagagaagctgatgtccaagctctttctgaactaacgcgtgcgcttgacaagaaggagctagttttgagggagctaaaatgcatgaacgacgaggttgtggaaagtcagaaagatggacataataatgccctaaaggattctgaatcttttaagaaacaatatgcagcagttctctttcagctaagcgaaatcaatgagcaggtttcattggcacttcttggcttgaggcaacgaaatacttaccaggagaatgtaccatattcatcaataagacgcatgagtaaatcaggggaacctgatggtcagttgacatacgaagacaataatgcatcagacactaatggattccatgtgtctgagatcgtcgaaagttctagaataaaagcacggaaaatggtatacagagctgtacaggcattggagttactgagaaaagacgaaaataataatgtaaatatggaagaagccattgattttgtaaataatcagctctcaatagatcaaacagaaggatcatcagtccagcaaacacaaggtggccaggatcagcgtcttccctctacaccaaatccacctagctcaactcctgccaatgattcccacctaaaccaacccgatcaaaatgacctgcaagtcccgtccgatcttgtgtcccgatgtatcgctacattgcttatgattcagaaatgtacagagaggcaattcccaccaagtgaagtagcccaggttctagactcggcagtggcgagtttacagccttgctgctcgcagaaccttccgatctatacagagattcagaagtgcatgggaatcataagaaaccagattctagccctcgtaccctcctaa

SEQ ID NO: 72346 - protein, 961 aa, Arabidopsis thaliana
  peptide (1)..(961): Ceres Seq. ID no. 4930560
  misc_feature: Pfam Name: DIRP Pfam Description: DIRP
  misc_feature (248)..(803): Homolog of NCBI NO: 19347724 NR Description: unknown protein [Arabidopsis thaliana]
  misc_feature (248)..(803): Homolog of NCBI NO: 15229976 NR Description: unknown protein; protein id: At3g05380.1 thaliana] >gi|7596773|gb|AAF64544.1| unknown protein [Arabidopsis
  misc_feature (133)..(732): Homolog of NCBI NO: 15240995 NR Description: putative protein; protein id: At5g27610.1
  misc_feature (3)..(44): Homolog of NCBI NO: 15240995 NR Description: putative protein; protein id: At5g27610.1
  misc_feature (412)..(726): Homolog of NCBI NO: 34903510 NR Description: P0001B06.7 [Oryza sativa (japonica
  misc_feature (4)..(471): Homolog of NCBI NO: 15229976 NR Description: unknown protein; protein id: At3g05380.1 thaliana] >gi|7596773|gb|AAF64544.1| unknown protein [Arabidopsis
  misc_feature (585)..(961): Homolog of NCBI NO: 15229976 NR Description: unknown protein; protein id: At3g05380.1 thaliana] >gi|7596773|gb|AAF64544.1| unknown protein [Arabidopsis
  misc_feature (585)..(961): Homolog of NCBI NO: 19347724 NR Description: unknown protein [Arabidopsis thaliana]
  misc_feature (585)..(959): Homolog of NCBI NO: 15240995 NR Description: putative protein; protein id: At5g27610.1
  misc_feature (4)..(395): Homolog of NCBI NO: 6729048 NR Description: unknown protein, 3' partial [Arabidopsis thaliana]
MPRAVGKRTPRIPISYTLEKDTRERYLSPVKRGLNQKGDDTDDDMEHEIALALAEASQRGGSTKNSHTPNRKAKMYPPDKKGERMRADIDLAIAKLHATDMEDVRCEPSLGSTEADNADYSGGRNDLTHGEGSSAVEKQQKGRTYYRRRVGIKEEDAKEACSGTDEAPSLGAPDEKFEQEREGKALKFTYKVSRRKNEDTACDALHTLADLSLMMPETATDTESSVQAEEKKAGEAYVSDFKGTDPASMSKSSSLRNSKQRRYGSNDLCNPELERKSPSSSLIQKRRQKALPAKVLKDELAASSQVIEPCNSKGIGEEYKPVGRGKRSASIRNSHEKKSAKSHDHTSSSNNIVEEDESAPSNAVIKKQVNLPTKVRSRRKIVTEKPLTIDDGKISETIVSELSDTQTLFPNDKETAEKFSHCISSFRARRWCIFEWFYSAIDYPWFARQEFVEYLDHVGLGHVPRLTRVEWGVIRSSLGKPRRFSEQFLKEEKEKLYLYRDSVRKHYDELNTGMREGLPMDLARPLNVSQRVICLHPKSREIHDGNVLTVDHCRYRIQFDNPELGVEFVKDTECMPLNPLENMPASLARHYAFSNYHIQNPIEEKMHERAKESMLEGYPKLSCETGHLLSSPNYNISNSLKQEKVDISSSNPQAQDGVDEALALQLFNSQPSSIGQIQAREADVQALSELTRALDKKELVLRELKCMNDEVVESQKDGHNNALKDSESFKKQYAAVLFQLSEINEQVSLALLGLRQRNTYQENVPYSSIRRMSKSGEPDGQLTYEDNNASDTNGFHVSEIVESSRIKARKMVYRAVQALELLRKDENNNVNMEEAIDFVNNQLSIDQTEGSSVQQTQGGQDQRLPSTPNPPSSTPANDSHLNQPDQNDLQVPSDLVSRCIATLLMIQKCTERQFPPSEVAQVLDSAVASLQPCCSQNLPIYTEIQKCMGIIRNQILALVPS

SEQ ID NO: 72347 - protein, 917 aa, Arabidopsis thaliana
  peptide (1)..(917): Ceres Seq. ID no. 4930561
  misc_feature: Pfam Name: DIRP Pfam Description: DIRP
  misc_feature (204)..(759): Homolog of NCBI NO: 19347724 NR Description: unknown protein [Arabidopsis thaliana]
  misc_feature (204)..(759): Homolog of NCBI NO: 15229976 NR Description: unknown protein; protein id: At3g05380.1 thaliana] >gi|7596773|gb|AAF64544.1| unknown protein [Arabidopsis
  misc_feature (89)..(688): Homolog of NCBI NO: 15240995 NR Description: putative protein; protein id: At5g27610.1
  misc_feature (368)..(682): Homolog of NCBI NO: 34903510 NR Description: P0001B06.7 [Oryza sativa (japonica
  misc_feature (1)..(427): Homolog of NCBI NO: 15229976 NR Description: unknown protein; protein id: At3g05380.1 thaliana] >gi|7596773|gb|AAF64544.1| unknown protein [Arabidopsis
  misc_feature (541)..(917): Homolog of NCBI NO: 15229976 NR Description: unknown protein; protein id: At3g05380.1 thaliana] >gi|7596773|gb|AAF64544.1| unknown protein [Arabidopsis
  misc_feature (541)..(917): Homolog of NCBI NO: 19347724 NR Description: unknown protein [Arabidopsis thaliana]
  misc_feature (541)..(915): Homolog of NCBI NO: 15240995 NR Description: putative protein; protein id: At5g27610.1
  misc_feature (1)..(351): Homolog of NCBI NO: 6729048 NR Description: unknown protein, 3' partial [Arabidopsis thaliana]
  misc_feature (312)..(557): Homolog of NCBI NO: 34532584 NR Description: unnamed protein product [Homo sapiens]
MEHEIALALAEASQRGGSTKNSHTPNRKAKMYPPDKKGERMRADIDLAIAKLHATDMEDVRCEPSLGSTEADNADYSGGRNDLTHGEGSSAVEKQQKGRTYYRRRVGIKEEDAKEACSGTDEAPSLGAPDEKFEQEREGKALKFTYKVSRRKNEDTACDALHTLADLSLMMPETATDTESSVQAEEKKAGEAYVSDFKGTDPASMSKSSSLRNSKQRRYGSNDLCNPELERKSPSSSLIQKRRQKALPAKVLKDELAASSQVIEPCNSKGIGEEYKPVGRGKRSASIRNSHEKKSAKSHDHTSSSNNIVEEDESAPSNAVIKKQVNLPTKVRSRRKIVTEKPLTIDDGKISETIVSELSDTQTLFPNDKETAEKFSHCISSFRARRWCIFEWFYSAIDYPWFARQEFVEYLDHVGLGHVPRLTRVEWGVIRSSLGKPRRFSEQFLKEEKEKLYLYRDSVRKHYDELNTGMREGLPMDLARPLNVSQRVICLHPKSREIHDGNVLTVDHCRYRIQFDNPELGVEFVKDTECMPLNPLENMPASLARHYAFSNYHIQNPIEEKMHERAKESMLEGYPKLSCETGHLLSSPNYNISNSLKQEKVDISSSNPQAQDGVDEALALQLFNSQPSSIGQIQAREADVQALSELTRALDKKELVLRELKCMNDEVVESQKDGHNNALKDSESFKKQYAAVLFQLSEINEQVSLALLGLRQRNTYQENVPYSSIRRMSKSGEPDGQLTYEDNNASDTNGFHVSEIVESSRIKARKMVYRAVQALELLRKDENNNVNMEEAIDFVNNQLSIDQTEGSSVQQTQGGQDQRLPSTPNPPSSTPANDSHLNQPDQNDLQVPSDLVSRCIATLLMIQKCTERQFPPSEVAQVLDSAVASLQPCCSQNLPIYTEIQKCMGIIRNQILALVPS

SEQ ID NO: 72348 - protein, 887 aa, Arabidopsis thaliana
  peptide (1)..(887): Ceres Seq. ID no. 4930562
  misc_feature: Pfam Name: DIRP Pfam Description: DIRP
  misc_feature (174)..(729): Homolog of NCBI NO: 19347724 NR Description: unknown protein [Arabidopsis thaliana]
  misc_feature (174)..(729): Homolog of NCBI NO: 15229976 NR Description: unknown protein; protein id: At3g05380.1 thaliana] >gi|7596773|gb|AAF64544.1| unknown protein [Arabidopsis
  misc_feature (59)..(658): Homolog of NCBI NO: 15240995 NR Description: putative protein; protein id: At5g27610.1
  misc_feature (338)..(652): Homolog of NCBI NO: 34903510 NR Description: P0001B06.7 [Oryza sativa (japonica
  misc_feature (1)..(397): Homolog of NCBI NO: 15229976 NR Description: unknown protein; protein id: At3g05380.1 thaliana] >gi|7596773|gb|AAF64544.1| unknown protein [Arabidopsis
  misc_feature (511)..(887): Homolog of NCBI NO: 15229976 NR Description: unknown protein; protein id: At3g05380.1 thaliana] >gi|7596773|gb|AAF64544.1| unknown protein [Arabidopsis
  misc_feature (511)..(887): Homolog of NCBI NO: 19347724 NR Description: unknown protein [Arabidopsis thaliana]
  misc_feature (511)..(885): Homolog of NCBI NO: 15240995 NR Description: putative protein; protein id: At5g27610.1
  misc_feature (1)..(321): Homolog of NCBI NO: 6729048 NR Description: unknown protein, 3' partial [Arabidopsis thaliana]
  misc_feature (282)..(527): Homolog of NCBI NO: 34532584 NR Description: unnamed protein product [Homo sapiens]
MYPPDKKGERMRADIDLAIAKLHATDMEDVRCEPSLGSTEADNADYSGGRNDLTHGEGSSAVEKQQKGRTYYRRRVGIKEEDAKEACSGTDEAPSLGAPDEKFEQEREGKALKFTYKVSRRKNEDTACDALHTLADLSLMMPETATDTESSVQAEEKKAGEAYVSDFKGTDPASMSKSSSLRNSKQRRYGSNDLCNPELERKSPSSSLIQKRRQKALPAKVLKDELAASSQVIEPCNSKGIGEEYKPVGRGKRSASIRNSHEKKSAKSHDHTSSSNNIVEEDESAPSNAVIKKQVNLPTKVRSRRKIVTEKPLTIDDGKISETIVSELSDTQTLFPNDKETAEKFSHCISSFRARRWCIFEWFYSAIDYPWFARQEFVEYLDHVGLGHVPRLTRVEWGVIRSSLGKPRRFSEQFLKEEKEKLYLYRDSVRKHYDELNTGMREGLPMDLARPLNVSQRVICLHPKSREIHDGNVLTVDHCRYRIQFDNPELGVEFVKDTECMPLNPLENMPASLARHYAFSNYHIQNPIEEKMHERAKESMLEGYPKLSCETGHLLSSPNYNISNSLKQEKVDISSSNPQAQDGVDEALALQLFNSQPSSIGQIQAREADVQALSELTRALDKKELVLRELKCMNDEVVESQKDGHNNALKDSESFKKQYAAVLFQLSEINEQVSLALLGLRQRNTYQENVPYSSIRRMSKSGEPDGQLTYEDNNASDTNGFHVSEIVESSRIKARKMVYRAVQALELLRKDENNNVNMEEAIDFVNNQLSIDQTEGSSVQQTQGGQDQRLPSTPNPPSSTPANDSHLNQPDQNDLQVPSDLVSRCIATLLMIQKCTERQFPPSEVAQVLDSAVASLQPCCSQNLPIYTEIQKCMGIIRNQILALVPS

SEQ ID NO: 72349 - DNA, 2643 bp, Arabidopsis thaliana
  misc_feature (1)..(2643): Ceres Seq. ID no. 4930583
  misc_feature: MA Experiment ID: 20000307 Result: Up-regulated in Transcription
  misc_feature: MA Experiment 20000307 PARAMETER Experiment Name: At_Germinating_Seeds_Sub_P Parameter: Age (hr) Value: 24 vs. 0
  misc_feature: MA Experiment 20000307 PARAMETER Experiment Name: At_Germinating_Seeds_Sub_P Parameter: Organism Value: A. thaliana
  misc_feature: MA Experiment 20000307 PARAMETER Experiment Name: At_Germinating_Seeds_Sub_P Parameter: Plant Line Value: WS
  misc_feature: MA Experiment 20000307 PARAMETER Experiment Name: At_Germinating_Seeds_Sub_P Parameter: Tissue Value: Germinating Seeds
  misc_feature: MA Experiment ID: 20000314 Result: Up-regulated in Transcription
  misc_feature: MA Experiment 20000314 PARAMETER Experiment Name: At_14day_Shoots-Roots_Sub_P Parameter: Age (day) Value: 14
  misc_feature: MA Experiment 20000314 PARAMETER Experiment Name: At_14day_Shoots-Roots_Sub_P Parameter: Organism Value: A. thaliana
  misc_feature: MA Experiment 20000314 PARAMETER Experiment Name: At_14day_Shoots-Roots_Sub_P Parameter: Plant Line Value: WS
  misc_feature: MA Experiment 20000314 PARAMETER Experiment Name: At_14day_Shoots-Roots_Sub_P Parameter: Tissue Value: Roots vs. Whole Plant
  misc_feature: Pfam Name: Pkinase Pfam Description: Protein kinase domain
atggagtaccatcctcaagcaattaggttatgtgcgttgatcttcatctctttctatgctcttttacacctcgttgaagcacaagaccaaaaaggattcattagtttggattgcgggtcattgccaaatgagcctccttacaacgatccttcaaccggattaacatactcgacggacgatggtttcgtgcagagtggcaaaactggaagaatccagaaagcgttcgagtcgatcttcagtaaaccgtctttgaagcttagatacttcccggacggattccgaaactgctataccttgaatgtcacgcaagacacaaactatctgatcaaagctgtatttgtgtatggtaactacgatggtcttaacaatcccccgagtttcgatctttaccttggtccgaatctatgggtaacggttgatatgaatggacggaccaatggtactatccaggagattatccacaagaccatatctaagtctctccaggtctgtcttgttaagacaggaacaagctcacctatgattaatacgttagagctacgaccacttaaaaacaatacttacaatactcagagtggctctctgaagtatttcttccgatattatttcagcggttcaggccaaaacatacggtaccctgatgatgtcaatgatcgtaaatggtatccattctttgatgcaaaagagtggacagagttaacaaccaatctgaatataaacagttctaatggttatgcaccaccagaagttgtgatggcgtcagcctcaacgcctataagtacttttggaacatggaacttctcatggttattgccatcttccacaacccaattttatgtgtacatgcattttgccgagattcaaactctacggtccctcgatacccgagaattcaaagtgacgttgaatggaaaacttgcttatgaacgctacagccctaaaacgttagccaccgaaaccattttctattcgacaccacaacaatgtgaagatgggacatgcctcttggagttgacgaaaacacctaagtctactcttcctcctctcatgaacgctcttgaggttttcaccgtgatcgattttccacagatggaaacaaatccagatgatgttgctgctatcaagagtatccaaagcacttatggattaagtaaaatcagctggcaaggagatccatgcgttcctaaacagtttttgtgggagggtttaaactgcaataatctagataactccacgccgcctattgtcacttccttaaacttatcgtcaagtcatttaacggggatcatcgcgcaaggcattcagaatctgacacacctacaagaactagacttgtcaaataacaatttgacgggaggaatacccgaatttcttgctgacataaaatcactcttagtaataaatttaagtgggaacaattttaatggctctattcctcaaatccttttacagaagaaaggactaaagctaattcttgaaggaaacgccaatctgatttgtccggatggattatgtgtaaacaaagctggcaatggtggtgccaagaaaatgaatgttgtaataccgattgttgcatcagttgcgtttgtggttgttcttggatctgcattggcgttcttttttattttcaaaaagaaaaagacatcaaacagtcaagagtcggcaataatgactaagaacagaagatttacatattcggaggttgtaacaatgacaaataactttgaaagagttcttggtaaaggaggatttggaatggtttatcatggaactgtaaataatactgaacaagtagccgttaaaatgctttcacactcatcttctcaaggatataaagaattcaaagcagaggtggaacttcttctcagagttcaccacaaaaatttggttggcctcgttggatattgtgatgaaggagaaaacttggctcttatctacgagtacatggctaacggagacttgagagaacatatgtcaggaaagcgaggtggatctattctaaattgggaaactagactaaaaatagttgtcgagtctgcccaaggtttggaatacttgcataatggatgcaaaccaccaatggttcatagggatgttaaaaccacaaatatattgttgaatgaacacctccatgctaagctagctgattttgggctttcgagatcttttccaattgaaggagaaactcatgtgtcaacagttgttgctggaactcctggataccttgatccagaatattaccgaacaaattggttgaacgagaaaagtgatgtttatagctttggaattgtactattagagatcatcacaaaccaacttgtgatcaatcaaagtcgtgaaaaaccacatatagcagaatgggtggggttaatgcttacaaaaggagacattcaaaacattatggatccaaaactttatggtgattatgactctggttctgtctggagagcagttgaactagcaatgtcatgtctaaatccttcttcagctagaagaccaacaatgtctcaagttgttatcgaattaaacgaatgtttgtcatatgaaaacgcaagaggaggaacgagtcaaaacatgaactcagagagttcaatagaagtcagcatgaactttgatattggagctacccctgatgctcgttag

SEQ ID NO: 72350 - protein, 880 aa, Arabidopsis thaliana
  peptide (1)..(880): Ceres Seq. ID no. 4930584
  misc_feature: Pfam Name: Pkinase Pfam Description: Protein kinase domain
  misc_feature (14)..(880): Homolog of NCBI NO: 25387123 NR Description: probable protein kinase [imported] - Arabidopsis >gi|9802784|gb|AAF99853.1|AC015448_3 Putative protein kinase
  misc_feature (14)..(880): Homolog of NCBI NO: 25387103 NR Description: probable receptor protein kinase [imported] - thaliana >gi|12321669|gb|AAG50871.1|AC025294_9 receptor protein
  misc_feature (10)..(880): Homolog of NCBI NO: 15222042 NR Description: light repressible receptor protein kinase,
  misc_feature (9)..(880): Homolog of NCBI NO: 25387119 NR Description: probable protein kinase [imported] - Arabidopsis >gi|9802783|gb|AAF99852.1|AC015448_2 Putative protein kinase
  misc_feature (14)..(880): Homolog of NCBI NO: 22330177 NR Description: receptor protein kinase, putative; protein id:
  misc_feature (9)..(852): Homolog of NCBI NO: 15218046 NR Description: light repressible receptor protein kinase,
  misc_feature (1)..(880): Homolog of NCBI NO: 25387154 NR Description: protein F22G5.6 [imported] - Arabidopsis thaliana
  misc_feature (20)..(846): Homolog of NCBI NO: 8778538 NR Description: F22G5.7 [Arabidopsis thaliana]
  misc_feature (210)..(873): Homolog of NCBI NO: 15220696 NR Description: hypothetical protein; protein id: At1g62090.1
  misc_feature (13)..(575): Homolog of NCBI NO: 34895444 NR Description: putative serine/threonine-specific receptor
MEYHPQAIRLCALIFISFYALLHLVEAQDQKGFISLDCGSLPNEPPYNDPSTGLTYSTDDGFVQSGKTGRIQKAFESIFSKPSLKLRYFPDGFRNCYTLNVTQDTNYLIKAVFVYGNYDGLNNPPSFDLYLGPNLWVTVDMNGRTNGTIQEIIHKTISKSLQVCLVKTGTSSPMINTLELRPLKNNTYNTQSGSLKYFFRYYFSGSGQNIRYPDDVNDRKWYPFFDAKEWTELTTNLNINSSNGYAPPEVVMASASTPISTFGTWNFSWLLPSSTTQFYVYMHFAEIQTLRSLDTREFKVTLNGKLAYERYSPKTLATETIFYSTPQQCEDGTCLLELTKTPKSTLPPLMNALEVFTVIDFPQMETNPDDVAAIKSIQSTYGLSKISWQGDPCVPKQFLWEGLNCNNLDNSTPPIVTSLNLSSSHLTGIIAQGIQNLTHLQELDLSNNNLTGGIPEFLADIKSLLVINLSGNNFNGSIPQILLQKKGLKLILEGNANLICPDGLCVNKAGNGGAKKMNVVIPIVASVAFVVVLGSALAFFFIFKKKKTSNSQESAIMTKNRRFTYSEVVTMTNNFERVLGKGGFGMVYHGTVNNTEQVAVKMLSHSSSQGYKEFKAEVELLLRVHHKNLVGLVGYCDEGENLALIYEYMANGDLREHMSGKRGGSILNWETRLKIVVESAQGLEYLHNGCKPPMVHRDVKTTNILLNEHLHAKLADFGLSRSFPIEGETHVSTVVAGTPGYLDPEYYRTNWLNEKSDVYSFGIVLLEIITNQLVINQSREKPHIAEWVGLMLTKGDIQNIMDPKLYGDYDSGSVWRAVELAMSCLNPSSARRPTMSQVVIELNECLSYENARGGTSQNMNSESSIEVSMNFDIGATPDAR

SEQ ID NO: 72351 - protein, 740 aa, Arabidopsis thaliana
  peptide (1)..(740): Ceres Seq. ID no. 4930585
  misc_feature: Pfam Name: Pkinase Pfam Description: Protein kinase domain
  misc_feature (1)..(740): Homolog of NCBI NO: 25387123 NR Description: probable protein kinase [imported] - Arabidopsis >gi|9802784|gb|AAF99853.1|AC015448_3 Putative protein kinase
  misc_feature (1)..(740): Homolog of NCBI NO: 25387103 NR Description: probable receptor protein kinase [imported] - thaliana >gi|12321669|gb|AAG50871.1|AC025294_9 receptor protein
  misc_feature (1)..(740): Homolog of NCBI NO: 15222042 NR Description: light repressible receptor protein kinase,
  misc_feature (1)..(740): Homolog of NCBI NO: 25387119 NR Description: probable protein kinase [imported] - Arabidopsis >gi|9802783|gb|AAF99852.1|AC015448_2 Putative protein kinase
  misc_feature (1)..(740): Homolog of NCBI NO: 22330177 NR Description: receptor protein kinase, putative; protein id:
  misc_feature (1)..(712): Homolog of NCBI NO: 15218046 NR Description: light repressible receptor protein kinase,
  misc_feature (1)..(740): Homolog of NCBI NO: 25387154 NR Description: protein F22G5.6 [imported] - Arabidopsis thaliana
  misc_feature (1)..(706): Homolog of NCBI NO: 8778538 NR Description: F22G5.7 [Arabidopsis thaliana]
  misc_feature (70)..(733): Homolog of NCBI NO: 15220696 NR Description: hypothetical protein; protein id: At1g62090.1
  misc_feature (1)..(435): Homolog of NCBI NO: 34895444 NR Description: putative serine/threonine-specific receptor
MNGRTNGTIQEIIHKTISKSLQVCLVKTGTSSPMINTLELRPLKNNTYNTQSGSLKYFFRYYFSGSGQNIRYPDDVNDRKWYPFFDAKEWTELTTNLNINSSNGYAPPEVVMASASTPISTFGTWNFSWLLPSSTTQFYVYMHFAEIQTLRSLDTREFKVTLNGKLAYERYSPKTLATETIFYSTPQQCEDGTCLLELTKTPKSTLPPLMNALEVFTVIDFPQMETNPDDVAAIKSIQSTYGLSKISWQGDPCVPKQFLWEGLNCNNLDNSTPPIVTSLNLSSSHLTGIIAQGIQNLTHLQELDLSNNNLTGGIPEFLADIKSLLVINLSGNNFNGSIPQILLQKKGLKLILEGNANLICPDGLCVNKAGNGGAKKMNVVIPIVASVAFVVVLGSALAFFFIFKKKKTSNSQESAIMTKNRRFTYSEVVTMTNNFERVLGKGGFGMVYHGTVNNTEQVAVKMLSHSSSQGYKEFKAEVELLLRVHHKNLVGLVGYCDEGENLALIYEYMANGDLREHMSGKRGGSILNWETRLKIVVESAQGLEYLHNGCKPPMVHRDVKTTNILLNEHLHAKLADFGLSRSFPIEGETHVSTVVAGTPGYLDPEYYRTNWLNEKSDVYSFGIVLLEIITNQLVINQSREKPHIAEWVGLMLTKGDIQNIMDPKLYGDYDSGSVWRAVELAMSCLNPSSARRPTMSQVVIELNECLSYENARGGTSQNMNSESSIEVSMNFDIGATPDAR

SEQ ID NO: 72352 - protein, 707 aa, Arabidopsis thaliana
  peptide (1)..(707): Ceres Seq. ID no. 4930586
  misc_feature: Pfam Name: Pkinase Pfam Description: Protein kinase domain
  misc_feature (1)..(707): Homolog of NCBI NO: 25387123 NR Description: probable protein kinase [imported] - Arabidopsis >gi|9802784|gb|AAF99853.1|AC015448_3 Putative protein kinase
  misc_feature (1)..(707): Homolog of NCBI NO: 25387103 NR Description: probable receptor protein kinase [imported] - thaliana >gi|12321669|gb|AAG50871.1|AC025294_9 receptor protein
  misc_feature (1)..(707): Homolog of NCBI NO: 15222042 NR Description: light repressible receptor protein kinase,
  misc_feature (1)..(707): Homolog of NCBI NO: 25387119 NR Description: probable protein kinase [imported] - Arabidopsis >gi|9802783|gb|AAF99852.1|AC015448_2 Putative protein kinase
  misc_feature (1)..(707): Homolog of NCBI NO: 22330177 NR Description: receptor protein kinase, putative; protein id:
  misc_feature (1)..(679): Homolog of NCBI NO: 15218046 NR Description: light repressible receptor protein kinase,
  misc_feature (1)..(707): Homolog of NCBI NO: 25387154 NR Description: protein F22G5.6 [imported] - Arabidopsis thaliana
  misc_feature (1)..(673): Homolog of NCBI NO: 8778538 NR Description: F22G5.7 [Arabidopsis thaliana]
  misc_feature (37)..(700): Homolog of NCBI NO: 15220696 NR Description: hypothetical protein; protein id: At1g62090.1
  misc_feature (1)..(402): Homolog of NCBI NO: 34895444 NR Description: putative serine/threonine-specific receptor
MINTLELRPLKNNTYNTQSGSLKYFFRYYFSGSGQNIRYPDDVNDRKWYPFFDAKEWTELTTNLNINSSNGYAPPEVVMASASTPISTFGTWNFSWLLPSSTTQFYVYMHFAEIQTLRSLDTREFKVTLNGKLAYERYSPKTLATETIFYSTPQQCEDGTCLLELTKTPKSTLPPLMNALEVFTVIDFPQMETNPDDVAAIKSIQSTYGLSKISWQGDPCVPKQFLWEGLNCNNLDNSTPPIVTSLNLSSSHLTGIIAQGIQNLTHLQELDLSNNNLTGGIPEFLADIKSLLVINLSGNNFNGSIPQILLQKKGLKLILEGNANLICPDGLCVNKAGNGGAKKMNVVIPIVASVAFVVVLGSALAFFFIFKKKKTSNSQESAIMTKNRRFTYSEVVTMTNNFERVLGKGGFGMVYHGTVNNTEQVAVKMLSHSSSQGYKEFKAEVELLLRVHHKNLVGLVGYCDEGENLALIYEYMANGDLREHMSGKRGGSILNWETRLKIVVESAQGLEYLHNGCKPPMVHRDVKTTNILLNEHLHAKLADFGLSRSFPIEGETHVSTVVAGTPGYLDPEYYRTNWLNEKSDVYSFGIVLLEIITNQLVINQSREKPHIAEWVGLMLTKGDIQNIMDPKLYGDYDSGSVWRAVELAMSCLNPSSARRPTMSQVVIELNECLSYENARGGTSQNMNSESSIEVSMNFDIGATPDAR

SEQ ID NO: 72353 - DNA, 1132 bp, Arabidopsis thaliana
  misc_feature (1)..(1132): Ceres Seq. ID no. 4930668
  misc_feature: MA Experiment ID: 20000315 Result: Down-regulated in Transcription
  misc_feature: MA Experiment 20000315 PARAMETER Experiment Name: At_14day_Shoots-Roots_Sub_P Parameter: Age (day) Value: 14
  misc_feature: MA Experiment 20000315 PARAMETER Experiment Name: At_14day_Shoots-Roots_Sub_P Parameter: Organism Value: A. thaliana
  misc_feature: MA Experiment 20000315 PARAMETER Experiment Name: At_14day_Shoots-Roots_Sub_P Parameter: Plant Line Value: WS
  misc_feature: MA Experiment 20000315 PARAMETER Experiment Name: At_14day_Shoots-Roots_Sub_P Parameter: Tissue Value: Shoots vs. Whole Plant
  misc_feature: MA Experiment ID: 20000440 Result: Up-regulated in Transcription
  misc_feature: MA Experiment 20000440 PARAMETER Experiment Name: At_Closed-Flower__Sub_P Parameter: Tissue Value: Closed Flower vs. Whole Plant
aatcgaattttattgtgtggccagaaactgacaacttccagcattgtactattaccattttttttatagaaaaagatgaacttcactttagagcaataacaatccctcgagtctcccctatataaagattccaactctttaacgattcatctattgaaaaaacacacacaccaaaaatatcagatatctcaaacaatgtcttcagtttttggatctgtccatatcttggccatgatagccatacaactcctccttatacacagtgtttcgtctctgaaccttacaaatgcgtatctgcaccacaaatgcagcaacactcaaggaaaatataagcaggggagtgcgttcgagaaaaatctcaacttagtcctcagtaccatcacctcgattggaaattttcgtgacggtttccgctacaccgaagaaggtgaggatcccaataacgtctttgtcatgttccagtgtcgcggcgactcctactggtccaagtgccccccttgcattagcaccgctgtctctgggcttcgtaggagatgtccaagaaataagggagcaataatatggtatgaccaatgtcttttaaagatatcttcagtcgcctccttcaataagatagattatgagaacgatttctatttgtccaacccaaaaaacatgagtgatcgggagttgttcaacaaggagacgtcggctctcctggagaagctggcaaataaagcctccgatagaaacaacttggatggtaaacaattggtgttgtacgcagcaggggagaagagaattgggacaaagaaggtgtctgcaatggtgcagtgtacgaaagacttaatatttacaaagtgctttgagtgtttggaagggattttgaggaagtttccagagtgttgtgacggtaaacaaggagggagagttttgggtacgagctgtaactttaggtatgagttatatccttttcttagaaactaacaacaacagtacaatgagagctccatattaaatgaaagggttctagagataaacagtcttataatatacactgtgttgcattttagtacgtgaacttaattgagcgaataaatgtactttcctctttgggatttttgtttttttttgtgaacttgagttattgaga

SEQ ID NO: 72354 - protein, 256 aa, Arabidopsis thaliana
  peptide (1)..(256): Ceres Seq. ID no. 4930669
  misc_feature (84)..(138): Pfam Name: Domain of unknown function DUF26 Pfam Description: Domain of unknown function DUF26
  misc_feature (1)..(256): Homolog of NCBI NO: 15233235 NR Description: receptor kinase common family, putative; protein At3g21990.1 [Arabidopsis thaliana] >gi|9279756|dbj|BAB01382.1| similarity to receptor kinase~gene_id:MZN24.17 [Arabidopsis
  misc_feature (1)..(256): Homolog of NCBI NO: 15233366 NR Description: pollen coat receptor kinase, putative; protein At4g20670.1 [Arabidopsis thaliana] >gi|7485931|pir||T10609
  misc_feature (1)..(247): Homolog of NCBI NO: 15233364 NR Description: receptor kinase common family, 3' partial, protein id: At4g20650.1 [Arabidopsis thaliana]
  misc_feature (1)..(247): Homolog of NCBI NO: 18415518 NR Description: putative protein; protein id: At4g20530.1 thaliana] >gi|18415520|ref|NP_567604.1| putative protein; protein At4g20540.1 [Arabidopsis thaliana] >gi|18415522|ref|NP_567605.1|
  misc_feature (135)..(256): Homolog of NCBI NO: 15233231 NR Description: hypothetical protein; protein id: At3g21980.1
  misc_feature (1)..(110): Homolog of NCBI NO: 15233231 NR Description: hypothetical protein; protein id: At3g21980.1
  misc_feature (1)..(240): Homolog of NCBI NO: 9279755 NR Description: emb|CAB45833.1~gene_id:MZN24.16~similar to
  misc_feature (11)..(255): Homolog of NCBI NO: 15233368 NR Description: putative protein; protein id: At4g20680.1
  misc_feature (11)..(255): Homolog of NCBI NO: 15233236 NR Description: hypothetical protein; protein id: At3g22000.1 thaliana] >gi|9279757|dbj|BAB01383.1| contains similarity to
  misc_feature (145)..(256): Homolog of NCBI NO: 9279754 NR Description: emb|CAB45833.1~gene_id:MZN24.15~similar to
MSSVFGSVHILAMIAIQLLLIHSVSSLNLTNAYLHHKCSNTQGKYKQGSAFEKNLNLVLSTITSIGNFRDGFRYTEEGEDPNNVFVMFQCRGDSYWSKCPPCISTAVSGLRRRCPRNKGAIIWYDQCLLKISSVASFNKIDYENDFYLSNPKNMSDRELFNKETSALLEKLANKASDRNNLDGKQLVLYAAGEKRIGTKKVSAMVQCTKDLIFTKCFECLEGILRKFPECCDGKQGGRVLGTSCNFRYELYPFLRN

SEQ ID NO: 72355 - protein, 244 aa, Arabidopsis thaliana
  peptide (1)..(244): Ceres Seq. ID no. 4930670
  misc_feature (72)..(126): Pfam Name: Domain of unknown function DUF26 Pfam Description: Domain of unknown function DUF26
  misc_feature (1)..(244): Homolog of NCBI NO: 15233235 NR Description: receptor kinase common family, putative; protein At3g21990.1 [Arabidopsis thaliana] >gi|9279756|dbj|BAB01382.1| similarity to receptor kinase~gene_id:MZN24.17 [Arabidopsis
  misc_feature (1)..(244): Homolog of NCBI NO: 15233366 NR Description: pollen coat receptor kinase, putative; protein At4g20670.1 [Arabidopsis thaliana] >gi|7485931|pir||T10609
  misc_feature (1)..(235): Homolog of NCBI NO: 15233364 NR Description: receptor kinase common family, 3' partial, protein id: At4g20650.1 [Arabidopsis thaliana]
  misc_feature (1)..(235): Homolog of NCBI NO: 18415518 NR Description: putative protein; protein id: At4g20530.1 thaliana] >gi|18415520|ref|NP_567604.1| putative protein; protein At4g20540.1 [Arabidopsis thaliana] >gi|18415522|ref|NP_567605.1|
  misc_feature (123)..(244): Homolog of NCBI NO: 15233231 NR Description: hypothetical protein; protein id: At3g21980.1
  misc_feature (1)..(98): Homolog of NCBI NO: 15233231 NR Description: hypothetical protein; protein id: At3g21980.1
  misc_feature (1)..(228): Homolog of NCBI NO: 9279755 NR Description: emb|CAB45833.1~gene_id:MZN24.16~similar to
  misc_feature (1)..(243): Homolog of NCBI NO: 15233368 NR Description: putative protein; protein id: At4g20680.1
  misc_feature (1)..(243): Homolog of NCBI NO: 15233236 NR Description: hypothetical protein; protein id: At3g22000.1 thaliana] >gi|9279757|dbj|BAB01383.1| contains similarity to
  misc_feature (133)..(244): Homolog of NCBI NO: 9279754 NR Description: emb|CAB45833.1~gene_id:MZN24.15~similar to
MIAIQLLLIHSVSSLNLTNAYLHHKCSNTQGKYKQGSAFEKNLNLVLSTITSIGNFRDGFRYTEEGEDPNNVFVMFQCRGDSYWSKCPPCISTAVSGLRRRCPRNKGAIIWYDQCLLKISSVASFNKIDYENDFYLSNPKNMSDRELFNKETSALLEKLANKASDRNNLDGKQLVLYAAGEKRIGTKKVSAMVQCTKDLIFTKCFECLEGILRKFPECCDGKQGGRVLGTSCNFRYELYPFLRN

SEQ ID NO: 72356 - protein, 170 aa, Arabidopsis thaliana
  peptide (1)..(170): Ceres Seq. ID no. 4930671
  misc_feature (1)..(52): Pfam Name: Domain of unknown function DUF26 Pfam Description: Domain of unknown function DUF26
  misc_feature (1)..(170): Homolog of NCBI NO: 15233235 NR Description: receptor kinase common family, putative; protein At3g21990.1 [Arabidopsis thaliana] >gi|9279756|dbj|BAB01382.1| similarity to receptor kinase~gene_id:MZN24.17 [Arabidopsis
  misc_feature (1)..(170): Homolog of NCBI NO: 15233366 NR Description: pollen coat receptor kinase, putative; protein At4g20670.1 [Arabidopsis thaliana] >gi|7485931|pir||T10609
  misc_feature (1)..(161): Homolog of NCBI NO: 15233364 NR Description: receptor kinase common family, 3' partial, protein id: At4g20650.1 [Arabidopsis thaliana]
  misc_feature (1)..(161): Homolog of NCBI NO: 18415518 NR Description: putative protein; protein id: At4g20530.1 thaliana] >gi|18415520|ref|NP_567604.1| putative protein; protein At4g20540.1 [Arabidopsis thaliana] >gi|18415522|ref|NP_567605.1|
  misc_feature (49)..(170): Homolog of NCBI NO: 15233231 NR Description: hypothetical protein; protein id: At3g21980.1
  misc_feature (1)..(24): Homolog of NCBI NO: 15233231 NR Description: hypothetical protein; protein id: At3g21980.1
  misc_feature (1)..(154): Homolog of NCBI NO: 9279755 NR Description: emb|CAB45833.1~gene_id:MZN24.16~similar to
  misc_feature (1)..(169): Homolog of NCBI NO: 15233368 NR Description: putative protein; protein id: At4g20680.1
  misc_feature (1)..(169): Homolog of NCBI NO: 15233236 NR Description: hypothetical protein; protein id: At3g22000.1 thaliana] >gi|9279757|dbj|BAB01383.1| contains similarity to
  misc_feature (59)..(170): Homolog of NCBI NO: 9279754 NR Description: emb|CAB45833.1~gene_id:MZN24.15~similar to
MFQCRGDSYWSKCPPCISTAVSGLRRRCPRNKGAIIWYDQCLLKISSVASFNKIDYENDFYLSNPKNMSDRELFNKETSALLEKLANKASDRNNLDGKQLVLYAAGEKRIGTKKVSAMVQCTKDLIFTKCFECLEGILRKFPECCDGKQGGRVLGTSCNFRYELYPFLRN

SEQ ID NO: 72357 - DNA, 585 bp, Arabidopsis thaliana
  misc_feature (1)..(585): Ceres Seq. ID no. 4930731
  misc_feature: MA Experiment ID: 20000171 Result: Up-regulated in Transcription
  misc_feature: MA Experiment 20000171 PARAMETER Experiment Name: At_42deg_Heat_P Parameter: Age (day) Value: 14
  misc_feature: MA Experiment 20000171 PARAMETER Experiment Name: At_42deg_Heat_P Parameter: Organism Value: A. thaliana
  misc_feature: MA Experiment 20000171 PARAMETER Experiment Name: At_42deg_Heat_P Parameter: Plant Line Value: WS
  misc_feature: MA Experiment 20000171 PARAMETER Experiment Name: At_42deg_Heat_P Parameter: Temperature (deg C) Value: 42 vs. 22
  misc_feature: MA Experiment 20000171 PARAMETER Experiment Name: At_42deg_Heat_P Parameter: Timepoint (hr) Value: 1
  misc_feature: MA Experiment 20000171 PARAMETER Experiment Name: At_42deg_Heat_P Parameter: Tissue Value: Aerial
  misc_feature: MA Experiment ID: 20000173 Result: Up-regulated in Transcription
  misc_feature: MA Experiment 20000173 PARAMETER Experiment Name: At_42deg_Heat_P Parameter: Age (day) Value: 14
  misc_feature: MA Experiment 20000173 PARAMETER Experiment Name: At_42deg_Heat_P Parameter: Organism Value: A. thaliana
  misc_feature: MA Experiment 20000173 PARAMETER Experiment Name: At_42deg_Heat_P Parameter: Plant Line Value: WS
  misc_feature: MA Experiment 20000173 PARAMETER Experiment Name: At_42deg_Heat_P Parameter: Temperature (deg C) Value: 42 vs. 22
  misc_feature: MA Experiment 20000173 PARAMETER Experiment Name: At_42deg_Heat_P Parameter: Timepoint (hr) Value: 6
  misc_feature: MA Experiment 20000173 PARAMETER Experiment Name: At_42deg_Heat_P Parameter: Tissue Value: Aerial
atgagtatcttaaccacaaatgcttcgtcagtgaagggaaatataagcatggtgataagtacgagaataacctcaacgttctcaacaagaatgtcctttcttatgatcttactagcggttttctacacgtttctcatggcgagggtcctgattccgtcaccatcatattacaatgtcgtggcgactccttcgggtcgaattgccgctcttgctataccaccgccatcgacggggaagattgatttcaaaaacactttctcaatgcacaacccaaacaacgtgagcagtgaaccaggatcgtttgacaagatgacaagggatttcctctacaagctggtgcagaaagcctcttatccaaccgtggtcgaacaccagtctacatattatgctgcgggggagaaaaaactcgggaaaaggaagctgtatgcaatgatgcagtgtgcatcggacatattgcaatgtaaggtttgtttggaatggtgtatcagagagcttcccaagtgttgtgatggtaaacaaggagggagaattttgggtatgagttgtaatcttaggtatgagctatacccttttcttcggcgttaa

SEQ ID NO: 72358 - protein, 194 aa, Arabidopsis thaliana
  peptide (1)..(194): Ceres Seq. ID no. 4930732
  misc_feature (141)..(193): Pfam Name: Domain of unknown function DUF26 Pfam Description: Domain of unknown function DUF26
  misc_feature (72)..(194): Homolog of NCBI NO: 9279762 NR Description: emb|CAB45834.1~gene_id:MZN24.23~similar to
  misc_feature (1)..(194): Homolog of NCBI NO: 15233242 NR Description: hypothetical protein; protein id: At3g22050.1
  misc_feature (79)..(193): Homolog of NCBI NO: 15233241 NR Description: hypothetical protein; protein id: At3g22040.1 thaliana] >gi|9279761|dbj|BAB01387.1|
  misc_feature (76)..(193): Homolog of NCBI NO: 9279760 NR Description: emb|CAB45834.1~gene_id:MZN24.21~similar to
  misc_feature (67)..(193): Homolog of NCBI NO: 15233368 NR Description: putative protein; protein id: At4g20680.1
  misc_feature (67)..(193): Homolog of NCBI NO: 15233236 NR Description: hypothetical protein; protein id: At3g22000.1 thaliana] >gi|9279757|dbj|BAB01383.1| contains similarity to
  misc_feature (79)..(192): Homolog of NCBI NO: 9279746 NR Description: contains similarity to receptor protein
  misc_feature (74)..(193): Homolog of NCBI NO: 15233239 NR Description: hypothetical protein; protein id: At3g22020.1 thaliana] >gi|9279759|dbj|BAB01385.1|
  misc_feature (79)..(193): Homolog of NCBI NO: 15233238 NR Description: hypothetical protein; protein id: At3g22010.1 thaliana] >gi|9279758|dbj|BAB01384.1| contains similarity to
  misc_feature (76)..(193): Homolog of NCBI NO: 15233366 NR Description: pollen coat receptor kinase, putative; protein At4g20670.1 [Arabidopsis thaliana] >gi|7485931|pir||T10609
MSILTTNASSVKGNISMVISTRITSTFSTRMSFLMILLAVFYTFLMARVLIPSPSYYNVVATPSGRIAALAIPPPSTGKIDFKNTFSMHNPNNVSSEPGSFDKMTRDFLYKLVQKASYPTVVEHQSTYYAAGEKKLGKRKLYAMMQCASDILQCKVCLEWCIRELPKCCDGKQGGRILGMSCNLRYELYPFLRR

SEQ ID NO: 72359 - protein, 178 aa, Arabidopsis thaliana
  peptide (1)..(178): Ceres Seq. ID no. 4930733
  misc_feature (125)..(177): Pfam Name: Domain of unknown function DUF26 Pfam Description: Domain of unknown function DUF26
  misc_feature (56)..(178): Homolog of NCBI NO: 9279762 NR Description: emb|CAB45834.1~gene_id:MZN24.23~similar to
  misc_feature (1)..(178): Homolog of NCBI NO: 15233242 NR Description: hypothetical protein; protein id: At3g22050.1
  misc_feature (63)..(177): Homolog of NCBI NO: 15233241 NR Description: hypothetical protein; protein id: At3g22040.1 thaliana] >gi|9279761|dbj|BAB01387.1|
  misc_feature (60)..(177): Homolog of NCBI NO: 9279760 NR Description: emb|CAB45834.1~gene_id:MZN24.21~similar to
  misc_feature (51)..(177): Homolog of NCBI NO: 15233368 NR Description: putative protein; protein id: At4g20680.1
  misc_feature (51)..(177): Homolog of NCBI NO: 15233236 NR Description: hypothetical protein; protein id: At3g22000.1 thaliana] >gi|9279757|dbj|BAB01383.1| contains similarity to
  misc_feature (63)..(176): Homolog of NCBI NO: 9279746 NR Description: contains similarity to receptor protein
  misc_feature (58)..(177): Homolog of NCBI NO: 15233239 NR Description: hypothetical protein; protein id: At3g22020.1 thaliana] >gi|9279759|dbj|BAB01385.1|
  misc_feature (63)..(177): Homolog of NCBI NO: 15233238 NR Description: hypothetical protein; protein id: At3g22010.1 thaliana] >gi|9279758|dbj|BAB01384.1| contains similarity to
  misc_feature (60)..(177): Homolog of NCBI NO: 15233366 NR Description: pollen coat receptor kinase, putative; protein At4g20670.1 [Arabidopsis thaliana] >gi|7485931|pir||T10609
MVISTRITSTFSTRMSFLMILLAVFYTFLMARVLIPSPSYYNVVATPSGRIAALAIPPPSTGKIDFKNTFSMHNPNNVSSEPGSFDKMTRDFLYKLVQKASYPTVVEHQSTYYAAGEKKLGKRKLYAMMQCASDILQCKVCLEWCIRELPKCCDGKQGGRILGMSCNLRYELYPFLRR

SEQ ID NO: 72360 - protein, 164 aa, Arabidopsis thaliana
  peptide (1)..(164): Ceres Seq. ID no. 4930734
  misc_feature (111)..(163): Pfam Name: Domain of unknown function DUF26 Pfam Description: Domain of unknown function DUF26
  misc_feature (42)..(164): Homolog of NCBI NO: 9279762 NR Description: emb|CAB45834.1~gene_id:MZN24.23~similar to
  misc_feature (1)..(164): Homolog of NCBI NO: 15233242 NR Description: hypothetical protein; protein id: At3g22050.1
  misc_feature (49)..(163): Homolog of NCBI NO: 15233241 NR Description: hypothetical protein; protein id: At3g22040.1 thaliana] >gi|9279761|dbj|BAB01387.1|
  misc_feature (46)..(163): Homolog of NCBI NO: 9279760 NR Description: emb|CAB45834.1~gene_id:MZN24.21~similar to
  misc_feature (37)..(163): Homolog of NCBI NO: 15233368 NR Description: putative protein; protein id: At4g20680.1
  misc_feature (37)..(163): Homolog of NCBI NO: 15233236 NR Description: hypothetical protein; protein id: At3g22000.1 thaliana] >gi|9279757|dbj|BAB01383.1| contains similarity to
  misc_feature (49)..(162): Homolog of NCBI NO: 9279746 NR Description: contains similarity to receptor protein
  misc_feature (44)..(163): Homolog of NCBI NO: 15233239 NR Description: hypothetical protein; protein id: At3g22020.1 thaliana] >gi|9279759|dbj|BAB01385.1|
  misc_feature (49)..(163): Homolog of NCBI NO: 15233238 NR Description: hypothetical protein; protein id: At3g22010.1 thaliana] >gi|9279758|dbj|BAB01384.1| contains similarity to
  misc_feature (46)..(163): Homolog of NCBI NO: 15233366 NR Description: pollen coat receptor kinase, putative; protein At4g20670.1 [Arabidopsis thaliana] >gi|7485931|pir||T10609
MSFLMILLAVFYTFLMARVLIPSPSYYNVVATPSGRIAALAIPPPSTGKIDFKNTFSMHNPNNVSSEPGSFDKMTRDFLYKLVQKASYPTVVEHQSTYYAAGEKKLGKRKLYAMMQCASDILQCKVCLEWCIRELPKCCDGKQGGRILGMSCNLRYELYPFLRR

SEQ ID NO: 72361 - DNA, 672 bp, Arabidopsis thaliana
  misc_feature (1)..(672): Ceres Seq. ID no. 4930739
  misc_feature: MA Experiment ID: 20000440 Result: Up-regulated in Transcription
  misc_feature: MA Experiment 20000440 PARAMETER Experiment Name: At_Closed-Flower__Sub_P Parameter: Tissue Value: Closed Flower vs. Whole Plant
atgcgtatttgcaccacaaatgcctcactcgtcaagggaaatataagccgagaagcccgtacgaggaaaaccttaattatctcatcgatcatatctctaagtatcattttcgggacggtttcagacacagcgcatggtgaggctccgaattccggcaactttgtattccaatgccgtggagactcctacgggtctatatgcggttcttgctatgccaccgctgtggccgggcttcgtaagagatgtcagagatacaaaggagcaataatatggtatgatcaatgttttctcaaagtaagtacgatcaactcccctccaacgaagatggattacgagaatactttttctatgcacaacccaaacaacatcaacggggatactcagttgttcaaccaaaagatgaagaatttcctctatgagctagcgctgaaagcggataaacccaaagcggacggtaccggtttgctatattacgcggcagggacgaagaggctcgggaagaataaactgtatgcaatggtgcagtgtactttagacatatttcattgtaaggtttgtttggaatggagtattaaggagctttcaaagtgttgtgaaggtaaacaaggagcgagagttttgggaacgagttgtaatgttaggtatgagttatacccttttattaggacctaa

SEQ ID NO: 72362 - protein, 223 aa, Arabidopsis thaliana
  peptide (1)..(223): Ceres Seq. ID no. 4930740
  misc_feature (52)..(106): Pfam Name: Domain of unknown function DUF26 Pfam Description: Domain of unknown function DUF26
  misc_feature (1)..(223): Homolog of NCBI NO: 15233239 NR Description: hypothetical protein; protein id: At3g22020.1 thaliana] >gi|9279759|dbj|BAB01385.1|
  misc_feature (26)..(223): Homolog of NCBI NO: 15233241 NR Description: hypothetical protein; protein id: At3g22040.1 thaliana] >gi|9279761|dbj|BAB01387.1|
  misc_feature (29)..(222): Homolog of NCBI NO: 9279762 NR Description: emb|CAB45834.1~gene_id:MZN24.23~similar to
  misc_feature (51)..(223): Homolog of NCBI NO: 9279760 NR Description: emb|CAB45834.1~gene_id:MZN24.21~similar to
  misc_feature (25)..(222): Homolog of NCBI NO: 15233366 NR Description: pollen coat receptor kinase, putative; protein At4g20670.1 [Arabidopsis thaliana] >gi|7485931|pir||T10609
  misc_feature (25)..(222): Homolog of NCBI NO: 15233235 NR Description: receptor kinase common family, putative; protein At3g21990.1 [Arabidopsis thaliana] >gi|9279756|dbj|BAB01382.1| similarity to receptor kinase~gene_id:MZN24.17 [Arabidopsis
  misc_feature (25)..(223): Homolog of NCBI NO: 15233238 NR Description: hypothetical protein; protein id: At3g22010.1 thaliana] >gi|9279758|dbj|BAB01384.1| contains similarity to
  misc_feature (38)..(223): Homolog of NCBI NO: 15233368 NR Description: putative protein; protein id: At4g20680.1
  misc_feature (26)..(221): Homolog of NCBI NO: 9279746 NR Description: contains similarity to receptor protein
  misc_feature (38)..(223): Homolog of NCBI NO: 15233236 NR Description: hypothetical protein; protein id: At3g22000.1 thaliana] >gi|9279757|dbj|BAB01383.1| contains similarity to
MRICTTNASLVKGNISREARTRKTLIISSIISLSIIFGTVSDTAHGEAPNSGNFVFQCRGDSYGSICGSCYATAVAGLRKRCQRYKGAIIWYDQCFLKVSTINSPPTKMDYENTFSMHNPNNINGDTQLFNQKMKNFLYELALKADKPKADGTGLLYYAAGTKRLGKNKLYAMVQCTLDIFHCKVCLEWSIKELSKCCEGKQGARVLGTSCNVRYELYPFIRT

SEQ ID NO: 72363 - protein, 115 aa, Arabidopsis thaliana
  peptide (1)..(115): Ceres Seq. ID no. 4930741
  misc_feature (1)..(115): Homolog of NCBI NO: 15233239 NR Description: hypothetical protein; protein id: At3g22020.1 thaliana] >gi|9279759|dbj|BAB01385.1|
  misc_feature (1)..(115): Homolog of NCBI NO: 15233241 NR Description: hypothetical protein; protein id: At3g22040.1 thaliana] >gi|9279761|dbj|BAB01387.1|
  misc_feature (1)..(114): Homolog of NCBI NO: 9279762 NR Description: emb|CAB45834.1~gene_id:MZN24.23~similar to
  misc_feature (1)..(115): Homolog of NCBI NO: 9279760 NR Description: emb|CAB45834.1~gene_id:MZN24.21~similar to
  misc_feature (1)..(114): Homolog of NCBI NO: 15233366 NR Description: pollen coat receptor kinase, putative; protein At4g20670.1 [Arabidopsis thaliana] >gi|7485931|pir||T10609
  misc_feature (1)..(114): Homolog of NCBI NO: 15233235 NR Description: receptor kinase common family, putative; protein At3g21990.1 [Arabidopsis thaliana] >gi|9279756|dbj|BAB01382.1| similarity to receptor kinase~gene_id:MZN24.17 [Arabidopsis
  misc_feature (1)..(115): Homolog of NCBI NO: 15233238 NR Description: hypothetical protein; protein id: At3g22010.1 thaliana] >gi|9279758|dbj|BAB01384.1| contains similarity to
  misc_feature (1)..(115): Homolog of NCBI NO: 15233368 NR Description: putative protein; protein id: At4g20680.1
  misc_feature (1)..(113): Homolog of NCBI NO: 9279746 NR Description: contains similarity to receptor protein
  misc_feature (1)..(115): Homolog of NCBI NO: 15233236 NR Description: hypothetical protein; protein id: At3g22000.1 thaliana] >gi|9279757|dbj|BAB01383.1| contains similarity to
MDYENTFSMHNPNNINGDTQLFNQKMKNFLYELALKADKPKADGTGLLYYAAGTKRLGKNKLYAMVQCTLDIFHCKVCLEWSIKELSKCCEGKQGARVLGTSCNVRYELYPFIRT

SEQ ID NO: 72364 - DNA, 903 bp, Arabidopsis thaliana
  misc_feature (1)..(903): Ceres Seq. ID no. 4930762
  misc_feature: MA Experiment ID: 20000306 Result: Down-regulated in Transcription
  misc_feature: MA Experiment 20000306 PARAMETER Experiment Name: At_Germinating_Seeds_Sub_P Parameter: Age (hr) Value: 6 vs. 0
  misc_feature: MA Experiment 20000306 PARAMETER Experiment Name: At_Germinating_Seeds_Sub_P Parameter: Organism Value: A. thaliana
  misc_feature: MA Experiment 20000306 PARAMETER Experiment Name: At_Germinating_Seeds_Sub_P Parameter: Plant Line Value: WS
  misc_feature: MA Experiment 20000306 PARAMETER Experiment Name: At_Germinating_Seeds_Sub_P Parameter: Tissue Value: Germinating Seeds
  misc_feature: MA Experiment ID: 20000307 Result: Down-regulated in Transcription
  misc_feature: MA Experiment 20000307 PARAMETER Experiment Name: At_Germinating_Seeds_Sub_P Parameter: Age (hr) Value: 24 vs. 0
  misc_feature: MA Experiment 20000307 PARAMETER Experiment Name: At_Germinating_Seeds_Sub_P Parameter: Organism Value: A. thaliana
  misc_feature: MA Experiment 20000307 PARAMETER Experiment Name: At_Germinating_Seeds_Sub_P Parameter: Plant Line Value: WS
  misc_feature: MA Experiment 20000307 PARAMETER Experiment Name: At_Germinating_Seeds_Sub_P Parameter: Tissue Value: Germinating Seeds
  misc_feature: MA Experiment ID: 20000314 Result: Down-regulated in Transcription
  misc_feature: MA Experiment 20000314 PARAMETER Experiment Name: At_14day_Shoots-Roots_Sub_P Parameter: Age (day) Value: 14
  misc_feature: MA Experiment 20000314 PARAMETER Experiment Name: At_14day_Shoots-Roots_Sub_P Parameter: Organism Value: A. thaliana
  misc_feature: MA Experiment 20000314 PARAMETER Experiment Name: At_14day_Shoots-Roots_Sub_P Parameter: Plant Line Value: WS
  misc_feature: MA Experiment 20000314 PARAMETER Experiment Name: At_14day_Shoots-Roots_Sub_P Parameter: Tissue Value: Roots vs. Whole Plant
  misc_feature: MA Experiment ID: 20000355 Result: Down-regulated in Transcription
  misc_feature: MA Experiment 20000355 PARAMETER Experiment Name: At_Siliques_Sub_P Parameter: Age (day) Value: 21
  misc_feature: MA Experiment 20000355 PARAMETER Experiment Name: At_Siliques_Sub_P Parameter: Organism Value: A. thaliana
  misc_feature: MA Experiment 20000355 PARAMETER Experiment Name: At_Siliques_Sub_P Parameter: Plant Line Value: WS
  misc_feature: MA Experiment 20000355 PARAMETER Experiment Name: At_Siliques_Sub_P Parameter: Tissue Value: Less Than 5mm Siliques vs. Whole Plant
atgctaaaaatttattttaaaacaccccacttggaaacacaaataaataaaaataaattcaaaacaatgtattcttcatcatctgtatcaaaacgcttcgttctagtccctattgtggtcgtggtgaccacacaactcctcctggtacgtaacgtttcttcactaaaccttaccaattcgtatcttcaccacaaatgcgtagtcaatcaagggaaatacaagccaggaagcaagtacgagaaatccctcgatgatatcatccaaagcttttcgaataaagataaagattcgtatggttttcgtaccggttacagcatgaaggcctacggtaaagaacctgatatggtctccatcacctaccagtgccgtatcgactctcgtgggcccaagtgccagtcctgcgttgtcacggccggttatgagcttcttcgtaagagatgtccgagatataaagaggcaataatatggtacgaccaatgtcttgtggagttttcttcgttagatacttctgggcagatcaattacgacgacaacttctgtatgcctagcgcgaagaacctgatcggcaattcaatctctcttgaagaaaggttgcatctcctcaacaatcttacaaagatagccgtcacgaaaatagataaaaacatagaaggtataaaaaaaccagtactgtatgcggcgggggagaagagactcgggacgaaaagtctatacggaatggtgcaatgttcggctgacttatctgttcagggttgtaatgagtgtatgttatattatatagtgcattttcaagagtgctgggaaagtaaacaaggagtaagagttttgagtagaagctgtaactttaggtatgagctttacccttttattagccccaagggttcttactataccaagttctaa

SEQ ID NO: 72365 - protein, 300 aa, Arabidopsis thaliana
  peptide (1)..(300): Ceres Seq. ID no. 4930763
  misc_feature (237)..(291): Pfam Name: Domain of unknown function DUF26 Pfam Description: Domain of unknown function DUF26
  misc_feature (1)..(300): Homolog of NCBI NO: 15233207 NR Description: receptor kinase, putative; protein id:
  misc_feature (23)..(300): Homolog of NCBI NO: 9279744 NR Description: contains similarity to receptor protein
  misc_feature (23)..(300): Homolog of NCBI NO: 15233204 NR Description: pollen coat receptor kinase, putative; protein At3g21920.1 [Arabidopsis thaliana] >gi|9279743|dbj|BAB01369.1| similarity to receptor protein kinase~gene_id:MZN24.4
  misc_feature (23)..(297): Homolog of NCBI NO: 15233201 NR Description: hypothetical protein; protein id: At3g21910.1 thaliana] >gi|9279742|dbj|BAB01368.1| contains similarity to
  misc_feature (112)..(300): Homolog of NCBI NO: 11994709 NR Description: contains similarity to receptor protein
  misc_feature (25)..(104): Homolog of NCBI NO: 11994709 NR Description: contains similarity to receptor protein
  misc_feature (23)..(295): Homolog of NCBI NO: 15233236 NR Description: hypothetical protein; protein id: At3g22000.1 thaliana] >gi|9279757|dbj|BAB01383.1| contains similarity to
  misc_feature (23)..(295): Homolog of NCBI NO: 15233368 NR Description: putative protein; protein id: At4g20680.1
  misc_feature (23)..(290): Homolog of NCBI NO: 15233238 NR Description: hypothetical protein; protein id: At3g22010.1 thaliana] >gi|9279758|dbj|BAB01384.1| contains similarity to
  misc_feature (29)..(290): Homolog of NCBI NO: 15233235 NR Description: receptor kinase common family, putative; protein At3g21990.1 [Arabidopsis thaliana] >gi|9279756|dbj|BAB01382.1| similarity to receptor kinase~gene_id:MZN24.17 [Arabidopsis
MLKIYFKTPHLETQINKNKFKTMYSSSSVSKRFVLVPIVVVVTTQLLLVRNVSSLNLTNSYLHHKCVVNQGKYKPGSKYEKSLDDIIQSFSNKDKDSYGFRTGYSMKAYGKEPDMVSITYQCRIDSRGPKCQSCVVTAGYELLRKRCPRYKEAIIWYDQCLVEFSSLDTSGQINYDDNFCMPSAKNLIGNSISLEERLHLLNNLTKIAVTKIDKNIEGIKKPVLYAAGEKRLGTKSLYGMVQCSADLSVQGCNECMLYYIVHFQECWESKQGVRVLSRSCNFRYELYPFISPKGSYYTKF

SEQ ID NO: 72366 - protein, 278 aa, Arabidopsis thaliana; identical to SEQ ID NO: 70179
  peptide (1)..(278): Ceres Seq. ID no. 4930764
  misc_feature (215)..(269): Pfam Name: Domain of unknown function DUF26 Pfam Description: Domain of unknown function DUF26
  misc_feature (1)..(278): Homolog of NCBI NO: 15233207 NR Description: receptor kinase, putative; protein id:
  misc_feature (1)..(278): Homolog of NCBI NO: 9279744 NR Description: contains similarity to receptor protein
  misc_feature (1)..(278): Homolog of NCBI NO: 15233204 NR Description: pollen coat receptor kinase, putative; protein At3g21920.1 [Arabidopsis thaliana] >gi|9279743|dbj|BAB01369.1| similarity to receptor protein kinase~gene_id:MZN24.4
  misc_feature (1)..(275): Homolog of NCBI NO: 15233201 NR Description: hypothetical protein; protein id: At3g21910.1 thaliana] >gi|9279742|dbj|BAB01368.1| contains similarity to
  misc_feature (90)..(278): Homolog of NCBI NO: 11994709 NR Description: contains similarity to receptor protein
  misc_feature (3)..(82): Homolog of NCBI NO: 11994709 NR Description: contains similarity to receptor protein
  misc_feature (1)..(273): Homolog of NCBI NO: 15233236 NR Description: hypothetical protein; protein id: At3g22000.1 thaliana] >gi|9279757|dbj|BAB01383.1| contains similarity to
  misc_feature (1)..(273): Homolog of NCBI NO: 15233368 NR Description: putative protein; protein id: At4g20680.1
  misc_feature (1)..(268): Homolog of NCBI NO: 15233238 NR Description: hypothetical protein; protein id: At3g22010.1 thaliana] >gi|9279758|dbj|BAB01384.1| contains similarity to
  misc_feature (7)..(268): Homolog of NCBI NO: 15233235 NR Description: receptor kinase common family, putative; protein At3g21990.1 [Arabidopsis thaliana] >gi|9279756|dbj|BAB01382.1| similarity to receptor kinase~gene_id:MZN24.17 [Arabidopsis

SEQ ID NO: 72367 - protein, 195 aa, Arabidopsis thaliana; identical to SEQ ID NO: 70180
  peptide (1)..(195): Ceres Seq. ID no. 4930765
  misc_feature (132)..(186): Pfam Name: Domain of unknown function DUF26 Pfam Description: Domain of unknown function DUF26
  misc_feature (1)..(195): Homolog of NCBI NO: 15233207 NR Description: receptor kinase, putative; protein id:
  misc_feature (1)..(195): Homolog of NCBI NO: 9279744 NR Description: contains similarity to receptor protein
  misc_feature (1)..(195): Homolog of NCBI NO: 15233204 NR Description: pollen coat receptor kinase, putative; protein At3g21920.1 [Arabidopsis thaliana] >gi|9279743|dbj|BAB01369.1| similarity to receptor protein kinase~gene_id:MZN24.4
  misc_feature (1)..(192): Homolog of NCBI NO: 15233201 NR Description: hypothetical protein; protein id: At3g21910.1 thaliana] >gi|9279742|dbj|BAB01368.1| contains similarity to
  misc_feature (7)..(195): Homolog of NCBI NO: 11994709 NR Description: contains similarity to receptor protein
  misc_feature (1)..(190): Homolog of NCBI NO: 15233236 NR Description: hypothetical protein; protein id: At3g22000.1 thaliana] >gi|9279757|dbj|BAB01383.1| contains similarity to
  misc_feature (1)..(190): Homolog of NCBI NO: 15233368 NR Description: putative protein; protein id: At4g20680.1
  misc_feature (1)..(185): Homolog of NCBI NO: 15233238 NR Description: hypothetical protein; protein id: At3g22010.1 thaliana] >gi|9279758|dbj|BAB01384.1| contains similarity to
  misc_feature (1)..(185): Homolog of NCBI NO: 15233235 NR Description: receptor kinase common family, putative; protein At3g21990.1 [Arabidopsis thaliana] >gi|9279756|dbj|BAB01382.1| similarity to receptor kinase~gene_id:MZN24.17 [Arabidopsis
  misc_feature (56)..(185): Homolog of NCBI NO: 9279741 NR Description: gene_id:MZN24.2~pir||T10609~similar to unknown

SEQ ID NO: 72368 - DNA, 1530 bp, Arabidopsis thaliana
  misc_feature (1)..(1530): Ceres Seq. ID no. 4930930
  misc_feature: MA Experiment ID: 20000355 Result: Down-regulated in Transcription
  misc_feature: MA Experiment 20000355 PARAMETER Experiment Name: At_Siliques_Sub_P Parameter: Age (day) Value: 21
  misc_feature: MA Experiment 20000355 PARAMETER Experiment Name: At_Siliques_Sub_P Parameter: Organism Value: A. thaliana
  misc_feature: MA Experiment 20000355 PARAMETER Experiment Name: At_Siliques_Sub_P Parameter: Plant Line Value: WS
  misc_feature: MA Experiment 20000355 PARAMETER Experiment Name: At_Siliques_Sub_P Parameter: Tissue Value: Less Than 5mm Siliques vs. Whole Plant
  misc_feature: MA Experiment ID: 20000440 Result: Down-regulated in Transcription
  misc_feature: MA Experiment 20000440 PARAMETER Experiment Name: At_Closed-Flower__Sub_P Parameter: Tissue Value: Closed Flower vs. Whole Plant
atggcgcgtagtaatagatgtgtaccccaaaatagttccattgtccaaattccgatagaagaagtattcaaaactcaactcaagtctcggtggcagcagatcacaatgtcatctgcttcttctccaccgccgccgcaggttttcgtcccagagccacttttttccgaacccccgcctcctcccaaagcacccgttaacgtttccctatctccaccgcctcctccgcggtctccctccacatccactccacctaggttgggaaatcgaaaccctccacctccagcgagtccctctggccaggaacctacaactccaactatgaccccaggcttttctctatcaccgccgtctccctcaagattatcaacgggagctgtggtcgggatctccataggaggaggagtttttgtgttgactttgatttttttcctttgtaagaagaaacgaccaagagacgataaagcacttccggctcccataggcatccatcaaagcactttcacttacggggagctagctagagccaccaataaattctctgaggccaatttgttaggagagggtggatttggattcgtatacaaaggtatattgaataatggaaatgaagttgcagttaaacagttgaaagtagggagtgctcagggtgagaaagagtttcaggctgaggttaatattattagccaaattcaccataggaatttggtttcccttgtcggttattgcatcgctggtgctcaaagattgcttgtctatgagtttgttcccaacaacactctcgagtttcacctccatgggaaaggacggcctacgatggaatggagtttaagattaaagattgctgtcagttcttccaaaggattgtcttatcttcatgaaaattgcaatcctaaaatcatccaccgtgatatcaaggcggcaaacatattgattgatttcaaatttgaagcaaaggttgctgattttggtctcgccaagattgctttggatacaaacactcatgtatctacacgtgttatgggaacctttgggtatttggctccggaatatgctgcaagtggaaagcttactgaaaagtctgatgtttactcattcggcgttgtacttttggagctaataacgggacgtcgccctgttgatgcaaacaatgtctatgcggatgacagcttggttgattgggcacgaccattgcttgtacaagcacttgaagaaagtaactttgaaggtttggctgatataaagctgaataatgagtatgatagagaagagatggctcgcatggttgcttgtgctgcagcttgtgtccgctatacagctcgccgaagacctcgcatggaccaggttgtgcgtgtgctagaaggaaacatatcgccgtcagatctgaatcaagggataacacccggtcacagcaatactgtatccgtccggctggacgctcgagcagtgagggtcaagccacacggggaaatggattcgagatggggaagatttaaaagaactgctcaacgttatggtggagattctctttaa

SEQ ID NO: 72369 - protein, 509 aa, Arabidopsis thaliana
  peptide (1)..(509): Ceres Seq. ID no. 4930931
  misc_feature (179)..(378): Pfam Name: Protein kinase domain Pfam Description: Protein kinase domain
  misc_feature (1)..(509): Homolog of NCBI NO: 15230129 NR Description: protein kinase, putative; protein id: At3g24540.1
  misc_feature (80)..(474): Homolog of NCBI NO: 9294048 NR Description: protein kinase-like protein [Arabidopsis thaliana]
  misc_feature (150)..(471): Homolog of NCBI NO: 15230108 NR Description: protein kinase, putative; protein id: At3g24400.1
  misc_feature (41)..(160): Homolog of NCBI NO: 15230108 NR Description: protein kinase, putative; protein id: At3g24400.1
  misc_feature (152)..(474): Homolog of NCBI NO: 13447449 NR Description: receptor protein kinase PERK1 [Brassica napus]
  misc_feature (37)..(154): Homolog of NCBI NO: 13447449 NR Description: receptor protein kinase PERK1 [Brassica napus]
  misc_feature (41)..(119): Homolog of NCBI NO: 15230108 NR Description: protein kinase, putative; protein id: At3g24400.1
  misc_feature (36)..(118): Homolog of NCBI NO: 15230108 NR Description: protein kinase, putative; protein id: At3g24400.1
  misc_feature (41)..(124): Homolog of NCBI NO: 15230108 NR Description: protein kinase, putative; protein id: At3g24400.1
  misc_feature (39)..(121): Homolog of NCBI NO: 15230108 NR Description: protein kinase, putative; protein id: At3g24400.1
MARSNRCVPQNSSIVQIPIEEVFKTQLKSRWQQITMSSASSPPPPQVFVPEPLFSEPPPPPKAPVNVSLSPPPPPRSPSTSTPPRLGNRNPPPPASPSGQEPTTPTMTPGFSLSPPSPSRLSTGAVVGISIGGGVFVLTLIFFLCKKKRPRDDKALPAPIGIHQSTFTYGELARATNKFSEANLLGEGGFGFVYKGILNNGNEVAVKQLKVGSAQGEKEFQAEVNIISQIHHRNLVSLVGYCIAGAQRLLVYEFVPNNTLEFHLHGKGRPTMEWSLRLKIAVSSSKGLSYLHENCNPKIIHRDIKAANILIDFKFEAKVADFGLAKIALDTNTHVSTRVMGTFGYLAPEYAASGKLTEKSDVYSFGVVLLELITGRRPVDANNVYADDSLVDWARPLLVQALEESNFEGLADIKLNNEYDREEMARMVACAAACVRYTARRRPRMDQVVRVLEGNISPSDLNQGITPGHSNTVSVRLDARAVRVKPHGEMDSRWGRFKRTAQRYGGDSL

SEQ ID NO: 72370 - protein, 474 aa, Arabidopsis thaliana
  peptide (1)..(474): Ceres Seq. ID no. 4930932
  misc_feature (144)..(343): Pfam Name: Protein kinase domain Pfam Description: Protein kinase domain
  misc_feature (1)..(474): Homolog of NCBI NO: 15230129 NR Description: protein kinase, putative; protein id: At3g24540.1
  misc_feature (45)..(439): Homolog of NCBI NO: 9294048 NR Description: protein kinase-like protein [Arabidopsis thaliana]
  misc_feature (115)..(436): Homolog of NCBI NO: 15230108 NR Description: protein kinase, putative; protein id: At3g24400.1
  misc_feature (6)..(125): Homolog of NCBI NO: 15230108 NR Description: protein kinase, putative; protein id: At3g24400.1
  misc_feature (117)..(439): Homolog of NCBI NO: 13447449 NR Description: receptor protein kinase PERK1 [Brassica napus]
  misc_feature (2)..(119): Homolog of NCBI NO: 13447449 NR Description: receptor protein kinase PERK1 [Brassica napus]
  misc_feature (6)..(84): Homolog of NCBI NO: 15230108 NR Description: protein kinase, putative; protein id: At3g24400.1
  misc_feature (1)..(83): Homolog of NCBI NO: 15230108 NR Description: protein kinase, putative; protein id: At3g24400.1
  misc_feature (6)..(89): Homolog of NCBI NO: 15230108 NR Description: protein kinase, putative; protein id: At3g24400.1
  misc_feature (4)..(86): Homolog of NCBI NO: 15230108 NR Description: protein kinase, putative; protein id: At3g24400.1
MSSASSPPPPQVFVPEPLFSEPPPPPKAPVNVSLSPPPPPRSPSTSTPPRLGNRNPPPPASPSGQEPTTPTMTPGFSLSPPSPSRLSTGAVVGISIGGGVFVLTLIFFLCKKKRPRDDKALPAPIGIHQSTFTYGELARATNKFSEANLLGEGGFGFVYKGILNNGNEVAVKQLKVGSAQGEKEFQAEVNIISQIHHRNLVSLVGYCIAGAQRLLVYEFVPNNTLEFHLHGKGRPTMEWSLRLKIAVSSSKGLSYLHENCNPKIIHRDIKAANILIDFKFEAKVADFGLAKIALDTNTHVSTRVMGTFGYLAPEYAASGKLTEKSDVYSFGVVLLELITGRRPVDANNVYADDSLVDWARPLLVQALEESNFEGLADIKLNNEYDREEMARMVACAAACVRYTARRRPRMDQVVRVLEGNISPSDLNQGITPGHSNTVSVRLDARAVRVKPHGEMDSRWGRFKRTAQRYGGDSL

SEQ ID NO: 72371 - protein, 403 aa, Arabidopsis thaliana
  peptide (1)..(403): Ceres Seq. ID no. 4930933
  misc_feature (73)..(272): Pfam Name: Protein kinase domain Pfam Description: Protein kinase domain
  misc_feature (1)..(403): Homolog of NCBI NO: 15230129 NR Description: protein kinase, putative; protein id: At3g24540.1
  misc_feature (1)..(368): Homolog of NCBI NO: 9294048 NR Description: protein kinase-like protein [Arabidopsis thaliana]
  misc_feature (44)..(365): Homolog of NCBI NO: 15230108 NR Description: protein kinase, putative; protein id: At3g24400.1
  misc_feature (1)..(54): Homolog of NCBI NO: 15230108 NR Description: protein kinase, putative; protein id: At3g24400.1
  misc_feature (46)..(368): Homolog of NCBI NO: 13447449 NR Description: receptor protein kinase PERK1 [Brassica napus]
  misc_feature (1)..(48): Homolog of NCBI NO: 13447449 NR Description: receptor protein kinase PERK1 [Brassica napus]
  misc_feature (1)..(13): Homolog of NCBI NO: 15230108 NR Description: protein kinase, putative; protein id: At3g24400.1
  misc_feature (1)..(12): Homolog of NCBI NO: 15230108 NR Description: protein kinase, putative; protein id: At3g24400.1
  misc_feature (1)..(18): Homolog of NCBI NO: 15230108 NR Description: protein kinase, putative; protein id: At3g24400.1
  misc_feature (1)..(15): Homolog of NCBI NO: 15230108 NR Description: protein kinase, putative; protein id: At3g24400.1
MTPGFSLSPPSPSRLSTGAVVGISIGGGVFVLTLIFFLCKKKRPRDDKALPAPIGIHQSTFTYGELARATNKFSEANLLGEGGFGFVYKGILNNGNEVAVKQLKVGSAQGEKEFQAEVNIISQIHHRNLVSLVGYCIAGAQRLLVYEFVPNNTLEFHLHGKGRPTMEWSLRLKIAVSSSKGLSYLHENCNPKIIHRDIKAANILIDFKFEAKVADFGLAKIALDTNTHVSTRVMGTFGYLAPEYAASGKLTEKSDVYSFGVVLLELITGRRPVDANNVYADDSLVDWARPLLVQALEESNFEGLADIKLNNEYDREEMARMVACAAACVRYTARRRPRMDQVVRVLEGNISPSDLNQGITPGHSNTVSVRLDARAVRVKPHGEMDSRWGRFKRTAQRYGGDSL

SEQ ID NO: 72372 - DNA, 2085 bp, Arabidopsis thaliana
  misc_feature (1)..(2085): Ceres Seq. ID no. 4930944
  misc_feature: MA Experiment ID: 20000227 Result: Down-regulated in Transcription
  misc_feature: MA Experiment 20000227 PARAMETER Experiment Name: At_Root-Tips-vs-Tops_P Parameter: Tissue Value: Root Tips vs. Root Tops
  misc_feature: MA Experiment ID: 20000451 Result: Down-regulated in Transcription
  misc_feature: MA Experiment 20000451 PARAMETER Experiment Name: At_CS6879_Shoots-Roots_P Parameter: Age (day) Value: 14
  misc_feature: MA Experiment 20000451 PARAMETER Experiment Name: At_CS6879_Shoots-Roots_P Parameter: Organism Value: A. thaliana
  misc_feature: MA Experiment 20000451 PARAMETER Experiment Name: At_CS6879_Shoots-Roots_P Parameter: Plant Line Value: CS6879 vs. WS
  misc_feature: MA Experiment 20000451 PARAMETER Experiment Name: At_CS6879_Shoots-Roots_P Parameter: Tissue Value: Roots
atgtcatcggcgccgcctcccggtggtactccgtcacctcctccacagcctctcccaattcctcctccgcctcagcctctgcccgttactcctccacctccacctactgcccttcctcccgcccttccccctccacctccgcctactgcccttccacccgcccttcctcctccacctccacctaccaccgttcctcctatacctccctctacgccttctcccccacctcccttgaccccttctcctctgcctccatctcccacaactccttcacctcccttgacgccttctcccacaactccttcacctcccttgactccttctcctccacctgccatcactccttcacctcctttgacaccatctcctctgcctccgtctcccaccaccccttcacctccgcctccatctccaagcattccttcacctcccttgacgccttcccctccaccgtcttctcccttgaggccttcttctcctccaccgccctctcccgccactccttcaactccgccaagatctccgccacctccctcaacacccactcctcctcctcgggtaggcagtctgagccctccacctccagcgagtccctctggcgggagatctcctagtactccatctaccactccaggctcttctccaccggcacaatcttccaaagaattatcaaagggagctatggtcgggatcgccataggaggaggatttgtgcttcttgtggcattggctttgatatttttcctttgtaagaagaaacgacgaagagacaatgaagcaccccctgctcccatagtgccaccaccgaagtctccctcctctgcaccaccacgtccaccgcatttcatgagcagcggcagcagcggagactacgactcaaactactcggatcaatcagttcttcctccaccatcaccagggcttgcattaggcttaggcatatatcaaggcactttcaattacgaggagctatctagagccaccaatggattctctgaggccaatttgttaggacaaggcggtttcggatacgtgttcaaaggtatgttacgtaatgggaaagaagttgctgtgaaacaattgaaagaagggagttctcaaggagaaagagagtttcaagcagaggttgggatcattagccgagtacatcatagacatttggttgctcttgtcggttattgcatcgccgatgctcaaagattgcttgtctatgagtttgttcccaacaacactctcgagtttcacctccatggaaagggacggcctacgatggaatggagttcaagattgaagattgctgttggttctgccaaaggattgtcttatcttcatgaaaattgcaatcctaaaattattcaccgtgatatcaaggcgtcaaacatattgatagatttcaaatttgaagcaaaggttgctgattttggtcttgccaagattgcttctgatacaaatactcatgtatctacacgtgtgatgggaacttttgggtatttggctccggaatatgcttcaagcggaaaactcacggaaaagtctgacgttttctcatttggcgttgtacttctggagctaataactggacgtcgccctattgatgtaaacaatgtccatgcagataacagcttggttgattgggcacgacctttgcttaaccaagtatctgaattaggaaactttgaggttgtggttgataaaaaactgaataatgagtatgacaaagaagagatggctcgcatggttgcttgtgccgcagcttgtgttcggtccacagctccacgtagacctcgcatggatcaggttgcacgtgtgctagaaggaaacatatcaccatcagatctaaaccaaggaatcacaccgggacacagcaatgtgtatggctcatctggaggaagcacagattatgactcgagccaagacaatgaaggcatgaacaagtttaggaaagtgggacttgagactcaagatttatatagtaacccaattagtgaatatgatttgtacccgtcctggtcgagcactgacggtcagaccacacagggaaaggcgaccggcaatattaaaagacccggtcaaggttatggttaa

SEQ ID NO: 72373 - protein, 694 aa, Arabidopsis thaliana
  peptide (1)..(694): Ceres Seq. ID no. 4930945
  misc_feature (331)..(530): Pfam Name: Protein kinase domain Pfam Description: Protein kinase domain
  misc_feature (266)..(694): Homolog of NCBI NO: 11994703 NR Description: somatic embryogenesis receptor kinase-like
  misc_feature (261)..(693): Homolog of NCBI NO: 13877617 NR Description: protein kinase-like protein [Arabidopsis thaliana]
  misc_feature (261)..(693): Homolog of NCBI NO: 15230130 NR Description: protein kinase, putative; protein id: supported by cDNA: 17909., supported by cDNA: gi_13877616,
  misc_feature (88)..(306): Homolog of NCBI NO: 13877617 NR Description: protein kinase-like protein [Arabidopsis thaliana]
  misc_feature (88)..(306): Homolog of NCBI NO: 15230130 NR Description: protein kinase, putative; protein id: supported by cDNA: 17909., supported by cDNA: gi_13877616,
  misc_feature (255)..(693): Homolog of NCBI NO: 13447449 NR Description: receptor protein kinase PERK1 [Brassica napus]
  misc_feature (85)..(303): Homolog of NCBI NO: 13447449 NR Description: receptor protein kinase PERK1 [Brassica napus]
  misc_feature (1)..(139): Homolog of NCBI NO: 13447449 NR Description: receptor protein kinase PERK1 [Brassica napus]
  misc_feature (32)..(167): Homolog of NCBI NO: 13447449 NR Description: receptor protein kinase PERK1 [Brassica napus]
  misc_feature (1)..(130): Homolog of NCBI NO: 13877617 NR Description: protein kinase-like protein [Arabidopsis thaliana]
MSSAPPPGGTPSPPPQPLPIPPPPQPLPVTPPPPPTALPPALPPPPPPTALPPALPPPPPPTTVPPIPPSTPSPPPPLTPSPLPPSPTTPSPPLTPSPTTPSPPLTPSPPPAITPSPPLTPSPLPPSPTTPSPPPPSPSIPSPPLTPSPPPSSPLRPSSPPPPSPATPSTPPRSPPPPSTPTPPPRVGSLSPPPPASPSGGRSPSTPSTTPGSSPPAQSSKELSKGAMVGIAIGGGFVLLVALALIFFLCKKKRRRDNEAPPAPIVPPPKSPSSAPPRPPHFMSSGSSGDYDSNYSDQSVLPPPSPGLALGLGIYQGTFNYEELSRATNGFSEANLLGQGGFGYVFKGMLRNGKEVAVKQLKEGSSQGEREFQAEVGIISRVHHRHLVALVGYCIADAQRLLVYEFVPNNTLEFHLHGKGRPTMEWSSRLKIAVGSAKGLSYLHENCNPKIIHRDIKASNILIDFKFEAKVADFGLAKIASDTNTHVSTRVMGTFGYLAPEYASSGKLTEKSDVFSFGVVLLELITGRRPIDVNNVHADNSLVDWARPLLNQVSELGNFEVVVDKKLNNEYDKEEMARMVACAAACVRSTAPRRPRMDQVARVLEGNISPSDLNQGITPGHSNVYGSSGGSTDYDSSQDNEGMNKFRKVGLETQDLYSNPISEYDLYPSWSSTDGQTTQGKATGNIKRPGQGYG

SEQ ID NO: 72374 - protein, 467 aa, Arabidopsis thaliana
  peptide (1)..(467): Ceres Seq. ID no. 4930946
  misc_feature (104)..(303): Pfam Name: Protein kinase domain Pfam Description: Protein kinase domain
  misc_feature (39)..(467): Homolog of NCBI NO: 11994703 NR Description: somatic embryogenesis receptor kinase-like
  misc_feature (34)..(466): Homolog of NCBI NO: 13877617 NR Description: protein kinase-like protein [Arabidopsis thaliana]
  misc_feature (34)..(466): Homolog of NCBI NO: 15230130 NR Description: protein kinase, putative; protein id: supported by cDNA: 17909., supported by cDNA: gi_13877616,
  misc_feature (1)..(79): Homolog of NCBI NO: 13877617 NR Description: protein kinase-like protein [Arabidopsis thaliana]
  misc_feature (1)..(79): Homolog of NCBI NO: 15230130 NR Description: protein kinase, putative; protein id: supported by cDNA: 17909., supported by cDNA: gi_13877616,
  misc_feature (28)..(466): Homolog of NCBI NO: 13447449 NR Description: receptor protein kinase PERK1 [Brassica napus]
  misc_feature (1)..(76): Homolog of NCBI NO: 13447449 NR Description: receptor protein kinase PERK1 [Brassica napus]
  misc_feature (75)..(396): Homolog of NCBI NO: 15230129 NR Description: protein kinase, putative; protein id: At3g24540.1
  misc_feature (1)..(38): Homolog of NCBI NO: 15230129 NR Description: protein kinase, putative; protein id: At3g24540.1
  misc_feature (70)..(400): Homolog of NCBI NO: 9294048 NR Description: protein kinase-like protein [Arabidopsis thaliana]
MVGIAIGGGFVLLVALALIFFLCKKKRRRDNEAPPAPIVPPPKSPSSAPPRPPHFMSSGSSGDYDSNYSDQSVLPPPSPGLALGLGIYQGTFNYEELSRATNGFSEANLLGQGGFGYVFKGMLRNGKEVAVKQLKEGSSQGEREFQAEVGIISRVHHRHLVALVGYCIADAQRLLVYEFVPNNTLEFHLHGKGRPTMEWSSRLKIAVGSAKGLSYLHENCNPKIIHRDIKASNILIDFKFEAKVADFGLAKIASDTNTHVSTRVMGTFGYLAPEYASSGKLTEKSDVFSFGVVLLELITGRRPIDVNNVHADNSLVDWARPLLNQVSELGNFEVVVDKKLNNEYDKEEMARMVACAAACVRSTAPRRPRMDQVARVLEGNISPSDLNQGITPGHSNVYGSSGGSTDYDSSQDNEGMNKFRKVGLETQDLYSNPISEYDLYPSWSSTDGQTTQGKATGNIKRPGQGYG

SEQ ID NO: 72375 - protein, 412 aa, Arabidopsis thaliana
  peptide (1)..(412): Ceres Seq. ID no. 4930947
  misc_feature (49)..(248): Pfam Name: Protein kinase domain Pfam Description: Protein kinase domain
  misc_feature (1)..(412): Homolog of NCBI NO: 11994703 NR Description: somatic embryogenesis receptor kinase-like
  misc_feature (1)..(411): Homolog of NCBI NO: 13877617 NR Description: protein kinase-like protein [Arabidopsis thaliana]
  misc_feature (1)..(411): Homolog of NCBI NO: 15230130 NR Description: protein kinase, putative; protein id: supported by cDNA: 17909., supported by cDNA: gi_13877616,
  misc_feature (1)..(24): Homolog of NCBI NO: 13877617 NR Description: protein kinase-like protein [Arabidopsis thaliana]
  misc_feature (1)..(24): Homolog of NCBI NO: 15230130 NR Description: protein kinase, putative; protein id: supported by cDNA: 17909., supported by cDNA: gi_13877616,
  misc_feature (1)..(411): Homolog of NCBI NO: 13447449 NR Description: receptor protein kinase PERK1 [Brassica napus]
  misc_feature (1)..(21): Homolog of NCBI NO: 13447449 NR Description: receptor protein kinase PERK1 [Brassica napus]
  misc_feature (20)..(341): Homolog of NCBI NO: 15230129 NR Description: protein kinase, putative; protein id: At3g24540.1
  misc_feature (15)..(345): Homolog of NCBI NO: 9294048 NR Description: protein kinase-like protein [Arabidopsis thaliana]
  misc_feature (1)..(412): Homolog of NCBI NO: 34904234 NR Description: putative receptor protein kinase PERK1 [Oryza
MSSGSSGDYDSNYSDQSVLPPPSPGLALGLGIYQGTFNYEELSRATNGFSEANLLGQGGFGYVFKGMLRNGKEVAVKQLKEGSSQGEREFQAEVGIISRVHHRHLVALVGYCIADAQRLLVYEFVPNNTLEFHLHGKGRPTMEWSSRLKIAVGSAKGLSYLHENCNPKIIHRDIKASNILIDFKFEAKVADFGLAKIASDTNTHVSTRVMGTFGYLAPEYASSGKLTEKSDVFSFGVVLLELITGRRPIDVNNVHADNSLVDWARPLLNQVSELGNFEVVVDKKLNNEYDKEEMARMVACAAACVRSTAPRRPRMDQVARVLEGNISPSDLNQGITPGHSNVYGSSGGSTDYDSSQDNEGMNKFRKVGLETQDLYSNPISEYDLYPSWSSTDGQTTQGKATGNIKRPGQGYG

SEQ ID NO: 72376 - DNA, 1140 bp, Arabidopsis thaliana
  misc_feature (1)..(1140): Ceres Seq. ID no. 4931036
  misc_feature: MA Experiment ID: 20000355 Result: Up-regulated in Transcription
  misc_feature: MA Experiment 20000355 PARAMETER Experiment Name: At_Siliques_Sub_P Parameter: Age (day) Value: 21
  misc_feature: MA Experiment 20000355 PARAMETER Experiment Name: At_Siliques_Sub_P Parameter: Organism Value: A. thaliana
  misc_feature: MA Experiment 20000355 PARAMETER Experiment Name: At_Siliques_Sub_P Parameter: Plant Line Value: WS
  misc_feature: MA Experiment 20000355 PARAMETER Experiment Name: At_Siliques_Sub_P Parameter: Tissue Value: Less Than 5mm Siliques vs. Whole Plant
  misc_feature: Pfam Name: Pkinase Pfam Description: Protein kinase domain
atgaaggttcttcgatgcctgctccttataagcaaccaaactcacctagtaagctctcgtcaatattcttggaaatgtgcacagagaacaacaggagaagtggtggctaagaacgcaaacggaccatcaaacaatatgggggcacgtattttcacgttccgtgagctagccaccgcgacaaagaattttagacaagagtgcctcattggtgaaggtgggttcgggagggtttacaaaggaaagcttgaaaatccagctcaggtcgtggcagtgaaacaacttgataggaatggattacaaggacaaagagagttcttggtcgaggtcttaatgcttagtcttctacatcataggaatcttgtgaatcttatcggttattgcgctgatggagaccaaagacttcttgtttacgagtatatgcctcttggatctctagaagatcatctcctcgatcttgaaccgggacaaaaaccactagactggaacactcgtattaagattgctttaggagcagcaaaaggaattgagtatctccatgatgaggctgatcctccagtgatttaccgagatcttaaatcgtcaaatatattacttgacccagaatacgttgcgaaattatcggatttcggtttagcaaagctaggtcctgttggagacacactacatgtgtcttcccgagttatgggaacttatggttattgtgctcctgaatatcaaagaactggctatctaacaaataaatcagatgtctacagctttggagttgtgttgttggaacttatatccggaagacgagtcatcgacacaatgagacctagtcatgaacaaaatctcgttacttgggcactaccgatttttagagatccgactagatattggcagctagctgatccattgcttcgaggcgactatccggaaaagagtttgaaccaagctatagctgtagcggcaatgtgcctgcatgaagaaccaacggttagaccactaatgagtgacgttattacagccttgagctttcttggtgcatcctcaaattcctccaataccggctctaaccatttgcaacaaaatcgatccaacaaatatcaggatgcagttcagtgggactcaagtcctagatatgctaattcgcaaatgtag

SEQ ID NO: 72377 - protein, 379 aa, Arabidopsis thaliana
  peptide (1)..(379): Ceres Seq. ID no. 4931037
  misc_feature: Pfam Name: Pkinase Pfam Description: Protein kinase domain
  misc_feature (1)..(379): Homolog of NCBI NO: 15230190 NR Description: protein kinase, putative; protein id: At3g24790.1
  misc_feature (28)..(379): Homolog of NCBI NO: 11994661 NR Description: receptor protein kinase-like protein [Arabidopsis
  misc_feature (43)..(347): Homolog of NCBI NO: 18397825 NR Description: putative protein kinase; protein id: At3g07070.1 thaliana] >gi|6642658|gb|AAF20239.1|AC012395_26 putative protein
  misc_feature (43)..(347): Homolog of NCBI NO: 28416685 NR Description: At3g07070 [Arabidopsis thaliana]
  misc_feature (28)..(373): Homolog of NCBI NO: 15235623 NR Description: putative protein; protein id: At4g13190.1
  misc_feature (33)..(377): Homolog of NCBI NO: 34907210 NR Description: putative serine/threonine kinase PBS1 protein
  misc_feature (26)..(342): Homolog of NCBI NO: 11259782 NR Description: protein kinase-like - Arabidopsis thaliana
  misc_feature (26)..(342): Homolog of NCBI NO: 30679773 NR Description: protein kinase family [Arabidopsis thaliana]
  misc_feature (13)..(359): Homolog of NCBI NO: 15238886 NR Description: protein kinase -like protein; protein id:
  misc_feature (33)..(353): Homolog of NCBI NO: 34394036 NR Description: putative protein serine/threonine kinase BNK1
MKVLRCLLLISNQTHLVSSRQYSWKCAQRTTGEVVAKNANGPSNNMGARIFTFRELATATKNFRQECLIGEGGFGRVYKGKLENPAQVVAVKQLDRNGLQGQREFLVEVLMLSLLHHRNLVNLIGYCADGDQRLLVYEYMPLGSLEDHLLDLEPGQKPLDWNTRIKIALGAAKGIEYLHDEADPPVIYRDLKSSNILLDPEYVAKLSDFGLAKLGPVGDTLHVSSRVMGTYGYCAPEYQRTGYLTNKSDVYSFGVVLLELISGRRVIDTMRPSHEQNLVTWALPIFRDPTRYWQLADPLLRGDYPEKSLNQAIAVAAMCLHEEPTVRPLMSDVITALSFLGASSNSSNTGSNHLQQNRSNKYQDAVQWDSSPRYANSQM

SEQ ID NO: 72378 - protein, 334 aa, Arabidopsis thaliana; identical to SEQ ID NO: 71413
  peptide (1)..(334): Ceres Seq. ID no. 4931038
  misc_feature: Pfam Name: Pkinase Pfam Description: Protein kinase domain
  misc_feature (1)..(334): Homolog of NCBI NO: 15230190 NR Description: protein kinase, putative; protein id: At3g24790.1
  misc_feature (1)..(334): Homolog of NCBI NO: 11994661 NR Description: receptor protein kinase-like protein [Arabidopsis
  misc_feature (1)..(302): Homolog of NCBI NO: 18397825 NR Description: putative protein kinase; protein id: At3g07070.1 thaliana] >gi|6642658|gb|AAF20239.1|AC012395_26 putative protein
  misc_feature (1)..(302): Homolog of NCBI NO: 28416685 NR Description: At3g07070 [Arabidopsis thaliana]
  misc_feature (1)..(328): Homolog of NCBI NO: 15235623 NR Description: putative protein; protein id: At4g13190.1
  misc_feature (1)..(332): Homolog of NCBI NO: 34907210 NR Description: putative serine/threonine kinase PBS1 protein
  misc_feature (1)..(297): Homolog of NCBI NO: 11259782 NR Description: protein kinase-like - Arabidopsis thaliana
  misc_feature (1)..(297): Homolog of NCBI NO: 30679773 NR Description: protein kinase family [Arabidopsis thaliana]
  misc_feature (1)..(314): Homolog of NCBI NO: 15238886 NR Description: protein kinase -like protein; protein id:
  misc_feature (1)..(308): Homolog of NCBI NO: 34394036 NR Description: putative protein serine/threonine kinase BNK1

SEQ ID NO: 72379 - protein, 269 aa, Arabidopsis thaliana
  peptide (1)..(269): Ceres Seq. ID no. 4931039
  misc_feature: Pfam Name: Pkinase Pfam Description: Protein kinase domain
  misc_feature (1)..(269): Homolog of NCBI NO: 15230190 NR Description: protein kinase, putative; protein id: At3g24790.1
  misc_feature (1)..(269): Homolog of NCBI NO: 11994661 NR Description: receptor protein kinase-like protein [Arabidopsis
  misc_feature (1)..(237): Homolog of NCBI NO: 18397825 NR Description: putative protein kinase; protein id: At3g07070.1 thaliana] >gi|6642658|gb|AAF20239.1|AC012395_26 putative protein
  misc_feature (1)..(237): Homolog of NCBI NO: 28416685 NR Description: At3g07070 [Arabidopsis thaliana]
  misc_feature (1)..(263): Homolog of NCBI NO: 15235623 NR Description: putative protein; protein id: At4g13190.1
  misc_feature (1)..(267): Homolog of NCBI NO: 34907210 NR Description: putative serine/threonine kinase PBS1 protein
  misc_feature (1)..(232): Homolog of NCBI NO: 11259782 NR Description: protein kinase-like - Arabidopsis thaliana
  misc_feature (1)..(232): Homolog of NCBI NO: 30679773 NR Description: protein kinase family [Arabidopsis thaliana]
  misc_feature (1)..(249): Homolog of NCBI NO: 15238886 NR Description: protein kinase -like protein; protein id:
  misc_feature (1)..(243): Homolog of NCBI NO: 34394036 NR Description: putative protein serine/threonine kinase BNK1
MLSLLHHRNLVNLIGYCADGDQRLLVYEYMPLGSLEDHLLDLEPGQKPLDWNTRIKIALGAAKGIEYLHDEADPPVIYRDLKSSNILLDPEYVAKLSDFGLAKLGPVGDTLHVSSRVMGTYGYCAPEYQRTGYLTNKSDVYSFGVVLLELISGRRVIDTMRPSHEQNLVTWALPIFRDPTRYWQLADPLLRGDYPEKSLNQAIAVAAMCLHEEPTVRPLMSDVITALSFLGASSNSSNTGSNHLQQNRSNKYQDAVQWDSSPRYANSQM

SEQ ID NO: 72380 - DNA, 1518 bp, Arabidopsis thaliana
  misc_feature (1)..(1518): Ceres Seq. ID no. 4931215
  misc_feature: MA Experiment ID: 20000306 Result: Up-regulated in Transcription
  misc_feature: MA Experiment 20000306 PARAMETER Experiment Name: At_Germinating_Seeds_Sub_P Parameter: Age (hr) Value: 6 vs. 0
  misc_feature: MA Experiment 20000306 PARAMETER Experiment Name: At_Germinating_Seeds_Sub_P Parameter: Organism Value: A. thaliana
  misc_feature: MA Experiment 20000306 PARAMETER Experiment Name: At_Germinating_Seeds_Sub_P Parameter: Plant Line Value: WS
  misc_feature: MA Experiment 20000306 PARAMETER Experiment Name: At_Germinating_Seeds_Sub_P Parameter: Tissue Value: Germinating Seeds
  misc_feature: MA Experiment ID: 20000355 Result: Up-regulated in Transcription
  misc_feature: MA Experiment 20000355 PARAMETER Experiment Name: At_Siliques_Sub_P Parameter: Age (day) Value: 21
  misc_feature: MA Experiment 20000355 PARAMETER Experiment Name: At_Siliques_Sub_P Parameter: Organism Value: A. thaliana
  misc_feature: MA Experiment 20000355 PARAMETER Experiment Name: At_Siliques_Sub_P Parameter: Plant Line Value: WS
  misc_feature: MA Experiment 20000355 PARAMETER Experiment Name: At_Siliques_Sub_P Parameter: Tissue Value: Less Than 5mm Siliques vs. Whole Plant
atgggtcggttagtagaagctatcattgcttcgatattattgtctttgtgttttacaataacaaagtcagctccaaaatctgctctcattaccaatcttcctggtttcaacggcacttttccatctaaacactatgccgggtatgtggcaatagataaacatcgtaataagaatctatggtattactttgtggaatctgagagaaatgcttcggtagatccagttgtgctttggcttaatggtggtccaggttgctctagcatggatggatttgtctacgagcacggtccattcaatttcgaaccaaaaaagaagaactcacatcttttgcatctcaatccttatagttggtccaaggtgtccaacatcatataccttgactctccagttggtgtgggattctcttactcaaatgacaacgccgattatacaactgatgatacaaaaaccgcgtctgatactcacacattccttctcgagtggtttaaaatgtttccggagtttcagtcaaatccgttctttatatcaggagaatcatatgctggtatctatgtgccaactcttgcggccgaggttgtcaaaggtcacaagaatgtgacaaagccggttatcaacttcaagggatatttggtgggtaatggtgttaccgatgaggtgtttgatggtaatgctcttgttcccttcactcatggcatgggactcatctctgatgaactctatgaggaaactaaattagtgtgcaacggaacatactataccggcggccagtcaggagtgagtaaagaatgtgctggcaaacttaaaacagtgtcagatactgtgaacttattgaacttatataacattctagaaccgtgctaccacggaacatctctatccgccttagatatcgagtttctgcctaagagtctccttactctaggcaaaacagaaaagccaatggcggtgagaaagagaatgtttggtcgtgcatggcctctaggtgccgttgtgcgtccaggcattgtacctagttggtctcaactcctcgctggctttggtgttccttgcattgacgatacagttgcgaccaaatggctaaacgatccagctgtaaggaaagcggttcatgctaaagaggtctctattcaattcatcatatttctctcaatcagtatttcgattggaaattgggagttatgttcaagcaacctcgaatataggcacgacaccggtagcatgatcgaataccatagaaacctcactcttagtggctttcgagctctcattttcagtggagatcatgatatgtgtgtaccatatactggctctgaagcatggactaaggcaatgggatacaaagtggttgatgaatggaggccatggatgtcaaataaccaagtcgccgggtttacacaagggtatgccaataatctcacatttctaaccatcaagggtgcaggacataccgttccagaatacaaaccgcgtgaatctttggacttctatagtcgtttcctagcaggagaaaagatatag

SEQ ID NO: 72381 - protein, 505 aa, Arabidopsis thaliana
  peptide (1)..(505): Ceres Seq. ID no. 4931216
  misc_feature (34)..(502): Pfam Name: Serine carboxypeptidase Pfam Description: Serine carboxypeptidase
  misc_feature (1)..(505): Homolog of NCBI NO: 15230836 NR Description: serine carboxypeptidase, putative; protein id:
  misc_feature (1)..(505): Homolog of NCBI NO: 9279723 NR Description: serine carboxypeptidase I [Arabidopsis thaliana]
  misc_feature (4)..(505): Homolog of NCBI NO: 22531054 NR Description: serine carboxypeptidase 1 precursor-like protein
  misc_feature (4)..(486): Homolog of NCBI NO: 30682276 NR Description: serine carboxypeptidase -related [Arabidopsis
  misc_feature (4)..(243): Homolog of NCBI NO: 25289790 NR Description: hypothetical protein AT4g12910 [imported] -
  misc_feature (272)..(486): Homolog of NCBI NO: 25289790 NR Description: hypothetical protein AT4g12910 [imported] -
  misc_feature (13)..(505): Homolog of NCBI NO: 7271957 NR Description: wound-inducible carboxypeptidase [Lycopersicon
  misc_feature (20)..(505): Homolog of NCBI NO: 584892 NR Description: Serine carboxypeptidase I precursor
  misc_feature (10)..(505): Homolog of NCBI NO: 2815493 NR Description: Serine carboxypeptidase I precursor
  misc_feature (10)..(505): Homolog of NCBI NO: 38346978 NR Description: OSJNBb0062H02.3 [Oryza sativa (japonica
MGRLVEAIIASILLSLCFTITKSAPKSALITNLPGFNGTFPSKHYAGYVAIDKHRNKNLWYYFVESERNASVDPVVLWLNGGPGCSSMDGFVYEHGPFNFEPKKKNSHLLHLNPYSWSKVSNIIYLDSPVGVGFSYSNDNADYTTDDTKTASDTHTFLLEWFKMFPEFQSNPFFISGESYAGIYVPTLAAEVVKGHKNVTKPVINFKGYLVGNGVTDEVFDGNALVPFTHGMGLISDELYEETKLVCNGTYYTGGQSGVSKECAGKLKTVSDTVNLLNLYNILEPCYHGTSLSALDIEFLPKSLLTLGKTEKPMAVRKRMFGRAWPLGAVVRPGIVPSWSQLLAGFGVPCIDDTVATKWLNDPAVRKAVHAKEVSIQFIIFLSISISIGNWELCSSNLEYRHDTGSMIEYHRNLTLSGFRALIFSGDHDMCVPYTGSEAWTKAMGYKVVDEWRPWMSNNQVAGFTQGYANNLTFLTIKGAGHTVPEYKPRESLDFYSRFLAGEKI

SEQ ID NO: 72382 - protein, 418 aa, Arabidopsis thaliana
  peptide (1)..(418): Ceres Seq. ID no. 4931217
  misc_feature (1)..(415): Pfam Name: Serine carboxypeptidase Pfam Description: Serine carboxypeptidase
  misc_feature (1)..(418): Homolog of NCBI NO: 15230836 NR Description: serine carboxypeptidase, putative; protein id:
  misc_feature (1)..(418): Homolog of NCBI NO: 9279723 NR Description: serine carboxypeptidase I [Arabidopsis thaliana]
  misc_feature (1)..(418): Homolog of NCBI NO: 22531054 NR Description: serine carboxypeptidase 1 precursor-like protein
  misc_feature (1)..(399): Homolog of NCBI NO: 30682276 NR Description: serine carboxypeptidase -related [Arabidopsis
  misc_feature (1)..(156): Homolog of NCBI NO: 25289790 NR Description: hypothetical protein AT4g12910 [imported] -
  misc_feature (185)..(399): Homolog of NCBI NO: 25289790 NR Description: hypothetical protein AT4g12910 [imported] -
  misc_feature (1)..(418): Homolog of NCBI NO: 7271957 NR Description: wound-inducible carboxypeptidase [Lycopersicon
  misc_feature (1)..(418): Homolog of NCBI NO: 584892 NR Description: Serine carboxypeptidase I precursor
  misc_feature (1)..(418): Homolog of NCBI NO: 2815493 NR Description: Serine carboxypeptidase I precursor
  misc_feature (1)..(418): Homolog of NCBI NO: 38346978 NR Description: OSJNBb0062H02.3 [Oryza sativa (japonica
MDGFVYEHGPFNFEPKKKNSHLLHLNPYSWSKVSNIIYLDSPVGVGFSYSNDNADYTTDDTKTASDTHTFLLEWFKMFPEFQSNPFFISGESYAGIYVPTLAAEVVKGHKNVTKPVINFKGYLVGNGVTDEVFDGNALVPFTHGMGLISDELYEETKLVCNGTYYTGGQSGVSKECAGKLKTVSDTVNLLNLYNILEPCYHGTSLSALDIEFLPKSLLTLGKTEKPMAVRKRMFGRAWPLGAVVRPGIVPSWSQLLAGFGVPCIDDTVATKWLNDPAVRKAVHAKEVSIQFIIFLSISISIGNWELCSSNLEYRHDTGSMIEYHRNLTLSGFRALIFSGDHDMCVPYTGSEAWTKAMGYKVVDEWRPWMSNNQVAGFTQGYANNLTFLTIKGAGHTVPEYKPRESLDFYSRFLAGEKI

SEQ ID NO: 72383 - protein, 342 aa, Arabidopsis thaliana
  peptide (1)..(342): Ceres Seq. ID no. 4931218
  misc_feature (1)..(339): Pfam Name: Serine carboxypeptidase Pfam Description: Serine carboxypeptidase
  misc_feature (1)..(342): Homolog of NCBI NO: 15230836 NR Description: serine carboxypeptidase, putative; protein id:
  misc_feature (1)..(342): Homolog of NCBI NO: 9279723 NR Description: serine carboxypeptidase I [Arabidopsis thaliana]
  misc_feature (1)..(342): Homolog of NCBI NO: 22531054 NR Description: serine carboxypeptidase 1 precursor-like protein
  misc_feature (1)..(323): Homolog of NCBI NO: 30682276 NR Description: serine carboxypeptidase -related [Arabidopsis
  misc_feature (1)..(80): Homolog of NCBI NO: 25289790 NR Description: hypothetical protein AT4g12910 [imported] -
  misc_feature (109)..(323): Homolog of NCBI NO: 25289790 NR Description: hypothetical protein AT4g12910 [imported] -
  misc_feature (1)..(342): Homolog of NCBI NO: 7271957 NR Description: wound-inducible carboxypeptidase [Lycopersicon
  misc_feature (1)..(342): Homolog of NCBI NO: 584892 NR Description: Serine carboxypeptidase I precursor
  misc_feature (1)..(342): Homolog of NCBI NO: 2815493 NR Description: Serine carboxypeptidase I precursor
  misc_feature (1)..(342): Homolog of NCBI NO: 38346978 NR Description: OSJNBb0062H02.3 [Oryza sativa (japonica
MFPEFQSNPFFISGESYAGIYVPTLAAEVVKGHKNVTKPVINFKGYLVGNGVTDEVFDGNALVPFTHGMGLISDELYEETKLVCNGTYYTGGQSGVSKECAGKLKTVSDTVNLLNLYNILEPCYHGTSLSALDIEFLPKSLLTLGKTEKPMAVRKRMFGRAWPLGAVVRPGIVPSWSQLLAGFGVPCIDDTVATKWLNDPAVRKAVHAKEVSIQFIIFLSISISIGNWELCSSNLEYRHDTGSMIEYHRNLTLSGFRALIFSGDHDMCVPYTGSEAWTKAMGYKVVDEWRPWMSNNQVAGFTQGYANNLTFLTIKGAGHTVPEYKPRESLDFYSRFLAGEKI

SEQ ID NO: 72384 - DNA, 1503 bp, Arabidopsis thaliana
  misc_feature (1)..(1503): Ceres Seq. ID no. 4931385
  misc_feature: MA Experiment ID: 20000185 Result: Up-regulated in Transcription
  misc_feature: MA Experiment 20000185 PARAMETER Experiment Name: At_Roots__P Parameter: Age (day) Value: 7 vs. 21
  misc_feature: MA Experiment 20000185 PARAMETER Experiment Name: At_Roots__P Parameter: Organism Value: A. thaliana
  misc_feature: MA Experiment 20000185 PARAMETER Experiment Name: At_Roots__P Parameter: Tissue Value: Roots vs. Whole Plant
  misc_feature: MA Experiment ID: 20000227 Result: Down-regulated in Transcription
  misc_feature: MA Experiment 20000227 PARAMETER Experiment Name: At_Root-Tips-vs-Tops_P Parameter: Tissue Value: Root Tips vs. Root Tops
  misc_feature: MA Experiment ID: 20000265 Result: Up-regulated in Transcription
  misc_feature: MA Experiment 20000265 PARAMETER Experiment Name: At_Open_Flower_P Parameter: Age (day) Value: 21
  misc_feature: MA Experiment 20000265 PARAMETER Experiment Name: At_Open_Flower_P Parameter: Plant Line Value: WS
  misc_feature: MA Experiment 20000265 PARAMETER Experiment Name: At_Open_Flower_P Parameter: Tissue Value: Closed Flower vs. Whole Plant
  misc_feature: MA Experiment ID: 20000437 Result: Down-regulated in Transcription
  misc_feature: MA Experiment 20000437 PARAMETER Experiment Name: At_Drought_P Parameter: Age (day) Value: 8
  misc_feature: MA Experiment 20000437 PARAMETER Experiment Name: At_Drought_P Parameter: Organism Value: A. thaliana
  misc_feature: MA Experiment 20000437 PARAMETER Experiment Name: At_Drought_P Parameter: Plant Line Value: WS
  misc_feature: MA Experiment 20000437 PARAMETER Experiment Name: At_Drought_P Parameter: Timepoint (hr) Value: 24
  misc_feature: MA Experiment 20000437 PARAMETER Experiment Name: At_Drought_P Parameter: Tissue Value: Whole Plant
  misc_feature: MA Experiment 20000437 PARAMETER Experiment Name: At_Drought_P Parameter: Treatment Value: Drought vs. No Drought
  misc_feature: MA Experiment ID: 20000438 Result: Up-regulated in Transcription
  misc_feature: MA Experiment 20000438 PARAMETER Experiment Name: At_Shoots__P Parameter: Age (day) Value: 14
  misc_feature: MA Experiment 20000438 PARAMETER Experiment Name: At_Shoots__P Parameter: Tissue Value: Shoots vs. Whole Plant
  misc_feature: MA Experiment ID: 20000439 Result: Up-regulated in Transcription
  misc_feature: MA Experiment 20000439 PARAMETER Experiment Name: At_Roots__P Parameter: Age (day) Value: 14 vs. 21
  misc_feature: MA Experiment 20000439 PARAMETER Experiment Name: At_Roots__P Parameter: Organism Value: A. thaliana
  misc_feature: MA Experiment 20000439 PARAMETER Experiment Name: At_Roots__P Parameter: Tissue Value: Roots vs. Whole Plant
  misc_feature: MA Experiment ID: 20000451 Result: Down-regulated in Transcription
  misc_feature: MA Experiment 20000451 PARAMETER Experiment Name: At_CS6879_Shoots-Roots_P Parameter: Age (day) Value: 14
  misc_feature: MA Experiment 20000451 PARAMETER Experiment Name: At_CS6879_Shoots-Roots_P Parameter: Organism Value: A. thaliana
  misc_feature: MA Experiment 20000451 PARAMETER Experiment Name: At_CS6879_Shoots-Roots_P Parameter: Plant Line Value: CS6879 vs. WS
  misc_feature: MA Experiment 20000451 PARAMETER Experiment Name: At_CS6879_Shoots-Roots_P Parameter: Tissue Value: Roots
  misc_feature: MA Experiment ID: 20000460 Result: Down-regulated in Transcription
  misc_feature: MA Experiment 20000460 PARAMETER Experiment Name: At_10percent_PEG_P Parameter: Age (day) Value: 12
  misc_feature: MA Experiment 20000460 PARAMETER Experiment Name: At_10percent_PEG_P Parameter: Organism Value: A. thaliana
  misc_feature: MA Experiment 20000460 PARAMETER Experiment Name: At_10percent_PEG_P Parameter: Plant Line Value: WS
  misc_feature: MA Experiment 20000460 PARAMETER Experiment Name: At_10percent_PEG_P Parameter: Timepoint (day) Value: 12
  misc_feature: MA Experiment 20000460 PARAMETER Experiment Name: At_10percent_PEG_P Parameter: Tissue Value: Whole Plant
  misc_feature: MA Experiment 20000460 PARAMETER Experiment Name: At_10percent_PEG_P Parameter: Treatment Value: 10percent PEG vs. No Treatment
  misc_feature: MA Experiment ID: 20000527 Result: Down-regulated in Transcription
  misc_feature: MA Experiment 20000527 PARAMETER Experiment Name: At_10percent_PEG_P Parameter: Age (day) Value: 20
  misc_feature: MA Experiment 20000527 PARAMETER Experiment Name: At_10percent_PEG_P Parameter: Organism Value: A. thaliana
  misc_feature: MA Experiment 20000527 PARAMETER Experiment Name: At_10percent_PEG_P Parameter: Plant Line Value: WS
  misc_feature: MA Experiment 20000527 PARAMETER Experiment Name: At_10percent_PEG_P Parameter: Timepoint (day) Value: 20
  misc_feature: MA Experiment 20000527 PARAMETER Experiment Name: At_10percent_PEG_P Parameter: Tissue Value: Whole Plant
  misc_feature: MA Experiment 20000527 PARAMETER Experiment Name: At_10percent_PEG_P Parameter: Treatment Value: 10percent PEG vs. No Treatment
  misc_feature: MA Experiment ID: 20000573 Result: Down-regulated in Transcription
  misc_feature: MA Experiment 20000573 PARAMETER Experiment Name: At_100uM_ABA_Mutants__P Parameter: Organism Value: A. thaliana
  misc_feature: MA Experiment 20000573 PARAMETER Experiment Name: At_100uM_ABA_Mutants__P Parameter: Plant Line Value: CS22 vs. Ler wt
  misc_feature: MA Experiment 20000573 PARAMETER Experiment Name: At_100uM_ABA_Mutants__P Parameter: Timepoint (hr) Value: N/A
  misc_feature: MA Experiment 20000573 PARAMETER Experiment Name: At_100uM_ABA_Mutants__P Parameter: Tissue Value: Whole Plant
  misc_feature: MA Experiment 20000573 PARAMETER Experiment Name: At_100uM_ABA_Mutants__P Parameter: Treatment Value: None
atggctactatttggtttctcccacttctctttctctcttgtcttcttcttgccgctttaagactcaagaagcggcggcaacatcaacggaaaccaccgtctccaccgggctttccgatcatcggaaacttgcatcagcttggggagctaccacatcaatctctatggagtctctccaaaaaatatggtcctgtaatgcttttgaagtttggaagtatcccaacggttgttgtctcttcttctgaaacagcaaagcaagctctgaaaatccatgacctcaattgttgtagccgtccaagcttagcaggaccaagagcgctctcttacaactacttggacatagttttctctccttttaatgattactggaaagaattgaggaggatgtgtgtgcaagagcttttcagtcctaaacaagttcatttgattcaacccatcagggaagaggaagtcaagaaactgatgaattcattctcggaatcagctgctcagaaaactccggttaacttgagcgagaagttagcttctttaactgttggcgtgatatgcaaggcagcatttggtgtgagtttccaaggaactgtgcttaatagtgacaacttcgacaagttaatccatgatgcatttttgttcttggggagcttctctgcctcggattattttccaaatgtcggctggatcatcgactggctcacggggttacaagggcagagagagagaagtgtgagaggtcttgacgcattctatgaacaaatgtttgatctacataaacaggggaacaaagaaggagttgaggattttgtggacttgctcttgaagttggagaaagaagaaactgttcttggatatggcaagctcacaagaaaccatatcaaagcagtcttaatgaatgttcttcttggaggcattggaacttcggctataacaatgacatgggcaatgacagaacttatgagaaacccgcgagtaatgaagaaagttcaatccgaaatcagaaatcaaattgggggcaagtcaatgatctgcttggatgacatagaccaactccattacctgaaaatggtgatcaatgaaacatggaggctacatcctccagcaccacttctagttccaagagaagtaatgtctgaatttgaaatcaacggctacacgattccagccaagacaagactttatgtgaatgtatggggtatcgggcgtgatccagatacttggaaagatccagaggagtttcttccagagagatttgttaacagtaacattgatgcaaaaggacaaaactttgagctgttaccatttggaagtggtaggagaatgtgtcctgccatgtacatggggacaacaatggtggagtttggtctagccaatctcttgtaccattttgactggaaattaccagaaggcatggtggtcgaagacattgacatggaagaatctcctggactcaatgccagcaagaaaaatgagcttgtacttgttcctaggaagtatttaaatctgtaa

SEQ ID NO: 72385 - protein, 500 aa, Arabidopsis thaliana
  peptide (1)..(500): Ceres Seq. ID no. 4931386
  misc_feature (32)..(492): Pfam Name: Cytochrome P450 Pfam Description: Cytochrome P450
  misc_feature (1)..(500): Homolog of NCBI NO: 15231542 NR Description: cytochrome p450 family; protein id: At3g26330.1
  misc_feature (1)..(500): Homolog of NCBI NO: 9294291 NR Description: cytochrome p450 [Arabidopsis thaliana]
  misc_feature (1)..(499): Homolog of NCBI NO: 15231541 NR Description: cytochrome p450 family; protein id: At3g26320.1 thaliana] >gi|13878377|sp|Q9LIP4|C72X_ARATH Cytochrome P450 71B36
  misc_feature (1)..(498): Homolog of NCBI NO: 15227003 NR Description: cytochrome p450 family; protein id: At2g02580.1, by cDNA: gi_18175890 [Arabidopsis thaliana] Cytochrome P450 71B9 >gi|20197089|gb|AAC18928.2| putative
  misc_feature (1)..(498): Homolog of NCBI NO: 18175891 NR Description: putative cytochrome P450 protein [Arabidopsis
  misc_feature (1)..(498): Homolog of NCBI NO: 7430672 NR Description: probable cytochrome P450 At2g02580 [imported] -
  misc_feature (1)..(499): Homolog of NCBI NO: 15231538 NR Description: cytochrome p450 family; protein id: At3g26300.1 thaliana] >gi|13878379|sp|Q9LIP6|C72V_ARATH Cytochrome P450 71B34
  misc_feature (1)..(494): Homolog of NCBI NO: 15231539 NR Description: cytochrome p450 family; protein id: At3g26310.1 thaliana] >gi|13878378|sp|Q9LIP5|C72W_ARATH Cytochrome P450 71B35
  misc_feature (1)..(499): Homolog of NCBI NO: 15231537 NR Description: cytochrome p450 family; protein id: At3g26290.1 thaliana] >gi|13878380|sp|Q9LTL0|C72Q_ARATH Cytochrome P450 71B26
  misc_feature (1)..(498): Homolog of NCBI NO: 13878390 NR Description: Cytochrome P450 71B10 >gi|8777359|dbj|BAA96949.1|
MATIWFLPLLFLSCLLLAALRLKKRRQHQRKPPSPPGFPIIGNLHQLGELPHQSLWSLSKKYGPVMLLKFGSIPTVVVSSSETAKQALKIHDLNCCSRPSLAGPRALSYNYLDIVFSPFNDYWKELRRMCVQELFSPKQVHLIQPIREEEVKKLMNSFSESAAQKTPVNLSEKLASLTVGVICKAAFGVSFQGTVLNSDNFDKLIHDAFLFLGSFSASDYFPNVGWIIDWLTGLQGQRERSVRGLDAFYEQMFDLHKQGNKEGVEDFVDLLLKLEKEETVLGYGKLTRNHIKAVLMNVLLGGIGTSAITMTWAMTELMRNPRVMKKVQSEIRNQIGGKSMICLDDIDQLHYLKMVINETWRLHPPAPLLVPREVMSEFEINGYTIPAKTRLYVNVWGIGRDPDTWKDPEEFLPERFVNSNIDAKGQNFELLPFGSGRRMCPAMYMGTTMVEFGLANLLYHFDWKLPEGMVVEDIDMEESPGLNASKKNELVLVPRKYLNL
